United States Patent Application Publication US 2004/0265849 A1 - sequence listing, part 5

SEQ ID NO: 6817 - DNA, 717651 bp, Homo sapiens
  misc_feature (1)...(717651): n = A,T,C or G, or insertion/deletion polymorphism (see Tables 1-2)
ccaggctggtctcgaactcctgacctcaggtgatccacctgcctcggcctcccaaagtgttgggattataggcatgaatcaccacgcccaggcattctcaaagttttttaaaggagagagagagagagggagagagagaaagagaaaaaaaaaacttttggtactttttttttttttttttgtctttttatagagatagggtctcactctctctcccaggctggagtccaacagtgcaatcatagctcactgcagcctccaactcctgggctcaagcaattctcccaccttggccttccaggtagctggtactacaggcatgcaccaccatgcttggccaaatttttaactttctgtaggtcttgaacttctgggctcaagtgatcctcccacctctgcctcccatgtagctgcaattacaggtgtaagccaccacatccaattaactttcagtaccttatgttcctgataaagccatgcctgcctcagagggaaggcaggatggacttttacccaccagagaatcctggttcaaatgctgaaattcccccaaatagcagcaatcttactacctgcacctttggcttcccccagcaacctagaaggccagcactctaagcctcaccgaagaacttgactctgaacttccctctcaaagattaggctgaaataactggcatttatattttattttatttatttatcttgagacggagtttcactcttattgcccaggctggagtgcaatggtgccatctcagctcactgcaacctccgcctcctgggttcaactaattctcctgcctcagcctcaccagtagctgggattacaggtgtctgccacaacacccagctaattttttatatttttagtagagacgaggtttcaccatgttggccaggctagtcttgaactcccgacctcaggtgatccacctgccttggcctcccaaagtgctgggattataggcgtgagccactgtgcccggccctattttattttttgagatagtgtgtcactctgtcgtccagattggagtgaagggacatgatcatggctcactgcagcctcaaactcctgggttcaagtgatccttcagcctcatagctggaaccacaggtgtttgccactacacccagctaatttttaactttcgtatagatagagtctcactatgttacccaggctggtctcaaactcctgggctcaagtgatcctcctacctcagcctcccaaagtctgcaattacaggcatgagccaccatgctcagctagaactggcatttataaagcatcaccacgaagcacctcttcatatcactggactttccaaatcctgcctccagtcaaggtggcccgccagaaagtgagtggcttaggtggctttattccactctgctgcacatttgtctttaacagagttgagtgttaatatcacctgctctgccagcctccaccttgttctgccaactttcatggacttcaccaacaagctacctcattcttcagctctgggacctgggaaggagggagatatttgactggggacttgggctctgagtggtgggtcatggcaaacatgggtgcttactttctgcagggatgggccttttctggcattctgaggctgggtgacaccggggcttctagaagtggtgatctcagcctggactcaagtttttgcaaagtgggctctctcagcagggcagtgctgacataccttccagcagtgtctgggaaccagaacaggagaacgaaaatgcagagaagggccaggcatggtggctcacacctgtaatcccagcactttgggaggctgaggtgggtggatcatttgaggtcaggagtttgagaccagcttggccaacatggtgagaccctgtctctactataaagtataaaaattagccgggcgtggtggtgcacgcctgtaatcccagctacttgggaggctgaggtgggagaatcccttgaacccggaaggcagaggttgcagtgagccaagatcgtgctactgcactccagcctaggcaacagcaagactgcatctcaaaaaaaaaaaaaaaaaaaaaaaaggcagtggatactttggtgatggttgctgatggactggttgagggcaaccctggaatattttgaagggggctctatttgggcaggtgaggacttggatatgtattcccaatgtgtcatgaaattttatgaattacaaaaaaattttcatgaattttgactcaagacaccaaaggctctggcatctagaattatgcagtactagtttttcatccattattaatataaacggaatcactgcatctagataaactaggtagatttaaatacagctgtaaggctttatctggttggtggaatcagtgttattaatcctctggatcatattttttaaaaacatccatatccttattaggtattgaatagttaaaggaattgatgtacataaaatggtacccacatatcctgatgtcatctctgttatgaaagcttcccccttctctagtactgccataaacactttgctggcactgaatatttaatgtgttgaattatagttattggaatagctatcttattctgacctctagattgtccttcttttactcacctttataattctgtaatatttagccagtgcttcctgcaaggaaggtctttactaactgcatgtggaatcaaatttaagtgaattgagtgcaggcctgagagtcagagctggagtttttggttgtagtcctagcccagtcactggaaagttgtatcacctggctagtcatttctttgagccttggtcttctcctgtcctcctcatctctcctgcctcctccactgtcatcatttgctatcctgtgctggactttgttaccctctgccttcattacggtaactggactgtactacgctatacattcccatgtggcagcgtggcagcatgtactgtttttttttttttcttttgagacagagtttcattcttgttgccctcrgctcaccrcaacctcggcctcctgggttcaagcgattctcctgcttcagcctcccgagtagctgggattacaggcatgtgccaccatgcccggctaattttgtatttttagtagagacggggtttctccatgttggtcaggctggtctcgaactcccgagctcaggtatctgcccacttcggcctcccaaaatgctgggattacaggcgtgagccaccatacccagccgtactgttttctgatacattattttatttaacattcataacttatgaccaggtgccgtggctcacacctgtaatcccagcactatgggaggctgaagcgggagaatcgcttgaggacaggagttcaagaccagcctgggccacatagtgagaccttatctctacaaacaatttaaaaattagctgggcatagtggtatttgtctgtagtcttagctgctctagaggctgaggaaggattgcttgagcctgggagtctgaggcagcagtgagctaagattgtgccattgccctttagcctgaacaacagagcaagactctatctcaaaaaaaaagaaagactgactcataacctatgagatctatgagatggatatggatatgataagctctacttctctacttttcagctgataaaacgggctggagaaagagtgactgttgtgtctaaggcactagtaagtggccaaatatggatctgaacctagatcagtgtgatgtcctatgtactctggttattactgaaaaatgactttcgattagaattattttgagaaagccccactctaatttattatactcaagctagtatacccctctgaactagtgtagcatcaaaactagtatacattctctgccgcgcggtggctcacgctgcaatcccagcactttgggaggctgaggcgggcggattgaccagcctggccagcatggtgagaccctgtctctaactgaaaatacaataattagctgggcgtggtggcgggcacctataatcccagctactcgggaggcggaggcaggagaatcatttgaatccagaaggcggaggttgcactgagccgaaatcacgccactgcgctccagcctgcgcaacagagcgagacttggtctcaaaataaataaataaataaataaataaaaataaatacataaataaatttaaaaaacacaaaataaaataaagtagtatacattctaaactagtagtatactctcccaatgcatgaaaacagaaacaacacctataattatcagtaattgttgttgtggatccaagtatctatgtaagaagcaaaaaacccacatcaacagttgttgtcatcgttgtcacaaacttaattactggctagaaatgtctagtgctgcagccaaacagcagtaggaggagcctttcccatggctgagtggaaggagggaaacctagactatttctgggtctgccttgagctttctctgccgccttgggcaagtgactttggccctgggtcaatgtcctggagtaagatggggctaacaccactgcactgatttgctgggacaggtgstggaaagtggtggtccagggctgggagaggagaggaagggcaatgtttcctaggagaaactgcactatgctggggcagctgcggtgctgcaaagcgcagggagtgtggcaagcggacgaacctcgtgtcttgtttccttgttttaagattggaggtggagtgggatggatggtcgatcgccagctcttccagctcttaagtgctcaagttctgcgccaacccaggggagcttgattgctttcacgtctcttggaaacaactggcaaaaaagaatttcacatagtctggaaagggcttgggacagggaccactctttgcagacatttgtcattctttaaacataatgacatacatttattaaggactcatagtccataactaagacaaaatgagcttcagttacgttccctaactcggtccacgttcctttagaacgtctcaagcccgcatgtcactcatcgcggagtcgcagccttcccctgggttcgggcgtctgcgttaagcgccggcacatcgtggggatccccgcgtgagatttctctgcgccgtcggaatagactgttcacggattcgcgttaggattgcttatgctgcagaacttcaaagaaataaatgtatcagaattgcgatgtttaagttctaatctatttaagcgggtgggtcagcagagggtcaacaggaaacttcaaggtaaatagtggcctctggaaaaggcccggtcgctcacggcttccccactgtctccccagagcagactattaattcttgcgtttcaggcagaactgccgctgccggccctgcagcagagctagggagcgggcagggcagaaacccagccgagcaagctgcaggctcgagtccccgcgggcggagaggctcgggctggagcctccggggcggtgaggaggggrctcaccgcactgagcacaaactgctttccccgggagcgcctgcacccaaaaccctccagttcgaggaatgggattaaaagtgacaaagraasgggaaggggggctccgtggagacttctggaggcgtggaaggggcgtccccgaggaggggcgacgcagccctgcagggtgctgggcgggcggggtgaagggggctggggggcgcctgggccagggctggtgggggcagacggccgcctgcccgtgctggcactggggcgaggggtcccgcgcccccggagggagggagggagggagggaaggagggaaggaggtcggcccccgagggcggtggcgggggcgcgagctgcggtcctgcgctccgccccgcgcgggtagccggccgcgcctccccctgccgcatgtgcgcggtgttgtgtgccctgccctgctcctccccctcccctcccctcccctcccctcccctcccgccgtcccctcccccagcggccccgagcgagcgccagcgccacacagccccgggcagccgccggcgagcgcgccgcgacgccgaacaggtggccggaggctgcgggcgccgcggcggggagaggcgaggcaagccccgggcgaagcgaggcgaggcgagggcggccgggccgggcatgcgagctgagcggccccccggcgtcgccgccgcctgcccgcgcccctagccgcccgcgcgcccgagtccccagcggctcctccgcgcccagcgtcctcggtcccggcctcggctgctccggctgcgctcggcgaggggcgcgggcccgcccgcggcggcggcggcatgaaagtgaccgtgtgcttcggacggacccgggtggtcgtgccgtgcggggacggccacatgaaagttttcagcctcatccagcaggcggtgacccgctaccggaaggccatcgccaaggtgaggggccgggggcgcgggcggggagggggcggcggcggggacggcgccgggatcaatatggcgcttcctggaagggggaggagaggcgcagggaggcggggaaagggaaagtgcggccggtcgggcctcgcgggcgccccccgccccggactgcgggcgccaaagttctctgcgcgggccggggcgcagcctctgggacacccagccgggtcccgcggcccccgccctcaccctccgcccgggagctccggcctcggtagcgcggggcgagccgggcagcggcgcataggccggccctgggcgcctccccggagtctgcagacccagccaagccccgagccagcgcgcggggggcgcaggccgggaaatccagccccaggcctttcccggctcccaggccccgggggcacaggccggggactgggaacttttggtgtgaggagagtttcgtgactgcccttccgacagaggcgggttgcgagccttctgcctcctctcccttactcgggcgggggcggaacagcggcggggggcttttcctccatgtcccctgctggtaggggccggcaggggcggcccgtcgcgtccgggggctgcagggtttggggagtcgccggcttggggtcggggaggcgttcccgggagggccaccgctggcacttggcactcgcttgcgagcatttactgagctgatcccacttgctgggctctggaaagcacaaccttggaagagtcgcggaatgaaaagttttcctgcgaggacctcagctcctacctatcccgggctggttccatgtggctgggctgcggggccgggcctgacttgggagttgagtggatttccctttttcctggtggactgataacattgtctccacttcacagcattcctctactgtgtgtcagaagtgaaaaggcgttttgttaaattgttttaccgactgtgtctgtgtttgacaacagcccacgctgaagtttctccyaagcacccggggatatatttcctttgtagtagagtcctctttggtggggagcgcattcgtttgggtgcagtatttcccatttgttcccgacagtggcctggcccctgtgggcttgggggctgcaaatgacgttggaaagtggcttggtcagccctattgagcgtacacagggtactccggtggcatcttcagttctctcagaaattaagaagtaaaagctttttagacttttgttttgcttttagtatatattggaaaaaatagcataaatttggccttttaaagataattttgggggacgtttggagacccgacacaaggatggaagacgttggctttagtagctctgttatgttccttacagttgaactcttttattgaaaatcaaataaaattagtgggaattgggcacctgtttatcttgcaaagccgacaaagggaaagaaaaccatctaaatggacatttagcatttttaagtgttgtttatgtgtgacagtttatgctttaaatgttccaaaagagtactcaaattgttcaggcactctggaaaccaacaaaacaaattgtgcaaggaaagagaaataaagtaatatgcactctgcagtacgtctaggctcctgaataggaagagggtggtcaacattttctttcactttactaattttatgtgattaaaattgttttacctactgtgtcccatgtttcatcctgcacaaaatagacataggctgaactgcctgtttggcagtagttcaaatgtagttgttccaggcattcgttccacagaaattctgaagctttgactgtgtccatggcactgttctgggtgctggacatctaagggacccactggctgtgagargctgagcaagaggctgcggggtcctccaggtgaaggagctggtgatgacatggggagaagaggtggcctctgggatgctgggtggctagagtgcagggccttggtcacggacctggtccttattaacgattagcagtggttgtttcacagggcgtagaaaagggagtgcagttttttaagggtgtctgggaaggtgtcacaaagagaaaaggggcctatgagctgaaggaagggagggtgatagtgacatgggagttggagatgagagggagggtcagagatgggtcaggggttccaacacttacatgctctttaagtacaacttagagttctgtaggtgaattttaacgggggctttgcagtataccaagttcagtcattggatcccaagattgttgaccctyaaatgttgccagagctggagtgtcttctaggtctcctttttctcgtttttcttctgaaattgctagacaatgattaagattaatttttagtctttcttactacttttcccattctatattaagtgatgaggaagtgttaatatgtatttaacactgttttaacttttattctctatctgttccttatccgtattgcctaatagaacaagagaaattctgtgtgaagaattgggtggctggatagttgtggagtggtgtttaggttgctaggtgacatgtggcttgatgaactcccatctggtggggaaaagtgtgggcagatcatgtttatggctttggataataaccaaccaagccaaaaataaaaaataaaaaggaaaagagaaaggtcccaactctcaaatcaccaaggctttctctgcagtaaacattttctggtgtggtggggctaattttctggcattgcatgtgagctgttttctcttcagattacacaaatcaatttttctggatagtgaagtgtcatgatttaatactagacatgtcctcagtgagtagatatttgaaggcttatgcttagtcatgtgtgacatttcttttttcctctcctgaaagatggttttgtggttgtgatcactgatggttgggaatagctgttcatcctcatccacccatctgcattaggagcctcgctgaggacagtgcggtgctagacattgggaaccgcgttacatggacygttctcatgakggcgcaggatgggaggatggaccgtgtctgcatctgttcttctgcgcttgcgacctgacacgcgtgattccaggtggacatggtgctgagctgcagcgctgtgtggggttggttgaagggctgctgtgtataaaaagtcatgctctatgaaaaaaatataagactgaattcgtgcaattttcaaaaaaaagtataayctaggagacaggaagaatatataacagtataaataacaggaggyggtagcattaattggcaccactgtgatacagtcagtaatcgcttctggattttggaggtgggtgctatcattatggggtgtgtgtgggagtctcatttagtcactaggatttgaactgggcttggttggtgggaaggctgaccttgatatagggcagtgcttgctaactgggtgaggcacctgcctgcaggggcagatgggctctgggtctgaggtctgcagttggggtctaggtgtgtgaatctgcagaatgtctgctacgattctgataagtgaaagggagggcattccaggaaggcagtatggacaaaggcgattcaggcattcagcccagggggtcaggatcaaactgaggaggacagaatgccagggcaagaccctgagacttcgtgcagtaggaaggactgtggtgtttagctaagagtcagggtaacaagtagttctaggaggatgacctgagcaaccttagatgaggtttggatggataattccttagcatttcattctaaataaaggttgctgagtgaccaaaaggggaaggagagagtgaagggcaaaagtgagggcaaggaggtgctggagcccctttgctcactgttcccacctccctcatagctctcctctcagcctgtaggggagctttggattgggtttggtgacttaggtttacaagccatttaaccttgggtataggggagctttgtattgggtttggtgacttaggtttacaggccatttaaccttgggtacaccaaccctayggagccccattatctcaagtggaatattccctggcagggttaatgtaagtattaaacaggatgatgagagggaaactctaaagtcctgggcccggcccatactagctgctccgtaaagatgaatggaatcaccaatatgttttatccaccaagcagttttacacccagggaactttcccaggtgtcccactattgctgcttggatttttcctstttacttaaaaacgcagcatgtaatttcattgaaggataggtaagaatgtgagattgaatgacgtgcagcaccacaatcaggagaacaaaattgtgtgttgcatgtgtgtatgggctggggaagtaaaagctgcgggtattggcttgattacaggttgattattggggcctctggcttctgtccccaagcacatcactttagagtgatttaatagcaacctgttgttattacaggttgagcatcctttatccaaaatacttgggaccacacaagtattttggatttttctggactttgggatatttttgtatatataatgagataggttgaagatggaacccaagtctaatgtattgttagaatttatgtttcctacgtaccttatacacatagcctgaaggtaattttatgcagtatttttgtgcttgaaaataagtctgtggtaagtacttacatgtggaattttccaggtgtggcgtcatgtgggtgctcagtaagtttcagattttggagtattttggattttggatttttcaattagggatgcttgacctgtattttttaaaaagttgagctcatggacagaaacttttgaaaatgtgcttttttggtggcgggagactgttgattagtaacaatgacagtcatggtttttatgaaaaatcttgtggttggtatggaatttttctgtgaataaatgtatgactgcatgttattcatttacaagcgtattgaaacttttaagaaamtagttgtactgttgcagagattgaaagaaaatagaggcaagcataaaaatagtgaaatgaaagcagctttatttatttatttatttttttaacattttctgccttccctctaaaaaggaaaaagaaactaaacatttttgaaaggctgatctttccagaattcaagtcacattgtcctctggtgctgaagcgcctttgtcccgcgttctccaagtcctgccttctgagcacagcctgtccctgtagggacccctcttgccttccagccactccctctgcagctgctccaccccctgggactcacatacactttgctgcctctgttctggcattttctgtttcttctgcctgggacatttgctccttccttgcactcattcgtgagtcttagcccagacagccatctccaggaggctggctctccatcccaagctgctagaggatctttctccctgcctgctgcctctcctggggacgtcctgggtgtagctcctgtaccgacwcagatgcttgggctgtgctgtgtggttttcaagtgtatccgtgcgcccttcctccctccgggtgaaatgcttgaagcggtggctgagcttcagtcttggtgaatagcccgtgtctgtcacattgcagtcagaatgttgagtaaatagaaagctgagaatcaacatgttacactgctctcacacaaaaaatacacttctgctgagaggactatcatcagcactcgtgaatttaaaggactttaaggtttggtgtgtttgacctactggcacaaacagcttgtaatggaaactaagatttaatgaggtttggagtacttagaagttactctttcgtatcagctgtcttgagggagttcagtttgtttttcagctcaagcagaggaccctcctgggattcgccttgggcgaggttcaaggcaggtggccagggctgtgtgagaatctggccctggaacacacctatgcttggtctggcgcctctgattccgtcagttgagatgcttggctgagtgccaggactaagtaggaatgtttaggatctgagattctcagagagaatctggcggatgtgaagcgcttcttggcttgtggtagacatggataaattggttgtggagggaatatttaaagtcccacttggatgcaaacccacagacggatcctccgtctgtcctgggaggttctacctccccacagagttgggtgcaagttggtgatgttgagctccccatagatgattagagccctcggtattttttatcaaggatggaaataaacatgtaagattgggccagaaggtgctttctataggtaattttccatcgggggagatggcatgctaagcccacacagcatgctttcatcctgcttggccactcgctcarcattcctggctgggaccaaggtcaatggcagtagagctggacatcagtaaatgtatacagttttacctgttttgggtaccttttctgtacaaaagcaaatctttatcaaaataaatgccgagttcagtgaataaagtagaaagatgactgatttttttttgtcttttagtcattatttacaagttttttctttctttcttttgttttttttgagacagggtctttgtcacccaggctggagtgaagtggcgtgatctctgctcactgcagcctcaacctcccaggctcaagcgatcctcctgcctcagtcccccaagtagctgggactacagttgtgtgccgccacacctggctaatttttgtagtttttgtagagacggcatctcgccatgttggctaggctgatctcaaacacctgagctcaagcaatccacctgccttggtcctccagagtgctgggattacaggcacgagccaccatgcctggcctaaattttagcaaataagtaaaaataactttgttttaacttatttagtaaataagtaaacattttagtaaataaagttaaaataactttcgtgtataggtctgtgccttcttgcatctggcctgctatctttacgtggtttttgccatttaaatattacttttgtgtattccttttttctccatcaactcatattggtccttgcaagtaaaatttcaagctccacatccaagtgactttaaatatcaattatttatttttttcacctaaacagagtatattttgtatatagtctctgtactctattctgtatatatttyatatatactctttatatatatacacacacacacaagcacacaagagaaatgaaaatgtgtacacaaaacctgtacatcagtgttcatagcagcaagcccacatattgtataattctgttcctataacatgaccagagtgggtagctctatagagacagtagagtggtgttccgctaggactgggagtttggagtcatggagactgtgaatgggtatgaggtttccttttgggatgatgaaaatattctaagatcatggtgatggttgcacagttctattcaagtgtatactttcaatggatggagtttatggttatgtgattatatgtcaataaagatgttagaaaaatagactgcataagccactatgaacaacgctccatttttaggtattttgtagttctgagcatttcataaaatgacatatatatgtgtatcagagatgctcaaaacacttcaaatgaaaactggctgtctttaggagttttccatatagtgtggaatccctgctttctcaggcctgtccaatgtgtcctgtttagtgtctggtaagctcctggctgctgagcctccaggtcccctggtctctgtgtgctaccccctaccccctctaagggcttcaccaattgttctttagccagagactccttctacccagctcgccagctacctttgtgcagtggaggttgagaatgccccaaggatgcacgtaatggaccagcctttccagcatttggctttggctcccagaaattttgagctttggcaaatcttacaagctctgtgagcctctgtttccccatgttctcatattcagaggtgctgggctggactcccactgccagttccctgagctgtgcagggactcctgctctgcatggtttgttttggtgctcatgggaccrtaagtgatgtgcagtggcttttcagatggttatacagggtccaggacctcttactgcttccctccatgctgtgagaatattttgcctcaccccgacycccccaactttgaaatgacggggcttgctctccaggtcaaatggatgctattcagagttagggtaaattttgcttagggttggctgggtgagaaggctcacgcctgtaatcccagagctttgggaagctgaggtgggaggattgcttgaggccaggagttcaagacccagcctgggcaacatagtgagaccccgtctctttttaaaaaaattagccaggcataggccgggtgtggtggctcacrcctgtaatcccagtactttgggaggccgaggtgggtggatcacgaggtcaggagttcgagcctggccaaagtagtgaaaccccatctctacttaaagtacaaaaaatagctgggcatggtggtgcacacctataatcacagctacttgggaggctgaggcaagagaatcacttgaatcctgggaggcagaggttgcagtgagccaagatagcgacactgcactccagcctgggcgatggggagattcatctcaaaaaaaaaaaaaaaaaattagccagacatggttgtgtgcatctttagtcccagctgctcaggaggctgacgtgggaggattgcttgagctcaggagtttgagattgcagtgaactatgatggtgtcactgcactccagcttgggtgacacagcgagactctgtctctaacagaaaaaaaaaatttgtctagggtgtccttcagaatttccttccttcttcctttttttttgtctttttgagacggagtctcgctctgtcgcccaggctggagtgcagtgacgtgatttcggctcactgcaagctccacctcctaggttcacgccattctcctgcctcagcctcccgagtagctgggactacaggtgcccaccaccacgcctggctaatttttttgtatttttagtagaggtggggtttcaccgtgttagccaggatggtctcgatctcctgacctcgtgatccgcctgtctcagcctcccaaagtgctgggattacaggcgtgagccaccgcgcccggccccagaatttcttattgtctcaaggtaagtatcttttaatgtaaatcacatcatgctcagaagtgactaagacaattccctttgtgaattacagatgtatgatattgcatgatacgaactgtacggtgtatawatatatatatatatatatatatatgcacatacgtgtgtatttctggggtgatcttttatggtggtataaatttaagtcattttagagatgatagtcaagtcaacattctcccaatcttggtgtttttaactattcagacactgtaagatttaaggttttggaactcagatgtatatttttctagtgtctggtttttcccttcttgtatttgagacggagtctcactttgttgcccaggctgcagtgcagtggcagagtctcggctcactgcaacctctgcctcctgggttcaagcgattctcctgtctcagccttccgagtagctgagattacaggcgcctgccaccacacctggctaattttttgtatttttagtacagacagggtttcacaatgttggccaggctggtcttgaactcctgacctcatgatccgcccgcctcagccttgcaaagtgctgggattacaggcgtgagccaccgcgcccagcctttccctttttgttgattgtaccgcatccctttagattagaaaactaatctatgttatagggtttatatatttcaaaaagcctctttgagatagactacactaaaaatcagtgtttccttcttcaacacttaagaaatcaacttgatattatgtctcaaaaacctaaaattgctaaccaatcaaaagatgtgtattaatattaaaaacacaaagaaaggagtgttgtttttgtgttggtggtatatatgagactagatttttttgttcaatttcttttacatagacaatacaaattggaaaaaagtttttatgtctgtgttttaattttcttctctaagtccaatgttaagtccaaaattaaaaaataaactctttagaagtctgagggacaaaggaaaaaagaaaactcttccaggaaacgtattttcttataccacaaaggcatttaacatgtgtcatttataatgctgaaacccagtgtgcaaaaccatatgtgaataatggttagccagattcctgcccagcagggttatactctaaacttggatttcttttattacagacagcagcacctgcagaagaaggaggtaaaatgtgcaggatattggttcctgatgtactacaacacaggatgtgactaatcactaaattcattaatgttgaacataggatttggtacctttaccactttgttagagatctggaaaaaaaatcttctagacaaatcaagttgatcttggccaagtgcagtggctcatgcctgtaatcccagcactttgggaggccaaggtgggcggatcacttgaggccaggagttcaagaccagcatggccaacatgacaaaaccccatctctattaaaaatacaaaaaaatttagctgagtgtgatggcaggtgcctgtaataccagcaacttgggagtctgagtagtgagaatggcttgaacccgggaggcagaggttgcattgagctgagatcgtgccactgcactctagccttggcgatagagcgagacttcatctcaaaaaaaaaaaaaaaacaaaaacaaatcaagtagatccctaagtgcatcatttggattgataactattttttactgcatctggaaggtggtggcattttagcggttgtcatgttgaggaatatgaaataaatatattttaaattatgaaagcacatcctatcaggaatattttttccaaggaaacttgcaatgctaacaaactcctgaacttgattattgttattttttatttttattttttattttccgagatggagtcttgctgtgtcacccaggctggagtgcaatggcgcgatctcggctcactgcgacctccacctcctgggttcaagcaattctacaacctcagcctcccaagtagctgggattataggttccagccaccacacctggctaaatttttgtatttttagtagagatggggtttcaccatgttcatcaggctggtcttgatggagtcttgaacttctgacctaaagtcatccgcctgccttggcctcccaaagtgctgagatgacaggcatgagccaccgcgcccggccaactcctgaactttctatggtggagtcatttttgtcttttacgttttaagactcacacagatgtttgcaaaaacaccgttwgctgaaagtggaaagtttggtgatgggtattttgcttctaggaagcaaaaacatcagagtgacacatcatggatcaggattctgaagaggaatctctcccagacatttatggagagttaagagaagtacctttgtgagcacgtgattcctgccttctatttttttttttttgttatttatttatttatttttttgagacggagtctcactctgttgcccaggctggagtgcagtggtttgatctcggctcactgcaacgtccgtctcctgggttcaactgattctctcacctcagcctcccaagtagctgggattacaggcatgcaccaccacgcccagctaatttttttttttttttttttcatttttagtagagacggggtttcatcttgttggccaggctggtcttgaattcctgacctcaagtgatccacccgccttggcttcccagagtgctgggattacaggtgtgagtcaccgtgcctggtcgggagtcytaccttttaataccacctgctttgtggggttgttgtctgggttcaaagagagaatgtgaaaaggtattgtaggaggccaggtggactacatgttagctgtactgtccctttgtttttaccaggagtgtttgccagtgattaagtctcactagaataggcttttctaaattgttttatctcatcctcattagaacttcaccacatgtgggaaatcatgtggcaaaactgtctctcttaaaaaaaaagtcaccaaggaaacctccttctgcaatttaagaaataaaatcccagtgacattgatttggatgctccaaacatgtccataatggaagagcttttccaggttttggtttgggccccccagaccaaagctttgacacataatacaagctctgtaagtctgttttcctgtctgtaatttgggattgtcatctttgtagggtgtcatggagattaagttattcactgtagacaatgcccctttcatgtaatagattctgtcagtattagatctttttctttctcttcaagtttcaaacatagattaggcaaaattttaatggctatttcacaaaatcagcttgattcttgtttatgacatcaagtgttgtttttccaggttgtctgttaaagggctacttttttttttttctaaaagtgctttagaaattccagtgttagtatgtatgcatcatttagctaagaatgaagatataaagatcacccaacagtttaagctgattcttttacaggtcaaggagaattgtgtttgtctagctgtcttagccgtgtaggactttctacttgttacttcctaaataattgcagccgcaacactgctacttcaaaggaaattacataaattttatttgctgtatttaaagtacattaaaaggcatsacttacacatttttcattaaaaatacttttaaaacttggaaaggataaaagtataaaatgtaaatactgtctgtattaataaaatgcagagatgttttaaaggcctttagtgtttattaactagtaatagttctgagaataccctggagctcaaatagataatctgtgttataaaataaatgggaaagttgacatttttgtgacttttctaatccttactatataggcctctataattcatgtgcccataacacttcttaagatgtgattttgggcatcttaagatggtgatttcgggcagctaaatcagcaacaaaggaacacagaacatcttttgcttaggtaggtagttgtaagggttgacagattgatgcaacttttaatactttagtttggctaaaggcacccagtgcaaatcacctgaagacttcacccaggagttgacctatttatcatactaaatagggagtggcgtcttgaaggctcattcacattctgggcttggcaggcagtgcgatgaagtcagacttgcagttatcaacaccctggctttgtattcaagaggactacctcctctcatccgtctttttcataccacagtattgaaggggttgttttcctctttgaagaccttaaacatctcattaattaaagtaatgcttcttccctctccccatatgcatttagggaagtcgctaagcagtgattgaagtagtaaagcttatctaatggcacagcactcctattttgactctgatcccttcctgtatttatttgtaaacattttttcatgtgagtgtgtttgaaattccaagttttagtttcctacaggatgtgaaaaagacctagcagcacgggagataggaatgtatttttgtgcgtctgtctcttgccttcacgcttcccctttgtttttgtgctttgctaatggaagtgatgaatggtgctttcaaaaactttccagaatactcaagtgttttataacaaaattgcagagaaataattcggagaatttttgacagatcttagagtgttttgataggggggattttagtccgaggcagaagagttttggccctgcattgtttctttaccgatgagaagtgaagctgctttctttatagattccggggagtggtattttcagctcagtctctgcttttggtgttagaaagctttttaggtcaggactcatgatcgaaagctcttgcataagaggtgcttttatcaggggcattatttatctgcctattagtttaggaggttgttgggaaggtaccgttttaacaacagtgaaacctgtcacttttttttcattcctaacttactgtgaaggagtctcagacagcaaggaggagatccaggagacagtggtatcagaaaatggtagtattaccattattattttttattttttgtttttttgagatggagtctcgctctgtcacccaggctggagtgcagtggcatgatcgcggctcactgcaagctctgcctcccgggttcaagcaattctcctgcctcagcctcccgagtagctgggattacaggtgcccactaccacgcctggctaattttttgtatttttagtagagatggggtttcacctggtttatcaggctggtcttgaactcctgacctcaggtgattcgcctgcctcgacctcccaaagtgctgggatttacaggcctgagccaccgtgcctggccagtattaacattattatcaagagtaatggtaagcactcatggcacatgttgtatcaggccctatgtgctggggtcagtgctttatgtgtatatgttaatctcatggagttgtgatattggtgtaatccagagtttacagatgagtaagcttgggctagagaggataagaaactttttttttttttgggaagttgcacaactgagggtcttgctctgtcacccagactggagtgcagtggcatgatcatggctcactgtagcctcaacctcctgggctcaagcattcttcctgcctyagcctcccgagtagctgggactacaggtatgtaccacctatgcctagttaatttatttttatgtttgtagagatggagtctcactgtattgcccaggctggtcttgaacttctgggctcaagtgatcttcctgcctcagcttcacaagtagctgggactacaggcatgcgccaccacacttggctaacttgttttttttttttgtagagatgaggttttactttactgcacaagctgatcttcaactcctgggctcaagtgaccctcccactttggctccccaaagtgctgggattgcaagtgtcagccaccgtacccagccggcttggctgcctttggcagactctaacttcagagcctgcacagtgagttgctataccatgacaaactgatgtgcattttaagatgctgcaattccataagaaagagtaagtgatcccgcgggagaagaacagggttttttcctgacttgggtttgcttgaatggcttatgggttcagggaagaagtgcacctttgggatcagcttcaggctagtgagggtaaaaaaggtgcatggctagctgtcaaagacccttgcttctctggtgtggcctctgggccagcagcactggcatctcttgggaacttgctggaaatgtacaatctcggggcccattctagacacctccgtataggaatctgtattgaggctgggcatggtggctcccgcttgtaatcccagcactttgggaggccgaggcgggtggatcacctgaggtcaggagttcgagaccagcctggccaacatggtgaaaccccatctctactaaaaatacaaaaattacctgggtgtggtggcaggcacctgtagtcccagctactcgggaggctgaggcaggagaatcgcttgatcccgggaggtggaggttgcagtgagccgagattgcgccactgcacttcagcctgagtgacatccccagttggtgctagagcaactgctcttaaccttggcagcaaaggttttagaatgttgatacctaagctccatataaaccaagggggtgaggtctctgggtcacgtttggagattggtgtttctgtaaagctcttcaggaagctcttcaggtggttgtctgtgcagccgggttggaggactcctggcccaggccaacctccagaccttttggagttgttgcattatgtgatttgcaaccctgctcgcctttggactgtgcatggaaatttccaaaacacaagttgagatgatcagccagcatgctcaaaggctggtcacttgtgtgacagtggatcagcctgtatgtgtgggttttttttttttttttggagacagagtctcactctgttccccagtctggagtgcaatggcgacatctcggctcactgcaacctctgcctcccgggttctagtgactctcctgcctcagcttcctgagcggctcgagttacaggcacccaccaccacatctggctaatttttgtatttttagtagagatgcagtttcaccatgttggtcagggtggtcttgaactcctgacctcaggtgatccacctgcctcagcctcccaaagtgctggaattacagttgtgagccactgcgcccggcatgttttttttttcttcttcctcttctcctcctcctcctttcttctcatttcttcttctcctttctccttctccttctccttcttcacgggacagggttttgcacttgctgtgttccccaggttggagtatagtggtgccatcaatagctcactgcagcttcaaactgctgggctttggtaatcttcctgcctcagcctcctgagtagctaggactacaggtacatgctaccatgcccagctcattaagcattttttttttctttttgtagagatgggttcttgctaagttgcccaggctgatcttgaacttttggtctcaagtgatcctcttgcctcagcctcccataacactggggttataggggtgagctaccatatccagtctgtatattttctttgtgtctttgtgtgttttcttttttgagaccgagtcttgtgctgttgcccaggctggatatattttcatttttgacttttgaagtcattcaattctcctgcctgttaattttgttgagttttatttgtagaaacagagacaacacatgtgcaaggtcatccttaggttttagctgttgactctaaatgatgtctagtctaatagccacttctactaaacagaaattggttaaggaagggcagtgagagacagcacgggggagttgtaatgagatgggggaaggaaaggccaatttggrtaaaatatatgagttatcctttgagccaggttatgtcctctgggtgtttgtatatatagaaaccggtcaactatggtatttggttttgggtaaagcagagatgagggcttctgagtagtggacagaatacttctcttgcaagagttgcttttcgagcttgtttatggatacacatccatttttattggatggagcagtagtattagagaagactgttggcacactttcacaaagtaggtaagggattccttttctacatgtttagactttactttggccaggtgcggtgsctcacgcctgtaatyccagcacgttgggagactgaagtgggaggattgcttgaggccaggagttgagaccagcctgggcaacacagtgagaccctgtctctacaaagaataaacataaattagccaggcgggatggcatgcacctgtagtctcagctactysggaggctgaggtgggagaatcgcttgagcccaagagttcaaggatgcagtcagttatggttgtgcccctgcactgcagcctgggtgacagagcaagaccttgttaaccacttacttagctccttggaacagtcccactgaacaagtcccctcatgacaccagattgccagtgggcctggctgttgttggcaaatataagctcctggttgtgctgcctcatgaacctaaccatgggtctgacaatttttatgtccatggattgattttatttcatttattttattttttttgagatggaatctcgccctgccatccaggctggagtgcagtggcacgatctcagttcatagcaacctccgtctcctgggttcaagtgattctcctgcatcagcctcccgagtagctgggattacaggcatgcaccaccatgcctggctaatttttgtatttttagtagagacggggttttgccattttggccaggctggccttgaactcctaacctcaggtgatccactcgcctcggcctcccagagtgctgggattacaagcgtgaaccactacatctggccaggaaataatttcttcaagggtactttcagggctgcaaagtgcagttctttgaaatactattttaaaatattttcttcaaatctactgcaactatgggaactgactagtactgaattttatagacctgatagaaattactctaaagacataatgtgtctgatagtaatgtccatgtaagaattttaaaaataatattcagcagtttcaaataamacttaaccccaagttgatagtaaaaatgttttttgaaccctagtttatatttaggtgttgctgcataaccaacccaaaacttaatggcttaaataaacaatgatttaattatatctcatgattttgtgggccaggaatttgggcagggctcagctgggttattcttccgtgccacttggggttacttgcatgtatttacctggcagatgatgacctggcctggaaaatcctagatggctccattcatatatctggtgtttggtgggggtaactaactagaatgttgggctcagctgggacttttttttgtttttgttttttcaggttcatagtttattgtacaaattgaattatcacatgatgagttgacattagcttttccatggaacttagattagcatgggaatttaacagatgaggcacagtttggaacccatttatactgctttcacagctggagtttttaaagatcttaacttgaagtgtaagatcatgaaagcaatgtctctatgtgtcaattcatcccacctgtgtgagtataagagttgactttttaatttttttwtttatgttatgttatgttatgttatttttgagatggagtttcgctcttgttgcccaggctggagtgcaatggcacgatctcagctcactacaacctccacctcatgggttcaagcgattctcctgcctcagcctcctgagtagctgggattacaggcatgcaccaccacgcctgactgattttgtatttttagcagagatggagtttctccatgttggtcaggctggtcttgaactccctacctcaggtgatccgcccaccttggccaaagtgctgggattgcaggcgtgagccaccacgcccggtttttttttgagacagggtcttgctctgttgcccaggctggagtacagtggtgcagtcagctcactacagcctcaaaatgctgggctcaagtgattctcccmcctctcagcctcccgagtagcagggactacagatgcgtgccaccatgcctggctaatttttgaatttatgtagagatagggtcatactatgttgcccaggctggtcacaaattcctgggcttaagtgaggctcttcctttggcctctcaaagtgctgagattataggyatgaactaccatgcctgctctgaaatacgttttactaccagtgaactggaattgggcatctccctccggacctgccgtgattttaatcttgccaaagccacaatcaatcccacagccagtgtccttcagtgcaagcaaccctcaggtgggacttgttgactggagcacctgcatgtggtgtctccagcatagaggcttccggatggttggacttcttgtactgtggctcagggctcctggacagtatcccaagagtcaggaagaagcagctgtcactctctcaagttttagacctggaagacagcacagctttattgtccctgtattctatttgccaaattagtcagtaagcctgcctaggttcagggcagggcatgcagactccacttgtcagtgtgaggagtgtccaaggccttgtggtcatctttattctgccatagatacgtgtgtatgtgcgcatatgcgtgtgtatcacatataacatcaaacatttttttttattgttatgtgtcatgtttcaaagtcatctttttcttgatctgggcaagggcaataaaatgtatgtcctgaacttttgaagctgacaaacttaagaagtagtttgtgttcatatttcatgagcccaaagatctaacaactttcccaggctatgtggtagaaagagataatgataataacatcttaggtttatgtggcatcttctaagaggttcaaagtggtggttccactcatttctttatgggaatatactgtgaagtccataagcagtagtacccccaagttcatacacagaggtgggaatgcagtaatttcatcattctactaatgaacagtgttcagaaggcagttcttgtagtgatctgtttactgatagaacttctgtgaatctgcctttcttagataagattttggaaaatgatagaaattaacttttgtgtgcctggtaatacataatatactatttatcaaagagatgtcatatttgaagaagagtcagttatttttctgaagtgaaattctttgggggagaagttttagaggtatggcattgcagggatgtctgtagtagattaaaaagtctacatcctcagcagaggcagaaaaatacagtggaaagggtataggtggttatgtggccatccctgtactgagtatatggccaggactgagggtgacactgcaagtggaaacccttgtccccttgtgatatctgttcatgagtccccccaacccccaccccccgctgactgtgggagtgtctctttgtacttacgggagattgaatggagttttcaagtataattcaaccatatgttgagtttgcttacctttgctgtttagagcttatcctttgagtaaggtgcaagtcgactgtaaatgtggtattacttaaatacattccatttttcttaaaatgagatactttacctctaattgaaggtatcaggggataaacagtttttcaggcaccatttgttatggattatctcctggttcatgaatattgcattcttatgtgaagtgatccacccttcatgtttccccagagtaaaattttttttttttttttgagatggagtttcactcttgttgcccaggcaatggcgcagtcttggctcactgcaacctccgcctcccaggttcaagcaattctcctgcctcagactcccaagtagcagggattataggcgtgtgccaccacgcccagctaattttgcatttttagtagagatggggtttctccatgttggtcaggctggtctcaaactcctgacctcaggtgatctggctgccttggcctcccaaagtgccgggattacaggtgtgaggcaccgtgcccagccttcccagagtaaactttctaaggatggcttttatatccctgactagtacagagaactccatgggttctgtgtggttttccaagtagaattcaaatttatcagcctgaaaactgaccccagcctgccctcttctctttaccgccacgaccccttccttccctctccctgatcatggcagaactgactctcactgctgccctggagtcctactgccctccagctcccttgtgttcgtgagttgtccctggcctgggatactctgcccctccttttccctctcctcttggctytcccattttttcatctgcactgctgccagagctgtgctttttgttcagaaagctctttgtggcctctgcgacggccccccggctccccaggtgggctcaaggctgactgcaccaccctgggcttctcagtgccacaccaagtgccactgctggagcccacacctgcagtccctgctgcagccccaggcattgtccagatggtgcctttgcggattctccacccacaacccagggagatgcaaaagtagattatgttgaattcaaggtatataaagaakcactgtacaaacatgtgctttttgaaaggaagttactccgataattttgaccgtgttattacatgttttattagttgtaaataattaaaagtggatgaacatttaagagcgagtgagctgataccatcaaggaggatttctgcagtctccttctttggcgagggtgttcacccagcagcctgtaggcatgagcagtgcctggagtcctctgctttctgctgccaaatttgctgctgcacaggtcactgtagacctcctgggtgcaggtgcagctccagcgggtggcgacttgttcctaggtagacagaacagggggacatgtatccttgtgggaaaacagtgtacttgagaactgcagggcagtcacgactaatgctgttattaagaaatactcctggctttgtgactctgggtgtttttaatcttttataattaaacataagtgaatattgaggtgtattttagcatttgctgtactctgctaagtagagtttgtgacgtgttgataatgggagaatgggtgctactrtagtaaagaaaaacagagagctggtgctgggtgcggtacctgtgcctgaagtcccagtgctttgggaggctgaggcaggcgcgtcgcttgaggccaggagtgtgagacctgccggggcaacacagcgagaccttgtacttttcttcctacagggaagagcctgtagactctattctgtctccacaggtcttctcccacccagcgttgggtggagccagagagctccgcaaagagcacgtgggcgcacgtccggggagagctaggggtgcacaggtccggggcaagcacgtgggcgcgcatcctgaggcaggaacagggcgcatatctgagcaagcgagcacctgggcgcatgtcacgaggcgagcacgtgatgcatcctgggaggtggccgagggaggctcaggagagattggagtggagttgaaaaagcaggaagcagagagggaagtccgtgtgtaacaaaacattcagtttgtaggcccttgggtcagaggaggtgacagccataattttggctccctgggaagggtctcaggcagtgtcctgatttttttttttttttttaaacgaggcagggtctgactgtgtctccytagctagggtgcagtggtgcaatcacagctcactgtagcctcgacctcctgggctccagtggtcctcccacttctgccactsgaagtgctaggactacagtgactaatttaaacaatttttttttgtagagatggggttttgaatccctggcctcaggcgattgtcacagctgggcctcccaaggcactgggactctaggcgctcactaccacacctggctctgacgggttgaggctgtggggacctggctctttcactgtccttctttgccacatgtccccgcgtcttgtctcttctcgtgagggctgaagccatcctttggaggagctcaggagcttgtcctctttatccagggctcggtgttggcttcgagccggcttcctggggaggaggccccggcctggtcccgggcttggtgatgacgctgcccacagtgggatgctggggagctttggagccttggttttgcggctgccagcagtgtggtggagcatcgagagggacgcaggtgatgagactcaggccagtggcttctacctgggactgtcagggttgcctgcgttggctgttggctccctatgtagctgctgctcgttggtgacgggtacaagcgtcagtgcttctcactcagggcagtgtagaatgttacacagtgatagtttatgtctagccaggttttgaatgctcttactggaaacagtcatatttcctattatctaactgaatagagaagtaagcagttgagaatacagttgggctgcacttgtctttttttccaagtgagttattttgtattttttgatactctgaaatgatcagtaagtgtgtgtgtctgtgygtgagcccatgtgcgtgccaygcatgcgcatccctgtgcatgcgtgtaggaggctgggatggaagggatggccataactgactgttggaatttccaggaaaggcttggaatttatttttgggtcacaggccatttttttggtttctttcaagcactaaatgatttttttatgtaacttcacagattaaagaaatgcagtcagtttttgtatgacttagtaaatcttaaggaaaaaaccctacttacattaggatacatttgctggaatatttacacaaatcttacaataaaacttttcatcttttaaaattttttatcaactcagccataacttatttattttttgcttcattttaaagagaatactcattctttttttcctctttcctggtacttcagcttctcatttgcttgcagcctctgcattgcatggatgctggtttttcagcagttctggccctaacagaagcatcctaaggataggaggatttcagtctgggcttgctagccttatcagggggagagcagagttgctaagtttccattctctgtcactttcagttactctgctgtggctgctcagtgctgttcccagtgaaataattttagcatattttttcctcttgtttctgcatcagcgtcattactgttcatgcctccctggggatcagactgattggtaaattagtgccagcagaggaagtagaagacaatgtgtgagcgtgttttatttaaacamatacactctacaatttgttttattggattttgtcctttgagaacaccacaagtaatcccattacagtctagaaactgcttgctcaccacgcctccaccttygaaagcacataagtctttaataaatgaggcaatttccagattcatcaataattaacccagaacatgacaagttttatcacaactcaaagctttcccrtgattcaaacggtctgctcctgccactgaattgtctgtatagtttctggttcagcttcccagagctcaggattctgccatggagacactggtttgagcaagcatactggatgttttcttgaaaaatgttaagctttaattgtttataataaaataaattcatacttattgtaggaaatgtggccagcacagatgattttaaagaagatagtaaacacycatattcttaccacccagaataatctacaaaagagcatttctttcatttctttgcattctttctgtttgtttgtgtatawataaatacaaatgcttatttttttgggggggcgggtggtaacaggatcttgctctgttgcccaggttagagtgcagtggtgctatcagagctcatggtggacttgacctcctgggctccagtgatcctcttgcctcagcctactgagtagctggaactacagacacatgtcatcatgcctggctaactttttgtatttttttttttgtagagacagggtctcagcatgctgcccaggctgatcttgaactcctggcctcagacgatcctcctgtcttggccagccaaagtgtttcgattacaggtgtgagtcatggcacctgaccaaatgcttttaaaaatattgataattgaaatcataatgcatacacagttgttcctacttactttacttaatttatcggtgtcttcccatgtctcgcaaaaattttggtaatttttttcctttttgagacaaagtctctgtcgcccaggctggagtgctgcggcacaattcttcatggctcactgcggcctcggcctcctgggctccagccattttcctgccttggcctccagtagtgctgggattatgggcgtgagccactgtgcccagcccataatactttttagaggtcgtatagcacttcattatgtggatatacaagtattaacctagttaactattgttgggaagttaattaattttctcatttttcatcatttaaaatattgtaataatcttagtgtatattattgacaagttttctgaagtataattattggataggaaattatgaacatttcaaggccctcagtttctgcacttggccagtttgctttccagatggggtgtgccagtgtatacctggcctgcatgggagagtgctctctgcctctgccaaggaggggacctcctgggtcagtaggtgatggtgctgccactgtttttgcagccgttgttgagtggctgggcccaggactgcagtctccagtctcattttgatcatatgttagtggagctgtaataccctcttctccttgaagattgtatgagagatacatatgtaaagaaccagacctacaagagatcgagaccgtcctggccaacatggtgaaaccttgtctctactgaaaatacaaaaattagctgggcatggtggtgcatgcctgtagtcccagctacttgggaggccaaggcaggagaatcacttgaacccaggaggcggagtttgcagtgagccgcgatcgtgccactgcactccagcttgggtgacagagcaagactgtgtctcagaaaaaaaaaaaaaaagaactggacctagagcttggcccaggtaggcagtggctgcgtggtagatgcggtggtggtggtggctgatcttatatcaggtgtttagagtcgtccatgttaatggagcagagtgctgagttgggagatgacatcaactggtcctgcgctttctgggtgacacacaaagtgcttctttgaactggggttctgtagaaaatagtttggaaagcaatgtgtaatattaatttttttctttcctgagaatgttacatggagtgaaattcaaaagtttcctgatgtctagataacttcctatctgtccacgtggtcttgtaagacccttgcatgagcctgtcccatttgtgctttataaatgcatgctggggctggggcaacgttacttatacctgtagtcccaacactttcggaggccaaagcaggaggattgcttgaagccaggaattcgctagccacctggatggcataacaagaccctgtctctacaaaaaaaaaaaaaaaattagctgggcatggtggttgtgttccttcagtcctagctactcaggaggctgagttgggagaattgcttgagcctaggagttcgaggctgcagagagctctggttgcgccactgtacaccagagcctgggcaacagagtgacaccctgtctcaaaagtaaaaaaaaaaaaaaaaggatgttggttgcccatttgctgtgtgccttgggtgtggacatttttcatatattttctcctagcctgactggattatgactatgacggttatcttttctccccttcaagacatacacatgtaatttgctttttcagtcttcagggattgcttccatctttaacgagatataaaaatgctgagtacctctctgcagcattgtttgtgctgctgctcaaatgctctgcagccttactgagaccagctgtaaagagcatctgcccttagcattttccttgacaagtcttgcttggctgctcaccttcttacggacgtgggtaacttcatctggttatctgattagtaccttgtctttccttaagactctgccattttggaattattattattgtttttgagatggagtctcactctgttgcccaggctggagtgcagtggcgcgatcttggctcactgcaaccttcgcctcctgggttcaagcaattctcctgcctcagcctcctgagtagctgggattacaggcgcccgccaccacacccagctaatttctgtattgttagtagagttggggttttyccacattggtcagctggtctccaactcctgacctcgtgatctgcctgcctcggcctcccaaagtgctgggattacaggcgtgagccactgtgsctggcctatctttatattcttggtgtatagtagattcatagggatttttgctaagtctctaaggattgataaaagatgtaaaagatctagcagttttctggttacttgacttttgagctggatgtggtgctaatttttagactagtcgttttagataacatgtgtttagagcattgcaactgtctatctaccagtttttttgtttgatctacctaaaataatgatctctttgaactctgcgtgccatttttggccttccaaaaaccaaatctatatatgtatattggaaaagaaatatatgtaggatcctaaaactcatttttcagtttttaaaaggcccctagtaagcagtaagtgtcaggagtggataaattttaagtggctttttacagagtacttaaatagaaacattaattggatcagtgtgtggatctcatggagatctgtccctgtcatacgctggcaggcacattccatttctttctaatccccagatgtaataagatgcctgggtctgtggttacttgcatttgccattcataaaattgctgatcagtcctcccaggtggcactgttgtttataaggctgttcaaaatgtcagtggacttctgccatccctaagagcctccttgttatttctcttatggggcctaactgctgtaaaatatgtattttaacatctagtgggatatatttctttgtttctttgggctattccttcatcatctgttgaccacttttagtcaatagttatgggtcaaagctttggccagaacacaaaatacttgataggaagagtcattgtgagaataaataacatgtagtggaaactctgacattgggatgggacattgagtgggctcatctgctgagaatatttgcaagatggagcttccacagagcctcatgggcaaagcctaaagagatgagttagctgggtgagagggaaaaagtaagttgtcagagttctgtatttcatatgtgatttcgtttgtatgtctgcctctgtctgttgacattacgtcactgattattggctttaccacacacatgagtgaagaagaggaagatgcgcagggtggggagaaatgcagggaagacactgttccttttttttgagacagggtcttactctgtcacccaggagatgacacgtaactacatcaactggtcctacattttcaggcgaacatacaaagtgcttctttgaactagggttctgtataaaatagtttgaagagcaatgtatagtattaatttttttttcttctctggaatgttacgtggagtgaaattcaaaagtttcctaatgtctagataaatttctctctgtccacacggtccgcccatgtcttataagaccttcacatgagcctgtcccatttgtgccttataaatgcacattagtgatgtgatctctgctcactgcagctttgaaatcctgggctcaggcaatcctcccacctcagcctctcgaatagctgggactacaggcatgcaccaccatgcctggctaatttttttgtagacatggtctcgccgtgttacccaggctggtctctaactcttgggctcaagcaatctgcctgcctcagcctcccaaagtgctgggattacagacgtgagccactgtgcctggactctttttctttctaaaaaaaaaaagtatgatgcaaaaaatgcttttacttcaagaagattattctgtacttcaagagtataagttgcaaaatgcaaaattaaggatataaaattgtggatttatatttctggggtttcaaaagcataaatgtgtgatacatgtgcaggtttttggatattgaggttttttgagatttgaaaaaccatttattttttaaaagataaagttatatctcatttgtgtgtttaaacaaaaagtataacatctcagatagctttgcatagacagaaagattaatgacattcctgcatgaggcattagcaattattttccctgtaatcgtccttagaactctttgtctagtagtccacatatagaatttttctgcagcacatatattaagtaatcagtttaatatttgttcctataaattaaataaattccagtatcctttttagccatttccagcagtctaaggcagggaggaaacttagtgatgagatttctggcactaacttttcaaagaggacattaagaggtgaaaatgggaatgaatgctagaaaaatgactgttgtacatcacagcagggaggttttgcgctgatgaacagtgatgtttccgcttgacagtgtgaggatatttaactttcccagccttccacaagatgagaagggatgaagagacggggaaaaaaggggaagaaaatccttaaaaaagtatattggggccgggcacggtggctcacgcctgcagtcccagcactttaggaggctgaggcgggcggatcgcttgaggtcaggagttcgagaccagcctggccaacatggcaaaaccctgtctctactaaaattacaagaattagcctggcatggtggcgtgtgcctgtaatcccaacttgggaggctgaggcaggagaatcgcttgaacctgggaggcagaggttrcagtgagccaagattacaccactgcactccagcctgggcgacagagtgagactccgtctccaaaaaaaaaaaaagtatgttggaaaataccaggagagtgtttatctccactttgccctactcttgttagtattcacatcttcattggggaatgtaaaagatcctaaaacatgtgggtctttttttctccttctgtctcacatggggctgcagttttctttctttactcttttatatattgctatttatattttatgacttggaatactattaactttttagaatactgatgtttttattttattttttgagacaagttctctccatcacccaggatggagtacagtggcgtggtcacagctcactgcagcctccaccaccccagctctagcaatcctcctgcctcagcctcccaagtagccgggactacaggcgtgtatcaccatgcctggctaatttttaagaagttttttgtagagacatggtctctttatgttgcccaggctcatctcaaactcttggactcaaatgattctcctgctcagcctgttaaagtactgggtctacagccgtgagccactgtacctggcctagaatactgattttaaatgacagaatgatagttataaaactgtgaaagtttgaaaaaccacttaatgagttgctgttacatatatagtctagttccaagtagttagaaaaaaaaatgcactaagtgatttggcaacgtactaagccaataatagtatttgctttggagtaatgggattatgggttgttctccctttttttctttctaaagtttttatgatgtggttgattatacttttgtgacaaaactgtataatcacttgtttttattataaatgtgcaagaggacttacattctttttttttttttttttttttttgaagacggagtctcgttctgtcgcccaggctggagcacagtggcgtgatctcaactcactgcaagctccgcctcccgggttcacgccattctcctgcctcagcctcctgagtagctgggattacaggcgcccgccaccacgcccagctaattttttgtatttttagtgaagacggggtttcaccatgttagccaggatggtctcgatctcctgaccttgtgatctgcccgcctcggcctccgaaagtgctgggattacaggcgtgagccactgtgcctggccgaggacttatatccttaaatgattaaaatatatcctgaggcaaaactattccaaataaaaatggaggccaatcagaaatatttaaaaattcagataaatgtattttagagagtgtatttagaaacccagtttctagatcagagtgccatcattcagtgtgttatactcccaaattaatgctttttacctattgtcccttggattaagtaaattcaacttgactcaactaaatcttaaggtttgacaccctgacaaacatgtcttaaaatgttttaaagtacataagatttaaaaccttggccaggcatggtggctcacgcctgtaatcctagcactttgagaggtcgaggtaggtggatcatctgaggtcaggagttcgagaccagcctggccaacatggtgaaacccgtttctactaaaaatacaaaaataactgggtgtagtggtgcatgcctgtaatcccagctacctgggaggctggggcaggagaattgctggaacccgggaggcagaggctgcagtgagccaagatcacgccactacactctagcctgggtgacagagcaagactcagtctcaaaaaaaaaagaaaaaaaaaaaactttcctaatgtttgtatattctcacgttaagtccttcttggaataaagttggtgtagagtggggatgggagaaaaattaatctccgtaagttgctggggtagaggtaacagtgttttatgtgtagaggaaataatgtctactgttaagtctttcgatcagccaaaagtggagtggatagtgcttaaaatgttttgatgtcgttgtgaggattaaagttatttaaaaagaatggatgtggagttgattttaacattttgggattaagaagggtggagagttctcactggaggttgtttgatgtgccctaaggctggttgagcacctctggctgcctctgagcatgttgcagtcccctgtcaagattccctgggtaacctttctaaaattttgctccagcgcccagtggaggaggctggattctgcctctgctgtcttagaacttcagtctttccttacaggtatagctctcttcatacacactgcttgactgcaatgtgttcaggttacatgctgtccttaaatcaggcctccataatttcttggcagctttccttttgcaatcaaattagcacttgggtctagaagccagttaggatgattggaagaaaaaaattacagatggttaaaattgggtcaaagtgcacttccttactctgttctctttacaagttaaaaatatctaaaaaatcattgcagctgtgtcagcatttctcagtaggtgccagatttaggtactacctttcagaatgtttatgtactgtgaaggggaaaatccattaattatacagttctgtttgtctaaaacgttcaagaacatttccactgccctctgcatgtttgtgatttttgggccattcagttcagtctggattatccgatagagcacagtgttctgtcattggttcaggcatttggctgtcttaccccacagaactgtgtgttctaggtcgggggcaatattttatatcttttacactctgtgtatagtgctgagcatgttacagttggaaaytgttaattaatttttgttctattttcctgcactcaacttttcctcccagaggccccacctgaatttaagaacaaataagttattataaagtcttgtaggaaaaggcctggtatatttagagaatcagatccagctgtcacctaccattcatacagaaccatactaaccttttcctaaaagtaccatcaggctgttggttttgtaagttttctttcgttcattttccttttaaaccaagcctcatctgtgaaaggaggctgaaatctggcagacctctttattatgctctatttgtccacatgtggaaaccaccagaaaccagtaaaaaagaatgggaagtgaccaaagagcagacagaaaataccagttgccctagggagcacccagctcttccaaggactgcatgggtcctggtcagaggggcaagtgaaataccgcagctgcctcctgcagaggggtatctcttttacttgtgagcagcgtctgcagctgtgcaggctctcagcagtgcttagtgtcagccatgtcccttgatttatgctcgtgtgagcctctgcacatgtgggtgctccagcaggctagaggggggaggggtgccccaggtccccagaggcacagagctttttttggataccgagcctgagctgagaagcgtgggatgcaagagtgatgtcctgctccaagttcaaggaaagtacaaagtaagcggaaatgcatcccttcaaatagaggaaatcccaagttgcttttatgtttcccgttatagctgtgtgaagtcatatcttgaggtttagctttcacgttgagtttcagctgctttttatgtgtggcgtggtgaatgttagttttcagcatttccttatttcagcgtatgttgcctccgcactgattattgtcctttgttagtttagaagtcttgttttatccagagaaacagaataggaaaataacagcaattttgaatggcagcttcccctccttttatgataaaaaatacagcttctgtaaaaaactgcggcaagagaaaagaaagggcgtactgttgtccctggggataaaatagacaggagaccaaagactacatttctactgagcagtgcttttattaatgaattctggtagagttttaacagcagggcacgatttcctcctattgtgactcctgatgacctccaagaaataattcctgaatgtcacgctcataagacatttttctgattatgggcttgtaataattagatgtttatccctagaaaatattgccaacaaaaatttattaatagtgcaaaggaggtgcttatgcaccttattatgtaaattgttattttatattcaacatcattacaaacgtgttttgagagggctattgagatagatctccaagacatctgccgtaaaccagtacttggacttacagccagtgctctccacatctctatggtaaggagcattcaggtcaggaggtagaaatggaaaaccaggaaggtatttggtgattagtttgtgaagttagttgtgtcaagagcaaattaatttttttaataaaataagtctcagcaattttaaaaccattcatacaaaagaagcagagttaaaatggacttcacagtagtttccatggggattaccagaaggtgtaatgcatcttccggggaaagaagaagatggagggaagtagaataggatggggaatcgtagagagtcacagttgatttcaggtgccactcggtggcattactgtcattgtttacttccgagcatttagatctacagctagaagggactcagagaagacagacccaagaaaatcaccaaggaatttgcctgtgtataggactttgaaatggacacgtctccttgaaagtgccacgttggatgtctccaggcatggatcttgtctagatggcatttgcagttttgcatgctttgctattgaaatgttctagctaatgaatgtcttccactgcctgcctgtgtgtgtcaggtaatgcatctttcttcacagaaggactgaattcagagggtttcttgaagaaaatttaaaagctggtgatatctgcatagttgctttattttattttatttttgagatggagtcacgctgtgtcgcccaggctggagtgcagtggcgtgatctcggcccactgcaagctctgcctcccgggttcatgccattcttctgcctcagcctcccgagtagttaggactacaggagcccgccaccatgcctggctaatttttttaattttttttttatttttagtggagacggggtttcaccgtgttagccaggatggtctcgatcgcctgatgtcgtgatctgctgggcctcggcctcccaaagtgctgggattacaggcgtgagccaccgcgcccggctgctttattttattttattttttgagatggagtctagctctttcacccaggctggagtgcagtggcatgatcttggctcactgcagccttcacctcccaggttcaagcgattctcctgcctcagcctcccgagtacctgggattacaggtgtgcaccacctggctaatttttgtatttttagtagagacagggtttcgccatgttggccaggctggtcttgagctcctgaccccaagtgatccgcccacctcggcctcccaaagtgctgggattacaggtatgagtcactgtgcccagcctgctttagtttatttggatggtgactgtaactttaaacatattaatactgaacaactaaatatactatgtatgctgaaggatgctagatttttctaagtcagaatctgacagctttctcagttagctgctgtttgtcagtcctttgtgaacaaaaatactggtctacctcatgttaaggaaacgataggtgaaatgagatttatttaatcataccaggtattttaaacagccagctcttttttttggcaagctcttaatgttattaaaaacataatttgtcacttaagtcttttcagcatacatatagtttcttagtcatgtaattcataaaatagaatttagagttgaaaggaacctaagaggtcccttctaaatgtgtagatcttctgaacagtgtagaaattttcctccaccatgtctctgctggaggatattgtctgtggccatgcacttggcacctttcaaggcagccaattctagggaataacatttcttattggaaaatgctctgttggcctgattgttgctgcattttcccccttgttaattcatgtttgccatttagcaacacaaacgaagtctgttccccttcattcatgatgctcagttcttaaagctgagaacatgatggttaaggcagcacagtgaaattgccaactacttgccaaacaagtggatttgaaccagcctttgcctcatttctgtccttggcccgagggatttagaatccagcagaccgcaaccttcctccctatttcccctgtccatttacagatgaatacctggagataccacaagcttaaatgtcttgcctaaagccacacacattggcttggagcttagtgagtttgtattaggtactataagtgatttagagctgatttagagtatacaagaggttatatgcaaatgctgcgccatttcatgtcagggagttaagcatccttggattttggtatccacagggatcctgtaactaatccattacggatatggagggacagtggtacctctgaaggctgctggaggataaagctctaactcaagagccgtggatgtggtggtaacttggcagcagtctctttcccaaaggcctccttgcgggagggagggcagtgctcatcttaattttctggtctctttcctagactcaccatcattcctcagggaatcagttgattaattaacaaatgcttggctgggtgaggtggctcacacctgtaatcccaacactttgagaggctgagacaggaggatcatttgagcccaggagttcaagaccagcctgggaaacaaagcaaaacccccatctcttaaaaaaaaaaaaaaattagctgactgttgtagtgcatgcctgtagttccagctactcaggaggctgaggtgggaggattgcttgagcttgagagtttgaggctgcagcgattgcaccactgtattccagcctgggtgacagagtgagaccctgtctctaaaaaataaaaattatccaaatgtctaatgagcatctactgtatacctggtgctgcactgtgaggatgccctctaagagccccctgtgcggggagagagaggttgtataaaatgtttgcaaaggtggaaatggagtaggagacacatatgtgaggacatggggctgcagggaaggccttctcaactcctctcaggctgatggtgagttagagaccagccagggaaattgacatctgaggcagatctggctgagtccaccaggggaagagggtgggatggtggagggaaggggcttgaaggactgagtgtagagtcctttgtcacataggaagatgtccgtgctttgtgagcaggcaggagtcttcgaaggttccaaagcagggaaatgacataagactactgaaggccaggcatggtggctcacgcctgtagtcccagcactttgggaggccgaagtgggtggatcacgaggtcaggagtttgagaccagcctggccaacatggtgaaaccgtgtctctactaaagatacaaaaaaaaaaaaaaaaaaaaattagccagacatggtggcacatgcctgtaagtccagctattcaggaggctgaggcaggagaatcgcttgaacttgggaggcagaggttgcagtgagctgagattgtgccattgcactccagcctgggcgacagagtgagactccatcccccacccgccccccccccccacaaaaaaacacgactgaaaatacttggaaatagtctccttaatttgtttttttttgttttctttttccaccaatggtggaattcggatgggaggaggcttctaattttctgctcacaatgttgttccttcactagtttgaagattcttctgttgtgaaagaccaagagaacatatgattagttaataggagctgtattctatctgtagcttatctcttcctggccccaaatatagcttaaaaccttgctgtccttcctctgcttactaaaaaaaaaaaaaaaattgttcaagaacttcagctaattctggatttgtcttctgacaaagttccctgtggttcataccacatttttgtttcctccctggccatgtgctggcccctgaagtgtttagatctgctgttttaaaaactgagctccctagccagtcagattaattgctttggatcatgccattctgtctttctcagattgtcgtatgttagtgtctcctgtgccacataaatagtaatctcttgtaggtgtctgaggtatatttttcttggacttgtcaaaattagttctcagagcttagagatggtgtcctgctgggtttattgttcccttgtcttcttgttactagttccaaaattatattctcactttcttccagggttcttggctgcctaactgatcaattcttttttggtcagagttatggatgaattttattggcttcgtacttttccaaaatttcaaccatgagcctatagggttgtatatataaatttttagtagagacaaggtcttactgtgttgcccaggctgatctcgaactcctgagctcaatcaatccttctgccttggtctcccgaagtgctgggattacaggtgtaagccaccatgcctggccatatattactttgtaaaatgaacaaagttattaattgaaaagcatgaaggtggtgaggatgatagctttgcttattgctttttcagaggtgggtcaagagttcttatgatatgtcttttaaattctagaataatacctacagatttctctttacatcttgattctgtacaaatttgtgtggtttaaaaaaatgagagagttctctccacttctttggtttctttaggcagtaagtgacaaactctcatagcaatacttcatctactttgctttcctttatatttgcacccaaatttcttcattctctcacgcatatatctcttgtagtagattgtttggacaaagggcaccttgaactggcagccttgcattctgcttgcctgcccaggcttggtcctgtaaggagacttgtcctttctttttgtttgttttttgagatagggtcttgctctgatgtccaggctggagtgcagttgtgcatcacagctcactgcagcctcaaactcctgggctaaagtgatcctcctgtctcagcctctcaagtagctgggactgcaggcacacaccaccatgcctggctagtttttttgcagagatgaggtcttgctttgttgcccaggctggtctcaactcctgacctcaagcgatcctcctgcttcagcctccgaaactgttgggattacaggtgtgagccaccatgcctgactgatttgttccttttggtggtcaatcttggttcagtagtatataaatttagagtgctgctgtattttgagcagctgctctgtcatatgagcttgaaatattgggttctatgctgcttctatgttgtgtaagtctccaaactgaaaggatttgtgactttaaaaaatgcccacttttgctcatattttttgtttcctttatttgtttggcacttgttttcacagcggtgacttcagagcacaattactgagaaaccttgagtgttgatgtaaatcctccactgggttctactattacatacatcttcgtaactaggtaaacttccaggagtcactgaaatttggtatctgtaaatgaaaaattatatcaaatacagataccagtgaaattgctagatttcattgatgatttcagttcagtattctaaagtctggatgtcacttagtacttggcaggattgcaaagcaatgacatatgtgcatgcaggtagttttaattcaagccaattgtgagaaggatgttttattggtataagatcagtgtagtgttgagttggttgtggttttcaattgctgcttttgttttggttttaaattataaattagttcatttgtctttatcatcagtttacagttgcattgtgtcatgtgcatttaacttatactaattcaagtctcaatgtttgcttaaaaataattaacaatatgtatttttttcatgcaacatctccttaaatacaggccagatgcgtttcttctggtattcaaccatagaaacagcaatcccttccaatgctgcaggaaaattggcagggttaggctttgtgaaaggtaatgcagcactcagaaaaccacatgtgcttactgtgtgtgctatttaagtaattttcaaggataattttgtcttaaccttagccttgattttagaagccaagccttgcctaaaaggtgactccgtgcagtttgtggagagttctttggccagatctataggatgtagtgctgtgtttttagcatcagtagtgctttggagttataatttcctaataatgagaattgaagtcaggtatgttttgctgttaaaatatgactcatttgtgactctgtttctaaataggtgtgtattttctcccctctgtttacgtggtgatagtccatttttatcactgagtttgttctagtggaaagcagtagtgggtgagaaatgtggactgtgtttagtaacttggaaagccactggcttaaagtaaagcacattttatttcccagaggtgggagtccttgggggtagtgataatgttggtttacttctgaacatttatccaactaatcagtgatggaattaagtctctattattctttcatattatgaaagcttctaattgaaaatgcaaaacaattatgaggcactttaaccccatcaagtttatgagaagaacattaagtgcctagtggatgtttgcccaaaggacccaagtgggcaattcacaaaggagggaattaaccagtaaaaagccacagaaaagcaccgaataaacctagtcttcagagactcaaaagttaaaatattatcctatatcctgttaaattggcaaaaccaaaaatgattaacatacctgacgctgcaaagtcacagtggcctggtgcatttggacgttgttggtgatgttgtgtaaaagactgcatcttctcggaacagcaatttggcatgattatcaagatctacaaaaatgttcatgcccttgcagtcctctgtaatactwgttatccctagggaactgaaattatgggtaaggatattcagtcccacattatttaatttccgaaaccattagaatagcttcagaagttcaacaagaggaaaatggtgaagtcagccacggttattcattagaagaaacaacatagagtctatatagcagaatgaaacatgcttgtactaggccaagtgaaaaaaggtaaaacattaaatgaacactgatgagaacaaggttaaacatgttataactaacataatatctaagtgttattagttgtggggcaagcgtttatagatgtattttctctttttttgtttataattaaattcctcatcaaagtaaagagaacattaaagaattagataaggctatggtaggatgaaaatgagatgctgggatgactttgttttaaatccaaggagatgtgtcagctgtttttggtgtgccgtgtggttctacaaactgctcatttgctgtgtaaatggatgtagctttccaagatgcctgggtatgaatgagaagtaattttggtaaagtaacatgttaagggcatattttaaagttcacattccatctgctgagtgttctgtatttgcaaaggtatttattacaggctttcttgctccgttgagaatacaagctatagaaccatgtagaaatagttttttttttttttttttttttttagatggagtcttgctgtgtcacccaggctggagtgcagtggtgcgatctcggctcactgcaacctctgcctcccgggttcaagcaattctcctgcctcagcctcccgagtagctggagttacaggcgtccaccaccacgcttggctaatttttttgtatttttagtagagacagggtttctctatgttggccaggctggtctcgaactcctgagctcaagtaatccacccgcctcagcctcccaaagtgctgggattacaggcgtgagccaccatgcccggcgtgtattcctcattttaaagctttagatcatttgtatttactttgatttaaagatactgtcttacatttgatattgtcagttggtatcaacatttaaaaacaggtttacaattgataatgagaaaatamcttttattcgaggaatgcaagtccttttattttttatttgtttttgagatggagtcttgctctgtcacccaggctgaagtagctgggattacagggggccttgctaattttttgtatttttagtagagacgggctttcactatgttggccaggctggtctcgaactcctgagctcaagtgatccacccgcctcagcctcccaaagtccggggattacaggtgtgagccaccacgcccagtgagcttgggttttctgctatagaactgaccagggcattctggatttgtgagtgaaagcaggaacccctggaggggtgcatcttgcattctgcttgttgggcgagatgaatgtaggccactctaccttccagactgcagaacttccttggtatttacctttgtgaaagggatccacaaatgactttttacccctgccaggggttgatggaagttgtttccaggtgtgacccatcttcattggcttatcctggcgagctgttaggaaaaagtgtcattttaacttgctgtattcctctgaagctccagaatacaagatctgagctcactctgttgaaaaactcctttgtttctacctraaagcacaggatgttcatttctatcagatcagttcttttctgtataccagcctgaacatgtgtgtgtctttgtctaagcacctcttgcttcataagatacaccaccaaattgaaaagagttagtgacaactgttccttggctggcatcaaaaccagacaccaaagaaaagccagcaagtaattttgtaagactaggtcgggctgaccgacgtyatttttctttctcagttttgtgtaacttttctgttttaaaaaattgttttgcattaacacgctgacagaaatatgctgctaatgacatagtcatgatcttgatgatggtgataataactgtagccagccttccttcactctttgctscccatgtgccaggcactatgctacacgtgggacccctttaatctcacagtgatcctgtgtggggggcatagttgttgctgttacctcagatgaagaggggaggctgrgcaatgttgagtcaaaccacagggacaggcagagccacgttctgagctgcaccgtctttcttcctgatgtaaccattgtgcccagcacatttagcatcaccatttgctttcaaaagccagaacattttaatcagaggaatgcaaacttttaaaagacattatgaatttactttttgtgcagtttcctgatgaaaatcacagggcttgcatgttttcaagtgaccaattttaatactaggttggtattcttccttccctccttcctcttgtctctccgtctttcccttttatgtcttccatcacagggagttctgcatctccgttgcagaacaaccctgtagacttttagggttttgagttcccagaggagcatctcaaagcctttccaaatccaatgatgtcagaccttaaagatcmcggggcccagggctggcaaatccatggcctcactttgctgcccacctttccgggtctgtcatggaaactgagaacagggcacatccctgtctggagtcttggaatctctacatcattgcaggtgatacccctaggaaactggaacttaagatacaatttatctrcctttcctaatttactctgaaagcaaaagttctagattagattcctgtggtccgtggtgggagagtcatctgtccaaggccacataccttgtaagtggcaggtgagtcttgactgcaaggctagcgttttctgctctgccgggacaccttgattttctcagaatgcaggtccagcgcaagagtttcctgctcagaaatgcccatggctccctttcacttacagttcttcctgaccctcagggcctctaggatgaaaagtctgggagcaagttacttcatcacatccagataacccttttatgtgcagggtgtttggttggaggtgctgccctcaaggcgtttacaggctagccgagggctcgaggtgtcatctccgtttaagaatgcttagaataccaggcaaaaagtgatagttttaatcagcagtaagaagtgcttttgcagttcaaaggtgtgagatgatcatggattggccataaccaggaaagacttttgggaggagatggcattgactagatcttcatagaaggacagatgtgtgggcatggtgactgaaacagcatgaagggtgacttgtgtctaaggagcaggaaacatttggctgggtgatgtggtctgcaggcagaagataaggctaggaaatgactgtcccggagggtcttggatgaagggccatccgctaatactgaggaagtcattgggagccagtgaaaatttttgagcagggaaattgggrctgtattttaaccagatggagctggtttgatggtaagggtgtactagagaagsggaaccccacattctgaattaatgtcacttaggaaaggaccccttgtaagtatgaaatggttataattgkgtgtgtgtgtgtatgaatttgagaaaagtgtataactgaagaacactaggtatggttttcttgttttttttttttgttttgtttttttgttcgtttgtttgtttgtttgtttttttaaagacatggtctctctctccctctgttgcccaggctggtgtgcagtggcatgatcacggtcactgaagccttgacctcctgggctcaagtgatcctcccacttcagcctcctgagtagctgtgactacaggaacgtgccactatgtgccaggctaatttttgtattttttatggagacaggtttttgccgtgttgcccaagctggtgtcggactcctggactcaagtgatccacctgcctcagcctcccaaagtgccgggaggtatggttttagacaaagaaaaaaaaaattacagtaatgattttcacctggagaggataaatgggaggaggtgggctgaattcagggctgactgtgttttttggcagtgtcgatttggtgttcagttttcagaggcattccgttaagccatttggaggcagtattttaagtgagaatgtggctataggggtgggcagataagcttgtgactgattcggtcagggtgttggtaggcagacctagccctggtggtcgccgtaccggtggtgctcagtatccgtggaggtctgccagcatcctagaagccctgggggttggctgtgccatcagccctgtgcagacagctgcaaagcatgacttggggcagaaggggccaccttgtttatgtggagggtgaaggtttgctgacagtgacaccagcttgagattgagagacggtggggtaatggaattcattcagttttggcaggaggcagaagtcaagggagtttattgatccgagccttgagagggcgggtaatgagcagtgtatcttaggtgggctgagcggtaaagtttgggcaccgagggtgacgtgaactggagttcggcgctgggaactggatattcacctcccttcagagctctgtcaccatgcctgrggtggagccgcaccctgagtgcgctcagcagggagtggcatgtgtgcagggcttcagccagggctggcagccaaggaccaagccatttgcctggctccaccatccagagtgcagagaagaaaagtgggccagagccaagtaagttttcccttctctttttcactctgctgtgacaccctcagagtgttgagtaatagggcttgtgaaaggaaaataaatcttgggggccccaaaatcactaagcagggaaaaggcaagctgggaactgctcagggcaaacctgccgcccattctattcaaagtcacccctctgctcacagagataaatgtgtatctgattgcctcctttggagaagctaatcagaaactcaaaagaatgcaaccatttgtctcttatcttttatctacctgtgacctggaagccccttcccaacttccagttgtcccgcctttgcttcgagttgtcccgcctttgcttcgagttgtcccgcctttgcttcgagttatcccgcctttccagatggaaccaatgttcatcttacatatattgattgatgtctcatgtctccctaaaatgtataaaaccaagttgtgctctgaccaccttgggcacttgtcatcaggacctcccgaggctgtgtcacaggtgtgcatccttaactttgacaaaataaacttcctaaattgaccgagatctgtctcagatttttggagttcacaggctcatgtatggagaacttggacagtagaatatccttagagcactgaagtctagttaagtgaggactgacaacgtaaggagatgttgaaaaatagtttcaaagaagaaaaaattgcacatatgtttttgaaaacaaactcatgcttcttatagaaagattagaatctcattgcttaacatttatattttcatccctttaaaaatctcttttttttttgagacagagtctcactgttacccaggctggggtgcagtgtcacaatcttggcccactgccaccacagcctcccaagtagctgggattacaagggtgcgccaccatgtccagacaatatttttgtattttaccgtctgtactaaaaatacaaaaatattagcccagggtggtggcgcgtgcctgtaatcccagctactcaggaggctgaggcaggagaatcgcatgaacccaggaggcggaggctgcagtgagcccagattatgccactgctctccagtctgggtgacagagcaagactccatctcaaaaaacaaacaaacagacaaagaaacaaacagaagaaaggctgtaattgtatagtcccaccagcataccaaagtctttttggaagtaacctctcattagctcaattaatgaggttgaattaaaaagtcacggagtccgtcaggctgctgagtgttctgggcactctgtgagggccagttaataggatgtgcacctcctgagctgtgttcctttctcccctaccctgagcacacgtttcagaggaacatggcgagttctcaggtagcgacgcttcccagctgctgtgccatcaggtggcactccacctgtccctctctatctcgtgatcttgttttattttcttcagcgtgtttcttactaactgaaattatcttacatgtttgactttgtctcattgcctagactcccagctctgttaaaacaagcactttgtttttctagttcatgctgaatccccagccttgggcccatagtgggtgctgaatatatgttcattgcttgaactccagagggtttctgtagcctctgtctccagtttgccccaagccactgtctcaggccatctttatgaatgacactgcaggagtcctgggcgctgcagctcctgtttagggatgtgctgcttgtgggacctcttctccctgggatgcctcctttctcgctgagtctaggtctgaggacatgcggattctttaggacctaactcagttgctggtttcttccacaaaacctttcctaacatcctaacaggctctagtgcttgcctgtttgagcctccgaaagtcactgtggttatcttaaagatgccttacaccacgttcctgcgttgtaattgtgtgcatagttgtctgacggtaggtccttttgagtcagggagtcccttgaattttttcctcaaaggcctttgtttctatacccctgctttttttcctcctctgaaaattttctcaacatctctcatcttagatcttctgggtcttttttttttttttttttttgtcaattaagtattttaaaaatattagagctggtaggaatcttggctgacgtctagtctcattagaatgtgtatctgtactrtgatttttccattaacttttgcctcaggagtttcgaatcagctttggggctagtagcaaatgtagataattgtttcctgattaggagtcagatttgacacttccttattgaaatgttttgctgtctgggatatgaagcagatggtagcttctggcagagcagatgtctgtgttgaatcagagtattttaaatctgctcttgtaccttgaagtgtttcccttggcaaatacccacttctgacctgctagtgtcagctttgggtgatccccccacgtcccmcatacaggattacacagatccttactaagaagtctgataaaatacaagtaataaaacataatttagtattggttaatccatgatgctttattctgatgcaagtacaacgtgttgattgacttggtaaccagtgaatcattaataaatgcactgttaacttggactgttgattcataacactaaaaggagtaatttcaataaaagatagtttgattcttcagattccctattggggtggttcagagcacagactgtaggtaggctgtctggatttgaaattcagctctgtgtaatctttaggcaaattacctaacattgcagtacctcagtttcctcatctgtggaatggggtgtgtgtgtaataatagtacttacttttaggattgaatgaggatcacatgagttaataaatgaaaattgttgagaatgttccgtggctcacaatccctgcagagatgttagccactttaatactaccattaaggtctcttcttccttctcctctgagaaataagcgcttaacgatatcactgctcctgtttttagtacaaaggctggatgaagcccaaatctttttttttttttgagtcttactctgttgcccaggctggagtgcagtggtgtgatctcagcttactgcaatttctgcctcctaggttcaagtgattctcctgtgtcagcctcccgagtagctgggatgacaggtatgcaccactatgcctggctaatttttgtatttttagtagagacggggtttcaccatgtgggccagggtggtctcaaattcctgacctcaggtgatctacccgcctcagcctcccaaagtgctgggattacaggtgtgagccactgcacctggccgaagaagcccaaatcttaagaagaaatgctctactcaaaaccatgcctggtttatgtaatgtggctttctttctcctgagctgggggttgcactagctgttacctgggacacaaatagtatggatggaatgctwtaaatcggaagtatgggtttttggacatcttgcttagatttgagctttcacccttaaactttgtatttttctttggacggaagtattggataaaggtaccagaaaatcagtgcgttgaatttgaactgtatctttttgggggaaggggcaggtgtgtctttctctcaatactatgtttacttttggctctcgtataccaaaaggaagggaggatgctaaagtctaatagttggcaaatagctgtctttcctgctgtgggtggcactgagaaggatgagacctaatcctaacttcgtaaacttttcatcttataggaaggtgaagtacatagattatggacagtgcaggctgtttatgaagataaatgttttcatcttaacagtactttgagcactgtgtgctgggctaatgagaaacacaagacagccaggtgcttatctataagagctgtctcagaaaaggtggttcagagccaacttgtgagggaaaccctgctcccactcctgggctcagttttgccttcattttctttccagtcaacagttcccaccatttacctcttagcacactacccttaacacacaccaagctatttttttttttagtaatgtttcattatggaaattttcaaagtaaacagagagtagaataatgagcactcaggcacccaccactcagctccagcagctgccggcacagacacatggccggtcttgtttatctgtaactcccttccccacttcctccagtacctgctggattagttcaaagcaaatcccccaaaatatatcatttttcctatagattcttctacatgtatcactcaaagatgaggaaggactcttaaggaattctattttaaactgtattttccaaccaccattttttattcaaggagattgcattcattggctaaagtacgtaggckggccataacatgtcaggtgagtgtataattaggagatcttatatttaatgagcaccctgcatttagaatgccttccttcagaagtttcaaagaaatcctaggttgcccattttccttaaggtcttgcagacaaactcttgttgattaagaaatttctattgggtttcttgagaatcataaagctgcaataatatatgaccagtgcctgggtcakcttcccaactagcatgcaggacggtgatgcaccttagtccttgaggaagccaggtatgagcagtcccacggtgttgtacaaattccgttttctttttatgccattgagtataaaagcttgggaaccagtgcctatttattggtaaactaagtgaaaatccagtgacttcactgacatatttggatcttattagtatatggctgggaggagattaagtcatttgaatttatttcaattctgaaaagaaagtgctgcctaaaaattattatagtatttgggaatatttctacccagtatacatggtggcagaaaatcacataatctgtgttgtggcaaaagcattgaataggaagccaggagatgtgggttccagtacccacatgccgtctctcctgagtacccaggtggccgtgggctagacacagctgcaggtgtctagtttgtaggtgatgggttagaaatgggctgtaaatgagatgaagattgctttggccttggtggggtggagtggtgacatttatccttaccttaaagctgataagttcatggtgatggttctcagccccatatgactcaacatctctattttttcttttaattttgaaataattacagatttgcaggaagttgcaatgatacagggaatgaccctgtgtctttctcccaccttcccccagaggacacaggttggcaagctgatgcaggtgggtggcattgccacttaatatcacagacaaccttgctgcagccctcagctcttcaaaaatagtgacctttccttagaaagttactatttcaggaatgcattgcccatgcactgtcaacactgggcaaamatactttgtgtttatgagctcaaggctcagaaaattatagacaaatttctgacccgagtgtctggtgggacctttagatattgaagacaatttcttccttttgtgggactgtcccacacattgcagaatgtttagaggtccttgacctccgccactaaataccagcagtgacctccagtcattgtgacaacaaaatttccaaaatgtcctctgggcagtggttctgcccctttaagaactactaagatggtgaacaaatacgccttctgatagaatctgtccctcagtgcccccactggcatgaaaattctcagtgtatggagtgttgatttgaatcatgtgataatgttgatggtctgatgtacaatgtttcttattcttaaaacataccaggtgtgtattatatttgcaaagtaaatgtagtgcttctagtggtagctggtaggtttgctggtagctgaatgtgggaaccctagaagtcatgtctatggctcatcttcactgtgagtgcagagtcctgccagcccagcacaaatggctagtgtttcttcatcagcaacagtcattttccccgactcccagtctccaatacatcaagactattttgtggaacgtaagagtttttgtcaagtatttaacatcatatagatagagccttttaaaaagtaaacttttggctgggtgcagtggttcacacctttaatcctagcactttgggaggctgaggctggaggattgcttgagtccgggagttcaagaccagcctgggcaacctagtgggaccccatctctacaaaaaaaaaaaaaaaaaaaagtcaggcatggtggcatgtgtctgtgttcccagctgaaggctgggatgggaggaaggctgargtgggaggatcacctgagcctgggaggttgagtctgcagtgagttgtgatcgtgttactgtactccagcctgggcgacagagtgagaccccayctctctctctctctctckctctctgtctctytgtctctytstctctctctctctccctctccctccctgcctctctctttctcacacacaaaaaagtaaactgtttagtaaagtgggttgataaatgttttagggttttgttttagaacctgaacctattgtaggagtgacctgggtgactttcaggtttggaaacagcattagagtttctatttatgtgattttcttttttaaagaccaacttatttcaatgtcaataaaagtatgggtgtaaactagggcttcaaaatagcttcgtgaaataaaattgaatgctcttttgtggctgtgttcaaatcacgtatacctgtatttatattttatatatatgtatttgtatttatatctatgttatgtttatatgtgtgtaagcactttttctaatcccatccttgacacatcatcctccctggttcgtttatcatgatatacataatttttttggtggctgtactttgttcctttaggactcatcgttttcttaagtagaacaccatagccctttctttgtagaagtatagtgcactgcagaacataaaatactacaaaaagataatggaaggcaggcatttgtctttgcttaacattgattctccagggtaatctgctcattttaatcatcaagggaggaatgctgaatcattttatgtgagttagtagaagaaataggccattatttgccactggaaatctcccaggaattttataacttggctatatttctaaaatgtttcactaattactttttaggactgaaaaataatcaatctgatttgttttgttttaaactagcctagataccagaatatgtgtataattttttttatgtttgaaagataatccaaatggggattccttttattttttgacagagtctcgctgtgttacccaggctggagtgcagtggtgtgattgtggttcactgcaacctcagcctcctgggttcaagtgattctcctgcctcagcctcccgagtagctgggactatgggtacacgcaaccacacctggctaatttttgtatttttagtagagatggaagttcaccatgttggccaggctggtctcaaactcctgacttcaagtgatttgcctgcctcagcctcccagagtgctgagataataggcatgagccactgtgcctgaccccttttgtttttttaaggctaggtacttgaatatatttgtgtttcaccccactttttttttgtttttggttgaattttatgtccaaataatgttatatgttctgtgacaggatcatatataaagaaatatattaattatccaatttaatttaatttatttattgcagtataacacattatcccaaaacttagtggtttmaaaaacagacatttactgactcatagtttctgtgggccaggacttgaggtgtgtgttagttggatctccacggctgtctgtctcaggttgcagtcatctgaaggctggagcagggctgggcattctgcttccaagcttattcaggtggttgttgacaggaggtgtcaactcctcaccacatgcagctcctaatctgagagagagccagtgagtgcctaaaacagaaggcacatgctctttataaactaatttggaagcaacatcctgtcacttctgctattatattagaagtagaatggggctgggcacagtgcacatgcctgtaatcccagcgctttgggaggctgaggcgggcagatcacttgaggtcaggagttctagaaagcctggccaacaaggtgaaacgatcttctctattaaagatacaaaaattagccgggcatggtggcaggtgcctgtaatcccaggtacttgggaagctgaggcacaagaatcacttgaacccaggaggtggaggttacagtgagcagagatcctaccactgcactccagcctgggtggcacagtgagaccctgtctcaaaacaaacaaaaaaagtagtagattgggaccaggcataatggctcatgtctgtaatcgcagcacttttggaggccaaggtgggaggatcacttgagtccaggagctggagaccggcctgggcaacataataaatactgtttctacaccgctgcgctgtcccccacaccccgcctgccaaaaaaaggtagattggggaggggtttacacagagacataaaaaccagaagatagggagatcattttagaggctgcctcccacattgagattacttacataatatagttggctaagattggaattatactaaacttgttgaaacctatatacctagtggcattgtgaaagattttgacaggtaaagtcatgtgcaaatacgaataaaggaattccactccccaaaacgaagtatttttagattcataagtgttctcagctaataaagtagacaaaaatcagaaagcgcagcagtatgtgcagagcttttcacatgatattaaaaattaagccataaggcagtttgtctcttattccacatgtggaataaagtgacttgtgaaatgccatggtgggtgcctttattcaagaatcctcttcagtagtatttttaccgcagcacacacgttatgctggctgaaatccttgtgcgtagcatgttgcctgctgaaaataattctgccttggccttaggcgatgtgctgttgaattggctgcctcaaattgtccctctcacttcctgttttatatgaatactttttctttgctctcttttacttgcttaaaatcggaatgtttgattgctatgtgcatcatccttcagtgaaatgtttgaggtggaaagttctagaagtttctttttcccttttgttgatgcgtggaatagataccagtcacttttagaaatacttgggtggttctagctaaaatgtgatattctactttagcaaggccacttgtgaaacagttctcaagagcacagtgtatctagtaagtgcttactcattgattaaatattatgtacattgtttttcttctaatgtgataggaccatttaggacctaagtttaaagatttacacgtgtgaataaaatccgttgcataccctgttctgagccagttttctatgccgtagtatatttctttggttcctattagaaaaaaaaaagtgcttcatatccaattctcattgagttgtatctattctcagtattgagtttttttttctttttttctttttaaaaaagtttcagtattgaattttgattactggaagccatttaattttgtcttcatttattttagttttcatttatcttcagtgcctatgattctgtagctttttccttccgcctctttctrttctttttgtgcagcaaaaatcatcctccatgtcatagtctttgtttgcataacctgttctgtctgacacaaccatctatcatgacctaatttagccgtttcagtcacacctagtataatttataccatgggggaatttcctgtgctgttaaaccttccttgtcatccgtcaccaacttaaggagcttccaggtgtgccctttcacagggtgggcttggacttttctagttcttgcattttaggtaggagctgttctcaggaatttttttcttctgtgaatgagtaaagtgaaattaatccaaactcagtgcttccaggattaaaacacatttccatattacactgtctgtaagttgaagggccttagtgcttgagtgccccaactagaaaatgactcatcatgaggtgtccttctgtagacagtgtgacgtgataagaggaagaaggaaattgtgggcaacacagtgacttcccagtgacaattcacttgcctctcctaatatcyttcattccaaagctgctcttctgcagatggttatgaggcatagtgtggtggagtggaaagactttggaataatgctctgccactttctagctgtgttatttggaaaaattgcttacctctccctgaacctgggtttccttatctgtaaaatggggagcatactacctttcttgaagggatttgttaaaaagaatgtgtaaaataacatatagcagtggcatgtggaaattgttggatactccaaaaaagttgatgtgattttaaaactttttctttactcagctaatgtttatcctagcttttctcatgttagtactaagccctgattgcatgaggttttcttaaagtggcccatgtagataattatagcattttctagcatttcatagtttaggccaatattggattacagaatgaatactttgagtgcttgcaaaggggtcaggaacagatgcatttttaggagtatcaaagtctgccaataaggaagctggtttaggaaattaaattatatgcccaaacattttatgtctacagatgcaggtttatctagaagagaggagaattttctaatagtatactgaagcatcatcagcagaacccttccagtkcaaggacaaaatsgggcatcgtttactctgaattttatgaccagcggcagaaaaatgtgtcactgatgaggttaactggggaccagaatcctgggcatggtcctagttggcatgagtagaatttgcaatggttttcaggatgtattttcttcttttttcttttcttttctttttttttttcttggagacaggtttcgcccagtggcacgatcttggctcattgcaacctctgcctcccttgttcaagcgattctcccacctcagcctcccgagtagctgggtttataggcgtgagccaccgtgcctggctaatttttttgtatttttagtagagatgtggttttgccatgttggttggccaggttgctctcgaactcctggcctcaagtgatctgcctgccttggcctcccaaaatgttgggattacaggcatgagccaccgcacccggccaggacatgttttcttaaagacaatttaagagtcaggaagtggaaaaggaaagacaggtagatgaaggacaggctgtagcatgtcacacctcacagttatttgcaactttctgttaaccagatactgtgttagatgagaataagaacttaaattttttatttttagtgctgactagtaattaactataattttcagtcatgatcactgtgtttgaacctcctgtgcagatattgtggaaatatgtattttagatgtgaggaagttctaatataaatgaaggctctaagtaaagaaaaagatgcaaaatgctgtcatagacttcgaaaacagatttggataaaaaacattgcacctaccagaggaatcaaggagaaatttttcctcacagatattcaagacattatgttatttatcttgtttatgactttagaacctttttttagggggatgacagtaccttttggtgatttgagtctaaaatttgaaactaagattcatgcagaaaagtaaaagaagaaaattttcggagaagaaagcagtggttgaaaaatctgttagcagtgttcccttttgtcttttcagcctgttcaccaggaactcggagctttgcactgtgattattttattggttcaaaggacagagattgtctttaaaatgatgaatggctttgattatgtgtagtggctcacacctgtaatcccagacttaaggaggctgaggcgggaggattgcttgatgctagcagtttgaggccagtttgggcaatgtagtgagaccccatctctataaaaagtaaaaaaactagtcaagtgtggtggtgcatgcctgtagtcccagctacttgaggctgaggcaggaagatcacttgagctcaggcgttcaggactaccactacgccacagcctaggcaacagagctgactctttttttttttttttttttttataagaaaaaaaaaaaaggtgcattggctgggcgcggtggctcaagcctgtaatcccagcactttgggaggccgaggcgggcagatcatgaggtcaggagatcaagaccatcctggctaacacgctgaaaccccgtctctactaaaaacacaaaaaattagccaggtgtggtggcgggtgcctgtagtcccagctactcaggaggctgaggcaggagaatggcgtgaacccaggaggtggagcttgcagtgagctgagatcgtgccactgcactccagtctgggcagcagagtaagactccgtctcaaaaaaaaaaaaaaaaaaaaaggtgcatttttttgccatggggagattggaggagggagggtgaggggtactgccaacctgtacagtgatwtcaacccagattagcatcctagcccctctctctgctggtttggtttaacaacttattgtaagtttggtgctcctgtgtgagactagagtaaaggaccatgggcatcttcatggttgttgggaagctgttagtccccagaactagagcaagtggggccagtaggtacaattctcagatatggtggcctttgaagcaggtaagcacagcctgtcttgggccttaacattaatgcctgtcttgttgatttgtcattatcattttagttttgtaattggttgattgagacagaaggggaaaaatggcaaaaaaaagcatgttatatatgcttaggatggaatgttttctttttcccattcctcatctcaattcccagtttaatgccaaatctttgagtatccatattcttgaggagagactgttcttggaaatcatttgatgagaaaactgctgagaagctgatcagatgccaacatcagagggcagtttaggttatctgctaactacaagcagatccagatcctagtagcactgagcatagacagacaccaagttatgacctctcaagttgctagttgagcctcatgaaaggaagatttgctgtgggagggcatacccttgcactgggctcttgtgatcggcccagcaattctttttctgttattttttttgagacagagtttctctcctgtcacccaggctggagtgtagcagtgcaatctcagctcactgcaacctctgcttccctggctcaagcgattttcctgcctcagcctcctcagtagctgggattacgggtgcatgccaccacgcccggctaattttttttttttttttaatttttagtagagacggggtttcaccatgttggccagactggtctcgagctcctgacctcaagtgatctgcccgcctcagcctcccaaaatgctgggatcacaggcatgagccaccgcgcccagcctcggcccagcaattcttcttgaagctgtcagtcatcctttgcctcattgaaaatgtcgatttttggctcactctgcctgttttaaggaccttggaaaagtgacaatctcacattgaccaaaactttccatttgctcataagctttaaggacttcttacacgtagtcttgtgtccttgtggtcaaggatgtaggtccctgcttataagccccacctcatgttctcatcactgttgacatcatggctttagctgaagtgtctctttctgttattagttactcataaatgtcgtttattaacaggaggaaggttattcttagaattatttctgatgaggtatttgtatgtgtatagtttaagtcaggggattgtctgtaatccaacgcagtctgaaatagtttttggaggttggcatagtttcatttcaccctgtccaatttgttcagagaagcctggaatttttacatgttagtaaaagaaagaaaatctgcctgatttaaaaattagtggcttttaacaattgtatctatgatatgaaaaggagagatttgttgcaacaaaagactttctattaataaagtatttgagtattttctgtgtagccatgtgggtgtgtacacgataggtaaatgtaaaatatgatccttgcttttaaagaacttgcttatttgggaaagtacaggacaaagcacgtgatgtttcataagacgggttgtagaaagagctacttatgacttgaaagtgtttttattggtraggtaaatagatgcttgtatgtttctcaataaattaatctagcagtataaaaaattccaggccaggcatggtggttcatgcctgtaatcccagcactttgggaggctgaggcaagaggattgcttgaggccaggagttcaaatccagcctggataacatagcaagatcccatctctacgaaaagtaaaattagccacatatggtggcatgtgtttatagtcccagctattcaggrggctgagatgagaggatcacctgacccaggaggctgcagtgagctatgactgcatcagtgcacctccagcctgggcaacaaggagacgatgtctctaaaaaaaaaaaaataaataaaaccagaattccatatgttgtctgatctacgatgactatttttgttttttctacgttatcataaaaaacacttattcaggggaagccactttaaaagtatcctagatgagaactgtgtgctcctttttgttttaaggttgtgtgttctcccttgtcctttccctgactccctgcatactttgagatggcttgtgcagccccggcttttgcttggcatactcttcctgtctgtgattctctgcttctctccatggctggatttgctggtctagagatacaagaagatttgaaacctatgtcctcttggattttattaatcaaacatmtgcatgtccagaattcacacaaccctctgccatgccctccagggatgggctactgggaggatatttttatcaataagtaggctaaatatttatttttatcccactgggtggtttcacaggcatcagcaaaatacaaaattgcgttattcaccagagcatgagctactttctgtgttgtccatgtggcaaggtctttagaaatatttgtgtgggcctttgccatgttaaatggctgtattccaaggcttcatttgtggtggtctagtcttttgtaggaggatagtaaggacgaaatgaattggtgtcttccagcagtcagatgtggcacacagggctcagggcttgcaccagtcgtctgcctgttcttcaaggtttgcctggagcttatttgccagcttctccaagggtgtccccagctcttagtttgcttttccatttgtcagtccaagtgcccttggggatagagtgtcatcccctttggctcctcatgtgggcatgtatgaagaagagagacttcgtttgtacacacagcaatcaggacccctgctggagctggagaatcgaggtgcttttcagaccaatcctgaggccctgtccttggaactgaaacaacaggctgagatgactgaagtgcattaaggaggaggctttagcctgctgccttggctgttttcttccattagaaaacatctcatgaatggagcatttggaaaaacaggtagttttagaaaaadagaatttccactcagactttgagaccaatctctgtaattgttttggtagggtaaggataggctttcttgaaacactagcctttagctgaggtattcgcacacagcccctgtctctgcataaggagataataaccccaaatcaaaggactgtcttctgttaattactaaattcccatttttccactttaagttgtgtggctggtaatagcgtccgccttctgatataagtcatagcatgcaacatgcactttgcaagtgcattttgcttgaatattttgcaaagatattctattgaattgagaggcagcaagtatttgatgtaatgattacacttgatcacacaaaaacacttcacagtgccatggctggtcttcatagtagtcagctcttgactttgcttctgtttttttttttttctccccacaagactgttagcttttgctgtggcttcaggagcatttacatgtcttaaaagcttataaataatataaaaggctgactgtgttagtagtgcagtagtcagtgcataatgccaaattggtagtgatgtctgcacgacatgctgacttgaataagttattttcaagttgtctcattaaggtttgaactggggatgggacagagatagcctttatcacatatttctttttaatttttatcttactttttttttttttaagctaaaggcaaaaagaatgcacatacttattttaatgtgattagaagatgagttgttccctggtaagcttgacccaccagtatgtgacagttttgcagcaaccttagaagctgggtttttctcatcccacagaaaacccccccacaaaaatacattgttattctgtaagaaaatatgactaaattatcatgtactgagaaaagcattaggttaacaaattaggaaaactatgtcttagatgtacaaccaactttacttcccgttctctggtgggcaggcctatacaaacctactcgcaaagtccgaggaagctgagaggctaaagaaagaggctcacaattccagtttctcataaagaaacatttaggttaaggtgaggtggcccaggttggtaatcccagcactttgggaggccaaggctggaggatcacttgaggccaggagtttgagaccagcttgggcaacatagcaagacctcatctctattaaaaaaaaaaaaaaaagctagacaggcatggtgacatacacatgtggtcccagctacttgrggggctgaagtgggrggattgcttgagcctgggaagtcgaggctgcagtgaggtatgatggccccacaacactctagcctgggtcatagagcaagaccccatctcaaaaaaagagagaaaggtttaattgggacttaggaacagaagccacgtctgtgtctctgcactacccccagacccagggctgatacactgtggggaaagggtgactctgaagggatgtgtaggacaattaaagtactataatgtcaaggttgtttgacctctgggcagtgccagctcctgcaatagataaacgggaaatcttagaggccttcccagaactggggttaatcagaagtcagcatggcagattaatatctgagatggagttgctttggccactgcacctctctgtcttataagcatggagtatcaagataattgttattttgacccaaatcatcagcacagmaaccaattccatttattaggtaattatgtaccaaatacgaggctattttttttttattacatttaatacttgtaacagctcagttgagggtattatccccattttgcagctgaatggatggacttaatgggagataagcagcttccctgagacacatcaacagtgtgtggaagtgacgggtgtgaacctggttctgtctgttggcaaaacctgaactgatctctatgcctcccactcctaatatacagtgtaagagagtgtaaataaaacatattcttaggtcatctgggcgcggtggctcacgcctgtaatcacagcactttgggagggtgaggcgggaagatcacttgaggtcaggagttccagaccagcctggccaacatggcaaaaccccgtctctactaaaaatacaaaaactagctgagcgtggtggtgtgtgcctgtaatcccagcaactcaggaggccgaggcaggagaatcacttgaacccggggggcggaggttgcaatgagccaagatcgtgccactgcactccagcctgagcaacagagtgagactccatctcaaaaaaaaaaaaaaattgttatgtcattaccaagaataatccaaattaacattaaaaatgcattaacatttataaaacttaattagttcagagaagaaataaggctccctgcccctaactcctcactcctctcctgtaaatgtaaacatgtaaattgtgccttctgtgttgctttcctgtcctctatagtcttagggtgtgtgtgtgtgtgtgtgtgtgtgtgtgtgtgtgtgtgtgtgtgtgtttgaaagagagaaagaggatgtaactgtaatggtactacaaatgtgtctgtagctttctagaaatggaatttcttgatcattttattttaaaaataatcactcttttctgcttttgcttgaaatgtcctattttccatagattaatatatgtttgaccttttctgaattagatatactgttttatttgtttttttctcttcttctgttttcaatcccaaactggttttaattctaaaaaggtacttccatatcgttttttgttttcataatttttgcgaattttctgcttttattttccaagcttatgactttgactcattttgccaaagtggacccatcccatgaaaacaacacaaattctgttaatttttaaattgagactgcgggttttgtgtgtgtgtgtgtgtgtgtgtgtgtgtgtgtgtgtgtgtactttttttgagagggggtctcgttctgtcgcctaggctggagtgcagtggtgccatcttggctcattgcagccttcgcctattgggctcaagggatcctcccacctcagcctcctgagtagctgggaccacaggcgcacaccaccacacctagctaactttttgtatttttagtagagatggggtttcaccatgttgcgcaggctggtctcaaactcctgaactcaagtgatctgccctcctgcctctcaaagtgctgggattacaggtgtgagccccactgtgcctggccttatatattattttaggagggaactgacatctttcaagtagttacttctgactatccaagaagtccatatatccggcaatacatattaaatgctctttcacttatcttcttttttgtcactttttaaagttctgtatacatcatataagttctatatgtttgctaagtatttcctagggatttaaacttaacattgctattttcagttttttcttattatgttttttaaactggttataatttatatatagtttattattttattatatattttttataaccttcatttttataaccttcaaaactaataatcctcttagttgtatattaattcaagttattttcttgggttttccgagtatgcagttttattgtgtgcaaataataacattgccccctttctgtatttgtagcaaacatttacttctctgtttaattgcactggctagcatttccagaataatgggaaataatcatggtgttaggaagcatctaactacatgcaagacttcatcataatgatttttggtgtcaggacatcatggtctaccataagaacatgtgactgctatatttayaattttggaaacagataaagggaaaataaaagcaaaagtatatggggtgaagtaagagaataggactagaatttggaaagtacataatggacaaatctagtgggaggaaattgaagttgatgggttacgcttcatgccgttagtatttaacagccagttgtgcatcaggtctgacaggtgctacaaagataaggaagataacatccactgtgaagggcctgtggcccaggggcactctgggtgttgatgagtacaactgaggggaacatccttagtgattagtgcagtggtagcccgaatgttataatgtgtcctgagttacagcgtcataggattttattagaaggcaccatcacccacctctactgctgcagtgcctgcactgcagcagggagcgggtgctcaagtctgtcttcatgaatgaagccacttcactgttccttgtggttcttggccagtgttacggaggaggtgagccaggcttttgctggtagagagagtgggagcagggggggatgctgctacttgaagagtttgctacagggggtttgattccagacttcagggcaagtctgttctgtctgaggtgtggagtgcttacagaggagcgaggggtgggaggggaggatgtggaggtgactgagaacagagcttcctttcctttctttttctttttctttttttgagacagagtcttgctctgttgcccaggctggagtgcagtggcctgatcttggctcactgcaacctgcaacctccgcctcccgggctcaatcgattcttgtgcctcagcctcccgagtagctgggattacaggcgcacgccaccacacccagctaattttggtatttttagtasagacagggttttgccgtgttggacaggctggttttgaactcctgacctcaagtgatctgcctgcctcaccctcccaaagtgctgggattacaggcgtgagccaccacrcctggccaagagcagagctttctaagtgatgcagcatggaggggttccggtggctgagatgtggattgcagcccttgatgrctggctgacctagacacctcctcccgcattttctgctttttccatgatgttccggacagcaaagtggcttgtcatggtggtaacccccacgtccattcctgtgctccctctctgctccatggctgcctgggtttaggtctccttggttaggaaactgtcgtgtgaccatgcccagctacaaggggagcctggaccagtgagtacaagatttttacttttccagccgctgtaggcaaagaaaggcagggagagagagccttaggagtggatgctgagtcagccagttgcagtgtctgccccagaaccatcctataaaagccattttcaaactttattcattgtatgtgaacatgtttcaacatctttcacaagtggcttttaaatcgttgttagtcatggaagctttgattagatgaactcttgtgagggaacctggcatggtgggcataccacgacaccagctctcagagactcagatggagggagccaggctgggtgtcgtggaagccccttgaagctaagtgaagagggtattggcaaagagtagttgaaaatgaaaacttttcatttttagttgagataagatgtcagtaaaagttaccactatgaggatttggctttgcatttagcgatccatttttgcttttctttttttaaagtaggagaataatatgttttgaacatttagaaatggcctctttattgaaatacataaccttgtgtggtttgggctggtgcttagatcctcaagaagaatttccacatggaaaacgaattgccaccttagtcttctccaaagatgctgtctctctctagagtggctgtctgcagcccctgccgccccagctcccttagaatcgtggctcaaatgatattcctaattcctaaagctaaagggaaaagaaaaaaagccaaaaaagcaaaccagtcagaaaatgtacattagatttttacattgatttccaatgtacaaatttctgttctttataatcttagcagaagccagtatctcagcagaagcagaagcaaatatctttaattgaagatacttggtttccatgataagcagggtttccacaaaaccacatatgagagcaggaaccaatgctgctttctctgccttctaatccccgcagggaagggtcgaggagcagaaatgtggtgaccctgaaccccggcagcctgggtgtccactgcagaagtcagggtgtctcgcctgggcatggctgaaagattgttctccagctgtctagagggagacacggctcccttttagtaaaaatgtcacagaaacttatttatgttttatgttatttccaattgatttattagtagaagcaaataaattcctgtttgtcagaggagattcctggaaacctagaaacttaacacagaaaggaaattgggtatgtacatagctgcttttttgagcgtctttcataattttttatcatttaaaaagtagtgaaatcagtgaagttgacaattttcattacagatgcttgtgattatttctacttgatatgaagctggctacaagtttgggctacttatgggcatatttgcaaaagtacatagaatcttaaatttgagacatttgactttcatggctttaataaatgtgttactattttaaaatagtattaagaaattattattatatttagagacgaggtcttactctgttgcccaggttgagtgcagctgggtgatcatacctcactataaccttgaactcctgggcttaggcaatcctcccgcctcagcctgccgagtagtggtgactgtaggtgtgtgctgccatgcccagctaattttttttttttttaattttgtagagacagaatctcactttgttggccaggctgttcctgaactcctggcctcaagtgatcctcctgctgagattacaggtatgagtcaccgtgcccagccaagaaattatttttgatagtagagttattgtttagtggcttctttgtttcttaatttttttttcttttttgttttttgagatggagtcttgctctgtcgcccaggctggagtgcagcggtgcgatctaggctcactgcaggctcygcctcctggattcacrccattctcctgcctcagcctcccgagtagctgggactacaggcgctcgccaccatgcccggctaattttttgtatttttttagtagaggcggggtttcaccgtgttagccaggatggtctcgatctcctgacctcgtgatctgcgtgccttgacctcccaaagtgctgggattacaggcgtgagccacygcgcctggccgtttcttaattattttctaagaattactgtgccatttcctttacatagtatggactatagtggcgtgatcatggctcagggctcactgcagcattgaactcctgaaatcacttgtaatcccaaagtgctgggattacaggcatgagccactgtgcscagctacaattttttaagcaatagaaggcctgtccacattgccgagtcttcctttggtgatggttcatctgaggattgcatgcccaaagccctggagtgggaggcttagattcttatcctagcctttcctccaacagtcgacaccccagagcgtgtgtattcatttctttcttccctttcttctctctctctctttcyctctctctttcyctctctttcctctctctttytctctctctttccctccctcccttcctccctctctttccttcctttccttccttttacttcctttcttttctatcttttgtagatatagggtctttctctgtcatccaagctggagtgtggtggcatgatcatagtacactgcatcctccaactcttgggctctagagattctcctacctcagcctccgaatatctgggactacaggctcatgctaccaagcctggttgatttttaacattttttgtagaaacgagatcttgctttgttgcccaagctggtcgcaaactcctggcctcaagtgatcctcctgccttggcctcccaaagcactgacattacaggtgtgagccactacaaccagccttgtttttcttatttgtaaaacgatgaggttggttgctaggttattgctgttgatttttctggggtcaggccagagactgggttcctgggagaccacagggtccaaggggtggtcgaggatgcagagggtcctagttgcccgagctcctgggtgtgcacccacttccttcagtccactgcagctctttggtcccctgtgattgtgatgaccatctggagagaaggtttctaatctcccctcttatcagacaggacactcagatgagtctgtttttatttaaaattttggcattttgcttatcttggatttttgtgcatcagtttttttgttcaattattacattaaactatttctcttgactactgagattttggtcctcccttaaattttgtgtcagagscaagtgcctgtagtctcacctctgttccagcccttgtaaacgctatgattccttgtagtttgtcattaaaaatagttatcaaagccaagtaatttggaagttaaatcaagagattccagtgaaacgctggtaagcgatgcctgtttatgctcacttagttgctgggcattagcaggtgtaaaaatctaacaaaaacagctggaaggcagacctcaaagctgctggcagtctctccccttggggacaaaagaagcctttcagctttttcatcttggaaggtaaatcataaacgaccaaatattggattaacttagaaaaagtttttttatttttgagatggtaaatgtaatatccttgctgttgaattcctcttcatggtgactatgtattaaaactgggattttgcatggaaaatatttcaagatttgcatggataatggctaatgtactgtctggcttgttgcattttaactataaaattaagttgttgcgctatttattgttatttctaagggacaccatggagagccatttggccagagggagatgggcggtgaggagcgtggtgactggtctagttggcacagctgagatttttgctgctctagtagtcatctggattggctcaggcctggctgtttgttgcttctttcacgggctcagagtgtctggagatctttttaactagccgagacatgctgttactctgagcaattctccaggcagccatgagtgcaaagggagtctgtgccaggtgcccagcactgctatatatggcagagaagggtggcaggggaggacccaccatgcccttatctgggggctgcagccaggcgtgattgtgggggcagtcacacagcttccgtgtgctctcagaccaaccctgtttttcctctccctcctccaaccttggcattgattttagacagccgatgtgcaggttcaatcttcatgtgaaatggaacaatgacttcaagttcagatacccatcactggcagtgctgtatgtacaatctatcaaggctagttaggatgtctttgtggctcgagaaagcagatttttagatacgggagagtttggttacttgtgtttgtgattctgtgctctctattaattggcatgggattttcggacctgaaatttagtgtagatttcagtttattctgaaagataagtgtgaggttgagatgtggtcttctgtgtgacaggtgctgatttatgttggagtcctattaggatagatgcgtcccacattcagttgtatgtttcttaggtcaatcaaagaaactgatctgaaggtgtaccaccaccttctctcccaagatgacaaagctgtgttgggtcattggttgggagcagtgcagatgagaagacaaatgctgttgacaagttgtgtgtctagttccttaggaaaccagtcacctggtgttgaagacagcagcagaggagtaccgtggcctagcatggagctctgccatgcctttggttctttctgtggacacattttcatggaacctagagattttctggtttggggaaggatacaatggaaaaataattatgagatgatgatgataagatttaattgaatatttgctaagtccagtgcatactattaggccttcaacatatgaatttataatccaatgaattagatattacgttcctttcwtacaaaaggacattgaggcttggcgatattaataaatggctgagtggtacttggcacccaagaccgtgtgactccgaagctcctgctttcagtgaaggagcctgtggtaggaacatagggtctgcagtttcagatgttgtggcctgctgtgccttgttggtgattgtagattcttcacgatcaatatggagaaggctgcctgcattgtctcccttcttcttttgaaaaattagtttttacagataattgcaaacaatgcaaaattaaggaatgcaatctctttttgacgttttactccctagtagtgactggtattaaaaagcctccacgcagtacaggatgtgggtagatcaaccctggattggttggttgggatgtgattcattagatcatctatgagattctctgttttttaggtcagagtaattgccattgatcttatgatgcagttctgcttccaggacacttaatgaacacggaaactgaaaagtaaagaacttggcctgtagggtctgtgagacgggaccacccctgggagccgtgttgtgtagmggccatccagccaaggactgcaaacgtggagatctgttgtggcagtggattggattaatctctattaatcagtctattaatctgttgatctctagctgaacaatctcttttgttgaattgttgcattatgatatttatcgtgactactgagattttggtcccccccttacattggtgtcagaggcaagtgcctctgatctcatcccagttcctgtccttgtaaactctgtgattgtttgtagtttgtcattaaaaatagttatcaaaggcaagtaatttggaggtttaattgagtggaggaaacttggaagaaccaagtttcagtagcatgtagctatcacgtgaattttcatcctcccaaggttgtgctggggagattgagacaaaagaagtacaaacaccttgaaaactaaataggcagttcctgtgccaggcaatgggatgggattgtctcattgcttctgagtattgtcgctgaacctgattattatgaatttaccttattgttatattgtacattttaagaaatttttaggtattttatattctaatgcttgcaaaatctggaatcatcctgtgagtttacaaaaaccagtaatggtctttttgaagtactttatcaacttttgttaatttttctgtgttgtatgtgcttcattaacttctgttagactataagagatttctcagtagtgcctactgaatccatacacaatgagggacaataggatcccaggatcatctgctccacagaagcaggtatcacagtggcaccgaccagcatgggaagagtttttgtgctgacagcagggcattctctttgttctgtggtccatttgtagatggctgcgctcctctgcacaggggctgtcgcttctgcrtggattggtgtctaaaaaccccacctaaatgagaattagatattccctttcttctttacccagaattttctttttataaataaaaataggctgggcacagtggctcatgcctgtaatcccagcacttttggaggctgaggcaggaggatcgcttaagctcaggagttcaagaccagcctgggcaacatagtgagactgtaccactacaaaaaataaaaaaacttagccagatgtggtggtgcatgcccgtagtccagctactagggaggctgaggtgggaggatyacttgagcccaggaagttgaagctgcagaaggttgtgatcgcaccaccacactccagcctgggcaacagagtgagactcactctctctcaaacaaaaaaaaaaaaaaaaaaaatttggtttacgaaaacacagcagttgacttttccataggcaatttgtaggtttggcattttactgcctttagagatgtagtattgagtatagtctgttagcctgttggtctgttcacccacaaataggccagttccaattagctataatatttgttttagggggaaaaagtcttatgtaaacaaattatttgcatttatacttttgttaaaagttgaactcgagttagttatttgagacaccaacattacctgtctaccatattgttcatatagtgatagttctgtgtaagtagactttagtcaagcttcacattaaaaaaaatttaaccactgtttaccctacttggtataattagtaggctttatcaatttttttatgctgtgaagtctagatctcaaaagatatacgtcaattttttgttgttcagaatgaagattctgtctgaatcagtaggaaaagaggggagggaacgtgatttgttgttcacatgatatagaagaggctggtgagagaggcctttggaagccttaaaacagcttggtgtgaaagttagggtgccctgggagctgacaggtaggaggagtgggagggggagatgggggcgggagtcagaagaacagctcagctctgaacacacctgttacagtcctatcactcactgatgatagaaaaccgcattttgttggaacgggcacagtgattgtcaaggaagttgtcttgtgctactgccatggattcaaaagattcttgggtcgtgaaagaggtggcatcagaaggatatgtttgttgacagggagaccagatgcactgatccattttttatccttttgccttcagagcatccttgtctccttgaattcactgctgtctcagaacccaggagkgctgtcggagccctctcctgcagctcagctcccagggggctctcccagcaggctggggctgtctcccagccggccagctctgctggaactggaggaggcagccagctgcaatgggactgcctctttttcgtcttgaagtggtttcaggtttcctccctttctcctcttggggtggggacgggaggctctcaccagctgtcgcctttgtgtttttctctctctccagctcaagtcagctgacacctttcctttcttcccttcccttctccatgaacttgcacggagtcgctggcgggtcagtgtgtaggagggtgaaccgtagcagctgtccttgccttccaactctggttctgccctcctcctgacttatcctttctccctttctttgacagagatagggaatattttccagcaagcttcagaaaacattctrtgtggtatgtgcagagagatcctctatgcatagaatcttgcacaggatttaagaggtcagtgcatggggcrttttctatcccctgctcccactttattgaatatcatactgaactcagtagtttaggatgcattcctaagtttagggaaagctgtgaggatcttttgattcattctagaacattccaaagcaccactgaggttgcacaaggtggttcatagcaataggaccgtgatgcttatagggcaagaggaggggatatcacaggacctctgggacagagggaagcactgaggccttctgcaactctgcaacaaagttcctgtgatcccctgccctcgcctctctcccagcactcctgggatttcagcattttaattaatataagtcaggtggacgcttatcttgctggattcctcagtagtacttgatatggttgatcccttcctcatttcttgaacagccctctggtgcggtcattctttaacataaactttttattttaaaataactttagatttattaaaaactgcaaagatagtagagagagtgtacccctcacctcatcctctttgctaatgtcttacatcactgtgatgcatttgtcaaaatgaaccaacgttgactttaactaaacttcagaatttatttgctgttcaccagtttttcagttagtgtcctctttctatgccaggatccagtccagagggctacattgcatttagttgtcaacttcattttatgtaataaaaactttacctacatttcagtggttggtaattttgtttaaggaggtgatcccttaaacaaaacggagaaagtgagttactttctgctagctgaagtgttactttacatccatttgtaaatttttgttcagatatatcaatcattaccatttactgaacacccccatttgtgcttgttctggttttatgttttatgctacaatgtgctctaaacattttagaaataaaattagcagtactttgtgtgaagtggcaataggcttcctccccttgaccccttctgtccccttattttgagacagggtcttactctgtcacccatcctccccctgacctcttctgccctgtttttttaagacagggtctcactctgtcacctaggctggagtgcagtgcggtggcgtgaacacagctcactcactgcagcctggacctcctgggcttaggtgatcctctcagttcagcctctctggtagctggaaccgccgatgagtgccaccatgcctggttaatttttaaattatgtgtagagatggggtctccgtatgttggcttttcttccattttaatgaggtattttaatgaggtagtgatgtgctgtggagcttattaaaaatgggattctgaggccatgtgaggtggctcacacctataaccccagcactttggggggaccccaagacgagaagatcccttgaggccaggagttccagaccagcctgggcaatatagtgagactccatctctaaaataaaatacaaacgaaaatgggattcttcctgtctgagtagatggatctagtaccagctttcccaggactagtggtgcttataaaatcctgatcattccctccagctatcttattagaagtgttttccttaaagtcatacatgcatgtatmatgtaggatggttagtctagcatatgtgtgtttgtctttggtggtggggcaagagtgggagaagaggaggttgtatttcttcgtaggttaaaattggctttaaagacagagaaagaatagagtagaaaatattcgagggtattgcctgtagtaagacccatatcctgtatgaggcagtccagagtctcagctttttcagcaagacgcccccatctgctgttgccttcttcctcctgggcctttgcctaatgggccctttgctgtgggcattctcaatggcagttctgagaaccacctgcgggcccaggcgtccctagcgtggtgtgctgtgttcttgtgttcctactttcctagatgtttcatgctggtttgctgtgtgtcttagttcattcgtgttgctataagaaaatacctgaagttgggtgatttataaaacaacagatttatttctcacggctctgaaggctgggaagtccaaactaggtgccagtgtctggtgtgggcctggattctgctgctaggttggtgcctagcagctgagcactcacgtggtgggggrgccgagggcccttttctaaggctaatctccttctaaaggcacctcctctctactgttgcgttggggattaagtttcagcatgaattgtggaggggacacaaatgttcaaaccagagcactgtggttttgcctcccccaaatagaatgctcattgtgggaggggataggattttcacctctgtggtaaaatcggctccatagtgttgggcagacgtctttcttagtccttgttggggtggaggtaaccgcaccacttcagctgtcctttaaggcaaaatgtagccaagcacctgagtggagcttttggcttctgactgttgttagtggagaagtgggaaatcttccttgcctgagcacatagttacagaataacccttggctcctgttgaaaagtgaaaggcacattgtatgcatgagatacctttgacctcacygactatttgctcaaccacctaaataaacaccccgtattcttgggaccaggtcaatactgcagacccctgcttctctccgtccccctttctccccttcacccgctttctcatttctgtttctgtaactgtgtcttgctgttctcagttgggattgtggagcatctcaaccgtaaaaggggagggagacatgagtttgttgcttctgaccttttgggatgtctaaagtcacctattttggccaggcatggtggctcatgcctgtaatcccagcactttgggaggcagaggtgggcagatcacttgaggtcaggagttcaagaccaacctggccaacatggcgaaaccctgtttctactaaaaatacaaaaattagctgggcatggtggcgcatgcctgtaatcccagctacttgggaggctgaggctgaggagaattgcttgaacctgggaggtggaggttgcagtgagcctagattgcaccacttcactccagccagggcaatagagcaagactctgtctcagtaaataaataaataaataaataaataawtaatwaattaatwaatwaataaagtaacctatttccaacattttgaaataactctttcttcagtgtagttgtcactttctttatgaacacagacagtggtgcggattcaagtgatctatttttgtttcatttcttttatagctttgtctgctgatgaaaaaaaaatttagctaggtgtggtggcatgtgtctgtgttcccagctattcaggaggctgttgtgggaggatcactggagcacaggagtttgaggctgcagtgagctgtgatcatgccactgcactccagcctgggtgacagagcaagaccctatcaccaaaaaaaaaaaaaaagggccaggcgcagtggctcacgcctataatcccagcactttgggaggccgaggcaggcggatcatgaggtcaggagattgagaccatcctggctaacacggtgaaaccctgtctctactaaaaatacaaaaaattagcgggtgtggtggtgggcacctgtagtcccagctactcgggaggctgaggcatgagaatggcgtgaacccgggaggtggagcttgcagctagccgagatcgcgccactgcactccagcctgggcggcagagcgagactcttgtctcaaaagaaagaaaaaaaaaagtaacaagtttggtgtggtggctcatgcctgtaatctgaacaatttgggagggcagaaggattgatgacttgagcccaggagtttgagaccagcctgggcaacagagtgagactctatttttattactccaagaaaagtgtcattacacaagtggagtgtataccatatatataaaaaatatttctgttaaaaatgggattatactacagtacatatattgcattgctgaaatgattacaggcaaagtgtactgatatccgccacttactttaaaaggaataaaaaataaggggggttgtttcaaattttttttccttttatactgcaaagggcctgatgagaatcttttcagataaatcattgcatatatctactttattttcttacgggaaagtttggaagcccatgtgggtaggttagcccattttgatattcattgctgatgaagcccaggagatggaatgcttaatataagccagattttgggactggcagcagatctgttgtgttggaacagatcattcaaggagcagggacagaactttgaatgtggttagttgtattggggttcaatgtcagattgagtcagaatttcaatttgcagctagtgagaagtcctgtaatcgttattgcatattccataatatcttgtcatatgaacctatcataactttattcctttaatgaaaagaatattttctcaaattttctgctgtaaataactagtgctatagcatctctacagctttattcttgtgtatggaagctacgagtagcttagagcaaaagaaacatacaacttatgtcttattattgacaaattgccctaaaaaagataattgatctctctcgtgaatactaggttatctacttattattttctgttgtccgtttggatatactcaaaaagtgctacatcatcattgccttaatttcccttagcaccagggaattttactgttttctcacatgtttacatccttttctcagaatttcctattaatttatccattttgctcttggggttttttttttttttttccccataagccctttgtaatagtaactttaaatgcagtacacattgaaaatatattttctgtattttgtctgctgtttaactttttaaaatggcatataccatactttgtacagaaatgttaaactttctggcttttgggtattaacatctagtgtcttgcttaagaaggcctcaccttaaattgcaaacatattctctttttatatctaatagtttaaaattaatgaaagaaagcattttgaatctaatcttgaattcatatgggattgattttgtatttggtaaggtagggacctaatttcttccccacactcctccaataggaaagccagttgtttcaacacagcatgtgaagttttttgttttctcttttattttaaaaatgccccatatgggccgaggtgggcggatcacaaggtcaggagatcgagaccatactggctaacacagtgaaaccccgtctctactaaaaatacaaaaaaatattagccgggcatggtggcgggcgcctgtaatcccagctactatggaggctgaagcaggagaatggcgtgaacccaggaggcggagcttgcagtgagctgagatcgcgccactgcactccagcctgggcgacagagcgagactctgtctcaaaaaaaaaaaaaaaaaaaaaaaaaaaaaaagggccccatatatttgttatatgtgtaatcttcaatgatgggaatttggcagattttccaagtgcagaagtgtatcactcacatgcctttttgtagtgctttgttgatataatgaatttactttttagtagttgagtaactgataaggcattatagtaaaagttttttaaaggatttttttgaacctgagaaataagttttaacattctaaataataaattaggagattaggaaacattaaaaccatatggttactttttacacttttttttctgaataagtgattgttatgtttggggttaattttgtcaatgggaaataagtataaaacagctttgttctttctatgactgcttatggtaaaaaaaaaaaaacagctttgattttactttcgcagaagcataatttactctcttcttttgtgaattggtgttagctttatattaggagttttgagaaagatggtttatattaattttgagtctgctttccagaacaaatacctgataaaaactctaaccatggcagggtgcggtggctcacgcccataatcccagcactttgggaggccaacaccagcggatcacctgaggtcaggagttcgagaccagcctggccaacatggggaaaccccacagatctcaaaccccgtctctactaaaaatataaaaattagctgggtttggtggcacacgcctgtaatctcagctgcttgggaggctgaggcaggagaattgcttgagcccgggaggaggagttcgtggtgagccgagatggtgccactgcactccagcctgggtgacagagtgagactcaatctcaaaagaaacaaaacaaaactctaatcatgtttgtcactagttgtttttttaagctgaataatttttctttttaatcacaacgtagaattatgtttgtattggaatcttggacagctgttagtgaataaaatttttatttaaattttgtcttaaagcatttttggaagagtgattgtaagggactttcaacacattctaatagtcactgtcaatgatactgggaaaattctacttccatttgtaatcaggaaatgactagttaatcttcacttggttagtcatgcttttgtggatggtgattaacggtgttaactttgaactttggtataaagtgtaagtagaggcaggcaaatatttcattgtagtagtgagacttttatgttttccattgatagaggtgagcttcttgtttccttgtcccagacccctttattttgatatcaccttgtttcctgtagagggcagaagagagagggagttcaaagagagggtgggaggtggggaagagacactagactggagtcttcatagaggagctcctccgtgggtccctcgtctgcctggtgcccgatggctgtccctcatgttgctatttgtagtggccttccagtatgttcctcacactgggtgtgagtattgctgagggaggtatgggtttgtgaggggtggttttccatttatttgaaggctcaactttcgtattgcaaaggcaaatattatggcgtaacgtaaattctatatgaattttaactcatttacctatttatcaccgattaatcaattactaattatttattattgattgattgattgtcttgctctgtcctccaggctggagtgcagtggtatgatcatagctcactgtagccccaaactcctgggttcaagcaatcctcccgcctcagcctcccaaacagctggaactacaggcacatgccactatgccyggctaattaaaagaaaattttttcgtagaaatggagccttgctgtgttgcccaggctgatctcaaactcctggtctcaagctgtcctcccaccttggcctcccaaagtgccattataagtgtcagtcattgcacctggcctgtatgtattttaaaaataaaatcaagatatctcacaaaatacttcaaagacaatttgtatgggtgggggtggacaaagggattagtgcagtttacttcargcctcctaccctagagtgtctccattttactacttttgcatgtacttgagaagacctgcattgtgaggcttagctgtacttttgttaatgtgactgttttgtagtttaatgttttcagaagattgcgtttctttttttttcttacctttcaataagcgttctcaggttgaaagagtgcatatctcaatgatggtatgtaatgttttcatcgaatagccctttggcagccggccttttaaagttagagacagggaaaacaccctgctgtcatatatttttcaagaaaagattaatagctgtgattcattctgcaaatagctattctttttgagagttagtcttgcaaaatttcttcccttccttttattgttgtcctatcaattctgagaaactgagaaaaatgagccttgggattatttctcattatacttgtctcactgaatttagtgggcttatttcttcactcctctcttgtaaatatttgcagactcattacagcatttgcctttcctgtgatttaaattaaaaataaagattttggtaagctgtatgtggcatgatgaaaaaactaggagactgtggaagaaggaattaggagatgggratgttggatattgctattcaactactatttgattgtgaaaaaaattacttcttgatttttgaacttcaacttttctcaattgttggtgacctctagagtctttgcaatccctttaagttctgtgattttaatggcaaataagtacttttattttacgacctcaaaagtgtggtcattttatgagaaactttataggacatgtagctataggtttttgtgttgctttcagacaaacttggaatgatagttcaggtaatgtgctaatcactacaaatttgtctagtcagcgctagagcagcaagtgtaacttttatagctgtccatgtcagtggattgtgtaaagactaataagacttgaaaagactaagaggtagtgaacagctctccaaatgagttgattgaagtctgtaggcaactgagggtctcatatcagaatacattttctttgcatacattttatgccatgcaagttgaaactcaggcctgctctgtagaagaattcctaaaagaagatgtcttaattttatattttgactttttttctgatttggaagatcattataaaggtgagagaaaacagcgtaaaaaaattgctcatagcgtattcaacagatgattataatgatgacttmatcaagtatgcacaaatatctttatcatatggaaaccctgcccgtagaagtttgtagctgtgaaattcttaagtttggggcacaatgttgtgtacttacactaatagagctatataaccgggtcaaattgtgggttggtttargaatttcacaagagaaatgaatagttgtggttctttccttgtgtgtatgcgctcattaaggctgctggaatcctcacagcgtctactcgctttgcaggacctaatggagtacgtttttcaaatttaaatttttattaatttcaattttattttattttggagacagagtcaccttggctgagtgcagtgttrcagtcatagctcactgcagccttgtactcctgtgcccaagtgagcctcccacctcagcctatccagtacaggtaggactacaggcatgcatcatcacacatggctaatttttaaatttttttgtagagacgatggcttgccgtattggccaggctggtgtacaactcctgggctcaagccatcctccttcctgggcctcccaaagtgtagggattacaggcgtgagctcctagccatggagtatattttgaagactgcctttggcttcatcttgtttttttaaaaattgatttcccctgatttctatattattgttaaaaagtagtcctgcattatgtaaatttatagctgtacagtgcagtttaaagttggtgaaaacttttcaatctgcaaactcattaatttccaggtctggttaatttatcctttaggaaaaaaaaaattggattttggagagagagaggtgagatttgtagatgcgttgcttttgtataccatccacttctctttatatattgttggatttaatttggtgatatattgttgctgatttttgtaccttagttcatgagggagaagatgtatacatatttgtctgattttggtatcaggtttattttggcctttataaaatattttaggtgaggatatagccctgagacattattttattttattgagcattttaagaaacacactaaaattcttaatgaattgctctttaggtctggttcaggctataaaacctattaaaattctccaaagcacattgttgaaagcccctgatttctaggggagggaggtgatgttggatgtgtttttatcggaaggaaggatctttccttctctttccaatccgtttaaatttaatctctccctggggatgcatcacagatgcgtacacaacagccaggagtgaagtacaaggaactccttggaccatggtcagattacttttccggctcctccaggagactgctcgctgcataatgaagttaatttgtgtgtgtaatttccttagtggatttttaattaagtggaaacttttggggcacttgtcaggttcatttactgtaggagacccttctatattaaatcaagttctactatttatagatgtttagcttccattttacatgtagaatccttcaaattctcacaacaatccttttttatagcatcatatcttatcttatcttttttttttttttttgagatggagtcttgccctgttgcccaggctggagtgcagtggtgtgatgttggctcactgcaacctccgcctgctgggttcaagtggttctcttgccttagcctcccgagtagctgggattacaggcacccaccaccacgcctggctaatttttgtatttttagtagagacggagtttcactgtgttggccaggctggttttgaactcctgacctcaagtgatccgcccacctcaacctcccaaagtgctaggattataggcatgagcctccacgcctggccaatagcatcatatctttaaaagcgtaggctgcattcagcattttaaggatttatattcatagtcacgcgccgcttaaggaggattcattctgtgaaatgagttgttaggcagtttcattgtgcgagcatcatagggtgaacttacacaaacctaggttgcagagcctactgcacacctcggctgtgtggtctaacctgttgctcctggactgcaaacctgtacagcctgttactgtcctgaatactgcaggcagttagaacagagtggtacatagttgtgtttctaaacatatcggaacctagaaaaggtacagtagaaatacggtattacaatcttatgggaccactgtctgtgtgcggtctgttgttgactgaaatgttatgcagtacatggctgcatgagattaacttgataattttgcctgatatgaaacctagaatattacattaaatatgagaaaccatttaaaaaactaatgtacctcctgaaaatttggactttttgactgctacatctaggtaatgagaaacaaaaggcaagtacagaaatggttgtattctgctgggcaataaaagccttttactgctgcttgggatgacttcatccaaattgggagcacttagaaatagacaacaatgtgacatatttactggaaactgattagcagcattaggacaaacacaagtgtgtcagtttaaagtggagagtactttgaggtgcatattttccatttttattattcatctgttagggcacatttcagggttgaagagaggtttggtgttttttttcctgaagtgcccctgcgtcattgcagttctgtgaaagtattcaagatgtgggactagctggctgctaatgtgactatttttctaaattacaaaaacgttcagaaatgacatttagcgtcagaatcctttagatactttatttgctatttaatgtacaggcttcctgaagaatatttgtatgtatttgaagcagtatataattttgtcaaatattcaagagcctaaatttgagtgttttctaaaaacagtattttattacatatggtaaatttggtaaattcttaactagatagaaaatagagaataaagggcttttactctgtgtttttcttgcctacagattcatcatacatactgtgaagcctcgaaatgcctagagtctaataaattagacttaatatacctacttgttgatccagaatgcattgcaaggatcttgtattgtctccgggttgacatgttgaatgttgcttgtcagatatcgggtgctgaaaaggcctgtgcccagtatgtggtaatggttgagtctggaggggttggatggaagtggtgtgtgtgtgtgtgtgtgtgtgtgtgtggcggagggagggggttgcatacttgtgtttcacctgcgtgcgtgcgtgtgtgtgtgtgtgtgtggtggagggagggggttgcatacttgtgtttcacctgcagtagggaaaccttttcattctccagcaggccggggtttcgtaacagggctggaggaatgttattctggcaacagtgtgtrtgattgggaatggagagatgagagaccgggagcagaaagaaaaccttaarggcttcaaagtgcctataaatcattatgtatataaacttggactgttttttttgttgttgtcgttcaaaaaaaaataaacatagcaatctctcattgctgtgctcagacttgcttcagttaaataaattttgactacagagtacaaggtggtagttctttgtgcttgcaggtgtcagcagtctggaaggactgatgtactttgggtcctatgaggcttgccctgcctgcagggagaaggctagaacacattgttttaatgatgtctgtcatggccagcctgagaaattgagaagatgctgcataaaacgtgggaacgtgcagtgcttcctgagacctggggagcctgggccagagcaagcttgtatgccgccagtggcagctgttccttagatagggttcatgctctcaggcttgcaggcacccactcatcctgtccctcatttacctgcctggctcccataggcttatgagcttgtgactcttgagccaaagtctttaaacatattggaaggatggaatcccccaccacacagggtgcagagggaatggatgctttgtgggctctaaggatagtgtaatggtaagagcagtggtgcctgtagatcttgtacttcccctttattttacaggttggggaataggcagagcttttatttgtctgagcttacccagctggttattggcaaagcaaagactggacttgattccctgtccacagaaaagggtagaaagttgctgacaatagagggctctgtggtcagaggagaagttcagaggtctgtgctcagaaaggagaaagtataaagatgtaatgctggcctttccttatacatatgagacagaaaagacccccgctcccgcctccccccacttttttttttggagatggagttcactcttgccgcccagactggagtgcagtggtgcattctcagttcactgtagcctccacctcctaggttcaagtgattctcctcagcctcagcctcctgagtagctgggactacaggtgsctgtcaccacgcccagctaattgtgtatgtgtttgtgtgtgtgtgttttgagacagggtctcactctgtcgcccaggctggagttcagtggcacaatcttggctcactgcaacctctgcctcctgggctcgagcgattctgcctcagcctcccgagtagctgggattatgggtgtgtgccaccacgcctggctaatttttgtatttttagtagagatggggtttcaccatgttggccaggctggtctcaaattcctgacctcaggtgatccaccctccttggccttccaaagtgttgggattacaggcgtgagccactgtgcccggctaattttttgtgtttttaatagagacacagtttcatcatgttgaccacgctggtcttgaactccttaacttaggtgattcacccacctcccaaagtgctggggttacaggcatgagccatcgtgcctggccaaagcttttgttttagtaaaacatgaactcgatttgttctaagtataaaagtagttatagccaagagctttaggaagttatatggcatctgttgatggttaaaagacatgttaggcagaaatccttgtggtgctaattgattacctttacactcccttaagtctggaaagaactttaaccaaatggcattctaaagacatgtatgcttagatactgcagttatctgttacatgactgagaacgtgggattaaaaaaacaacaacacacaaacgcattcactcaagacagtagaactagtccacagcaagcaaataatgttttaggtgtagtaaagtatctgcctttttgcaaagtaacttttgttgttcagttgcagtcctggtgttagctacccaagctggctggacattgtgtcatctgagtttctttctaattcacttgttcttggttggagtgttgtgtagttagtaaagctcgcaggtgtttctgatacagccaggattgagaaccaccatgtattccctcattcccttttgagatagattgacactagatattgtgcccccccaagggtagatttttacgatgaataacactactcctcacagttgaggaagtagggactgttgtgaaaatcctggcttatcagaatggcaacgaatacttagcagtgactgaatgccttgagctattcggagagcttgaaaagttttgactgggctgggcgtggtggctcacacctggaatcttagcactttgggaggccgagacaggtggatcacctagaggccaggagttcaagaccaccttggtccaacatggtgaaaccccatctctactaaaaatacaaaaattagccaggcgtagtggcaggcatctgtaaccccagctactcaggaggctgaggcaggagaatcgcttgaacctgggagttggagcatgcagtgagctgagatcacgccactgcactccagcctgggcgacagagtgagactccgtctctctctctctctctctctgtcacacacacacacacacacacacacacacacacacacacacacacaaagttttgactcattcaatccttttaacaattctatgagtaagggactcttgttactcacatttctcagatgagggaaacgggcagagagaggttaagtcatttgctccagctatgtccagtcttcactgttaattcctaggctccattgcttgtactgaatgagctgatgcttccttcatatttgtaactaatcagctcactgagcggattttagaagctctagcatttctactgctccagcatttgctccgcagttacgttgttgtcacttgggctacagcatccagtagactgatgttcagggctctcctgcagactgctgctgcccgtggtagcacagcccagctgacttgacctatccccagagctcttcttcacctctacacccctgcctttgtcctgagttaataatataacataacagtaaaaacaaaaatattttgtggtcagttttctagttactgggtttaatgacaactagccagtttagcttatatatattcactatagtatttcctttagttctatgtgctatgtttactgtgatcatagtaaaattattttaaatacttgattgggattagaacagggcagcctcttatatataacttaatttttttactagcaagtttagaaatttaccagcaagtttwtaattttttctagccaatgtatgagcttataaacaaaacaaaaaactctttagttatgtaagagaactgaagggaaattacagtgctatcttcaccactgcaagagggtaggtgcttgtataagcttttaaaaatgggcatgacttgcaaggctattttarttgcatggagaaagccatagatcacaatgcagtttccaaccatactgcattgacttaaaaaaaaataccctgagagataaataattaaacaatatgggatgcatttcatagaatcttcaggattacatgcttattttctcacgaacactgagtttatttgaattttggattatgtatatactgtccctgtgctccatacgaagtttccattaagaatgtgttcttgctttaatgatgtgcactcctgtttccctctgcagtgaacaggaattaccaagcttgtgctcgttgagtgctctctgctggtggctttgggttttaatatcagtaacagatccaccagtgaagtgtagacgagaactcaaactggaaagtgaaaggagcccagctcccagcctgcggcacccttccactgtgagcccagagtgcgattacagatgtcccctaaagaagtgcccccatccctggtcctgcatccctgcggtgtgctcaagcctgcagttcctccgctgcatcgccgtgatcaatacttgagcatattttaaaacacagtgtactagaatgatgccagatttatgaagtgattgagctttttccctaggcggggaacaagctgtggaaaatgggaagtttaaaagtcttctgacatcataaagctgagattaattactatgatctgattgatatctaatacattttggtttttcaaacagagtttgaaataattggtgatatgagctcaaagaagtttatgatcttatcagaggtgaccttaaaatttggggagtcagaaacagaagtcaaaggcactatgcttctttaaggaaaaaagcaatcagaaatgcataataaacatagtgactttgcttctgtgtgtctctctggctgtttcagccatcattggtggcctttttctcgtatgattttactggatacatgtaaatcaaaggcatcctctaacctttcaagtcaatatatgatttcttttttgtcccccagacagagcctcgctctgttgcccaggcctcctakgttcycctgccgcagcctcccaagtagctgggattacaggcatgtgccaccatgcttggctaatttttatatttttagtagagacagggttcttgccgtgttggccaggctggtcttgaactcctgagctcaggtgatctcccacctcagcctcccaaagtgctggaattataggtgtaagccaccgtgcctggccaatatatatatttttgtaaaaatatgctttcattagggaaaatttcaaatatactacaattgttaagagaataacatacctccatgtacctgtcacccaacttcagcaattcacatttttggccaatcttgtttcttctgtaccctcgcactatttccattccatcattttgaaataaatcttagatatcagatagttacactggtaaatatttcatcatgttcaatatatgtatttgtcaaaaaggaatattaaactaatatcctgccttctgcctcactttctaaagaagatactgtgttttgaaaggtggcttacaaaatgctttgtgatattctaaatgctgaggcaaaatatatgaagttaaatgtttttgagatgaaggctgtcaacagctttcggagcataggcaagaagattgtggggcaagtgtgcgcaggaagtgtgaggcccaaagtgtcctgccctggagagtgagacggaacatccccagggagtaccgtgctgaacatcaagcctgatcttaccctgctgtcacaggagattaagtggccaggctggttcttcagtcctcatttctcaaaacacatacatggatgttttctatgattatagtttatagtgaccttgtgcagaagcattgagccagtttattattaaaacttggactaggtaaactataatttgatttctgtacaggcgataaccactggagatagcaagagtgaatgacagtgtggtgacgggcaaatcttatttgttactgtttagacaatctatatatacatagataaacagtctatatatatacataaaacaacagtatatatataaaaatatataaatatatgtctcaaaaatatatattttgagacaggatctcactttatcacaaggctggagtgcagtggcaccatcatgtctcactgcagccttgaactccctgggctcaggtggtcctcctaccttagcctctggagtagctgggactacaggcacgtggcgccatgcctggctaatttttgtgttttttattattatatttttttagagatgggatctcaccatgttgcccaggctggtcttgaactcctggactcaagcgatctgcctggtttggcctcccaaagctctaggattacaggcgtgagccactgcacccagcctgtttagacaatattaaagccattgtttttctagtgttagagtttgtatgttataatttagtacatgcttaattgaaggtattggtgtaaccccaaaatatatatttttcacrtaactcagattagcagtggtatttagtgctttagttatatcttccagcagataactgaatggatctcactttatttttatcataattggtgagagctgggamtcttatgtctccaggagatggctgtacaggaactgtgtgtgattcgcaatgtggaagagcagggtcttgctcccttgggaaccctgcaagtagttgagccccctggtcactcagcttatcactgtggatgctgggcactcctgggggatgctctggagcccctctcagggtattgccttttcgctggctatggggttggaggagagggtcagactccttccctgccctcagcttgccggctgcccaggcacaccctgtgtgcagcttcagcattcctgtggcattggtctctgtggtttttcttcttttcacatagcttactttacgccctgttcgctccacaactcttttcaaagacaggatggaggtacaggaaggaaataacttaatttgaatattaaaattctgttaattttagaatgcagtctcttcagttctggaattgatttcttttggttgctgttggtctttgtaaggagcgtaacattgcttaagatttatatataaccgagtcattttctgtctctgtatcatattcctttaggtaagctttttcaaagttactttgaatagttgatatagatttagaacaaacgagtcaccattctcaggatacttctattgcctttctggaataatgcagctcattgttctgccaagtatcctctaatcagcctgaaaagtgttttcttttatttcatcatgacattgggccttttaattgagagtgaaaatcattaaaggcaaattattttgtgtaaattatggtagatttagccttactacataattttggaatgtttttatgattggttgtgtatgctctggcagatgtctttatcatgacttattttaggtgggttaagaattctttttttttttggagacagagtttcgctcttgttgcccaggctggagtgcaatggygcgatcttggctcactgcaacctccgcctccctagttcaagtgattctcctgcctcagcctcccaagtagctgggattacaggcatgtgctaccacgcccggctaattttgtatttttagtagagacaagatttctccttgttggtcaggctggtcttgaactcctgacctcaggtgatccgcccgcttcagcctcccaaagtgctgagattataggcctgagccaatgcacctggctagaattcttggcatagtacacagtggcattatttccaaggcttttttttttttttttttttttttttgacagagccttgctctgttgcccaggctatagtgcagtggtatgatctcagctcactgcaacctctacctcctggtttcaagcaattcttctgcctcagagaatcaaacagttgtcctcccaagtagctgagattacaggcacccaccaccacacctggctaattttttgtatttttaatagagacagggtttcgccatgttggccaggctagtcttgaacgcctgacactcaggcgatccacctgcctgggcctcccaaactagtgggattacaggcatgagccgccgtgcccgtttgcaaatttttaaaagtaaaaaagcaaaacaaacccacatgtcagtgtttcagtatttacttcagggggaaattgtatcctaacataccctgcaccataagctgaaatttcagtgccaattccattgcttgtgtgtccatccaaaataaagacaagtttttgcaggaatgtcagatgactgtgggacaggcctagacaggaacaaaactggaggcttygcatcaaaacaaacacccacctaaccacatgggttttgccctgtgagttgtttgtcatcctagattttcagcaagaatgggctttagtaccatatttcacatatgaggaggtgctaattttgttaatcatatcacattggtaatattcatcactacattgtaatatgaaagttgaaagtcttgaacttaaagttcataaattcattgcccaaatctctggttggctttaaatgtccttttggaggggagaaggaaagaggggcatggtttgagggttatactgaaataatctgcttgctgtatgatatcgagcaggtctaactaaaaaggtaggtggtkgtttctcttgcatgcatacaaacatgtttctggccccagttgtcaaacgagttttgtgttttccttgtctagtcttgttgacctgctatttattttagtcttttgataaacaggaagtgttgctgcactgcactcaggaatgtattaagtaactattaatattaaacaagattggagggatgagaagggatttaacttaaagtagagggaggatataagaaaatgaaataatccttaaaattttagaattaaaatttatttggggccttttgaaatgctttttttcccttgaaacctcaaattctggatttacatttgatgtttctgttggtggtatattacattgctttaaggttgtttagawcaaacgtcacaattaatgatgacatgaaggttaggattcgagcactagcttttttcagacaggtctaaaaagggctctgccctagtctatccctagcagagatgttacatgtgcctggctcaattcaacgtatcagtatattgtggggagaaaggatgaataaggacaacaccacaagttgtgatggagtgtattgtttctaggctgtttccctggttgttccaatacaccatgcatttttttaaaatttattttttatttttatttttttttgagtctcgctcttgtcccccaggcttgagtgcagtggctcaatctcggctcactgcaacctgctccttccgggttcaaacaattctcctgcctctgcctcccaagtagctgggattaaggcacctgccaccacgcccggctaatttttgtattttttagtagagacagggtttcaccatgttggtcaggctggtctcgaactcctgacctcaggtgatccgcctacctcggcctcccgaagtgctgggattacaggcgtgagccaccgtgcccggccaatttatttttatttttgagatagagtagagtcttgtcgtgttgcccaggctggagtacagtggtgtgatcacagctcactgcatccttggtctcctaggctcaagcaatcctccagcctcagcctctcagtagctgcgactacaggcatgcaccaccatgcctggctgattatgttgccttttgtggagacgtggtctcactttgttgcccaagctggtcttgaactcctgggttcaagcaatcctctggcctcggcctcccacagtgctgggattacaggtgtgagccactgtgcccrgcctcactgtgcatgttttgacctcctcacctttgtcctaagatttctcctgattgaaaataaatgaccatttcttcatgaagcgttctttgtctttagtgttttctgtattttctcaattcatgtactgcttggttggcagttacaatttccataactgagtattgttagtgaccttttcatatacctatggcttgcctcccaaaattgattttttttttttttttttttgagatggagtctctgttacccaggctggagtgcagtggcaccatcttggctcactgcagcctcctcctcccaggctcaagcaattcacctgcctcagcctcccaagtagctgggattacaggcatgcaccaccatgcccaactaattttttgtattttagtagagacagggctttaccatgttgcccagggtggtctcgaactcctgagctcagacagtccacccatctcggcctcccagagtgctgggattacaggcgtgagccaccacgcttggccccgaaattaatatttaagtgttgtagaacaggggttttattatagatttggctgtaccgctgttattgcataacacaattattttcagactgggtgtttggttcttaattcactggtggtgtgcaccatgccatcctgccatccccagctgctgtcagagtgcatggtaaatatagaaatgtgtccagtcagtagtagccacgtggacgctcttctccatatttgacttttcttgctcttagaaggcttttccagtaatctgcgtgggaccgtgactttgcttgcttatggtgtttccagcacctccaccagactctcagggtttggaaagctgttctgggtgaatggtgtctacagaactttgaactctgcgattgcaggggaacatgcttataaatgcgtgtttaacacagaatgttgtagaggagattaggtacttttaattttgtattatgggttgttttcaagatctaattatgtgttggtaggaatggctgttttatttctacttgtgggaaaaaggctgcctggagtttgtttaatttttctgatatagcatcatagactggtagagcaatataggaaccccagagaccatccaactccctcatttctatacaaaaggacttgggtgcccacaaagaggaaatgacttgtgcagtttcaggccacttaaccacagagtcattttattgtcctttttgtggctactgatagataaggcttgcactyactagatgcccttgtcatcaaggcccaggtcaccagctgcacacaatttatctgtatgtctttaaagcaggggggtccaatcttttggtatcccygggmcacactggaagaagtggtgttatcttggaccacacataaaatacactaacaatatctgatgaggtaaaacaaaaattgcaaaaaaaaatctgatattattttgagaaagtttatgaatatgtgttgggccacattcaaagccatcctgaggctgggtgcagtggctcacacctgtaatcccagcactttgggaggccgaggcaggtgcatcacctgaggttggcagtgcgagaccaacctgaccaacatggagaaaccctgtccctactaaaaatacaaaattagccgggggtgktggcgcatgcctgtaatcccagctactcgggaggctgaggcaggagaatcgcttgaacccaggaggcagaggttgcagtgagccaagattgcaccattgcactctagcctaggcaacaagagcaaaactctgtctcaaaaaaaaaaaaaaaaaaaaaaaagaaaagccatcctgggccacacgtagcccatggggctgcaggttggacaagcttgctttcaagcttcacaacctactctgctcttttgtcccctcctcccatctgataagtttatagttacaagttttattgttgtttgaggtagtccatttcacactttaattactagttgtgtaattatgttttgcctgagttcccatacagctaatttgtttccatgcttccatgcaggattttatcagaaactttaaagtatcctagggaatattaccagtgcagactagttgtatttgtgcttgatgtattctctgttttaatgcattgtgttaaacttcctttttctgagacaccatgtaccataatttcttaaataaactgaaggcacacgcattacatttcaaatgtctcataagggaatataggaacagagaactaaccatgtatgtaaggaattatgaattttatggaattaatgtataaaatctcttttatgtgtattttataaggtgtcttggagcccgtactttaaaattctcctattttaaatggatgtctgtatttgaaactgaccagatggcctagataaagtcttgagtcataatattagggcctttcagaaaaatctaagtgccagtagattttcaaacaaaataggttagcaagggaatagaaattgatctttggcttgaaataaccagtaacagacttcagtgaatgttttgtggtgtgagggctatgtttaagagggagctctagttgattcgtatgctagaccacagattctaggagggtgggacccattcattgcgatgaccctgcatcttgttccgtgcctgccacatggtagatgcttcgtgaatatttgtggaatgaatgcatactgtggcctatgggactcaccatggtgataaacggtaaaacatgcacatcttcaagacgtcattttaagtgctttggggggactgggcataagataaaagtaggattgaagatggttgtcttgcagagatacatttcagccaggaactgaaatgtgggtaagatttccgcaagggaaggggtaggsatggctttccaggaggtatagacaagcagawaacaagtttgagcaacaggaagatcctgtggacttcatggcttgtatcttgtcatatatgaaggtacatcccctgtgtgtatggctcagtccatgctcatattctttcctcaaagttgatgcacagggccgggtgcagtcctcagcactttgggaatccgaggcaggaggatcacttgagtccaggagttggagaccagcctgggcaacacagcgagaccttgtctctacaaaaaatttaaaaatgtgctgggcgtggtggtgtgtacctgtaatctcagctacttggaaggctgaggcaggtgggttgyttgaggccaggagttcaaggctgcagtgagctatgatagcaccactgtgctccagcctgggtgacagagcgagaccttgtctcttaaaaaaaaaaaaaaaaaggttaggctaggtgtggtggcttacrcctgtaatcccagcactttgggaggctgaggtgggtgtatcatgaggtcaagagatggaaagcatcctggccaacatggtgagacgccgtctctacaaaaaatacaaaattagctggctgtggtggtgcgtgcctatagtcccagctattcgggaggctgaggcaggagaatcacttgaactcgggaggcggaggttgcagtgaaccaagaatgcaccactgccctccagcctgggtgacagagtgagactccatctccaaaaaaaaaaaaaaaattttgatgtgtgttctttgcttacaaagatgtctgtggtaatgagactcaggagcaccctgtgatcttatggaaatcttttgaagataccatcatagatccctcccttggccaagagtaggagtatcctgcaaggagatgggaactccacctcagacatcagcaatcctgaggagacattgggaacaggcccctccgtccttagatcacaagtggctgtgatctaagctgtgccgtggtatggcatccaccccttaggggccacacttaggatgttggggtgctgtggcactttaacttggaccccacgcagtgtggggtgtgctggatttaagtacagatgccacgaggtgcagttggataactgtttgtccatagctccaaagaggaaatcagaggtaggtgcaaggccttcatcagggttcatttattcctaataatagtctactctgttatattcatgtaggagtatttcttctgatgcagttgggtttcatatagccaggtgtaaggaattaatctttatgttgaagtcatttgggagcctttctttgtgaaaaatcaggtcatttttggattaagtaatgtgacagggaagtggggagctacttcggggtcaagtttttgtttaggattcagagccatttggaatttatcatgtttcagtgaggcttttctttccaggtcagaaaaattccttttggtctgagtcaacatctcttgtttgctagggagaagtaaacaggagagggtagatctttcttctcttaggctggatgagtaaccttaaagttcttccaggttggttgttttggattatttcttttataaatagtagagaaatattcaacattttagttagtttttaaaataccacccaatattatagttaccaggcctcagaggaggtaacctctccagaggagaggcaggagatctctgcctggagatgtccgtgaccctattttatgtttatgggttgtttttgtttcctttttcttttccttttttgagacagggtctctctttgtcacccaggctggagtgcattgatgcgataatagcttactgcagccttgacctcctgggctcaagcgatcctcctacctcagcctcctgagcagctgggactacaggtgcagaacaccacgcctgactaattttatttttaatttttttggtgggattgagattttgctgtgttgcccaggctggttttgaactcctggcctcaagcaaccctcccgccttggcctcccaaagtgttctgggattacaggtgtgagccaccgcacctggcctggttgttctttctacagctttgaatctagcactgcctggagtatggaatggaatgcgtcttagattgtttatctgtgataggcaaagtggtgcaaagtgtgacttcttcatagtgaaattagtctagcatattacctggtggatgatacagctttcactattccatttttttttctgttctaagaagaaaaggtttttattttaaaatttattttatttttaaaaataatttccacttttaattaattaattaattaatttatttttgagatggagtctcactctgtcacctaggctggagtgcagtggtgcaatctcggctcaccacaacctccacctcttaggttcaagtgattctcctgcctcagcctcccaagtagttgggattacaggtgcctgccaccatgcccggctaatttatttttgtattttagtagagacggggtttcaccatgttggccaggctggtctcgaactcctgacttaaagcgatctgcctgccttggcctcccaaagtgctgtgattacaggcatgagccactgcgcccggcctcagcttttattttagattcagggatacttgtgcaggtttgttaatgggtatattgcatgatgctgaggtttggggtacgattgattccatcacccaggtagtgagcatagtacccaataccttttcaaccatctcctcaccctcccttctccatctagtagtccccagtgtttattgttgccatctttatgtccatgtgtacccccttaaaaaaggccttttatcttgggtgttgcgacagtgtctcccttcctaatgtgtcaccttggcaaacttcttggaagaatcagtgtgtcctaaagggaaaatgtggatttccaggttagcgtctgagcctaagctatgcttgactgtgacattatgtggtgttgatctcaggcamgtcaagtgtcctattccttagtctcttcttctacaaaatacagttgaaaacattgatcttgcaggattgtcacatggaaaagcaggtgtcatgtcagaagtgctctgtaatcagagtgagggtgaaggaatggaatggattaggaggtgggcgcagcaccaggtgcctgctttcatggtgctgatggttgtgaagcttgcagatacagatttgagttctggagcagaatatcctgtagctacgtccacactgtggtttagggacttaggcttggattattccatattcactaccttccctcagtaaagccttctgttttctgtctaccagttcatcaggtaacaatactacccactgttcgtacccttccacactcttagatccatcgggactagagtgaggagaactgggttggccaaggtgagttttggcttgccctcttttttctggggtatgagtaagatatttatcggggcttaagctcacttcttctgcctaagattcctggccagtcacactggggacccacctctgcaggtgaggacgaaggtattcatattgcaagttgggttcgttttcattgcaagggaagagtgtctggatgtcttctttccccacatctgaaatgtttcctggaatgtaaactagaataatcacacagcatttcttgagccagctctgagggacaggataaagggtgaatgggggcgttgatcctgacatggcctggcatgtccacgcatttcttttggcagctaggagagcataggcctgtgtttgttgattatattctcctagaaactcttgtgtaagttctttcctatacccaataggggtattatttttatttttttctgggacacactagttatgcaacacagtgctttgtttgttctatgctaaaaaaagctgaagatggcccctgcctttggagaccttatctagagtaaaaaaattaccatgcatatacaggaaataggctattaagtgacaaatgtgttctaggtaaatatttatttattttgagacagagtctcgccctgtgcccaggctggagtgcagtggcaccgtcttggctcactgcagccttcacctcctgggttcaagggattcttctgcctcagcctcccgagtagctgggattacagatgcccatcaccacgcccagctagctttttgtatttttagtagaggtggggtttcaccatgttggccaggctggtatcaaactcctgacctcaagtgatccacccgtcttggcctcccaaagtgctgggattataggtgtgagccactgcacctggcctaggtaaatacttcagagttggagcacatttcatggagggggagtttttgtttttacttttttttaggggtttgggtgtgttacccaggctggagtgtggcaatgcaatcttagttcatcagctgccttgaatttttgggctcaagtgatcctcctgcctcagtctccggaatacctgggactacaggtgtgcaccgtgacacctggctaatttttaattgctttatagagatggagtcttgctatgttgacsaggctggtcttgaattcctggcatcgagtgatgctcctgccctggcttcctggagtgctgaggttatgcgtgccagttactgtgtccggccaaggggatggtttataaactggatttgggaagatacmtacaatttgggtagttggaactctgggggtgaaagctttgcagatatgtggaagagaataaacaaaaacataagggtctcttcacttgaccagtatttattgagcatcttctctgtctcagacactgttttgggtgcttggggtttatcagtgaacagaacaattgaacatcgaaatacggtgaggcaacgctgaggctggtcacaaaccggcttgggatgagctttgagtgcttggccaagaacactggattttgacttttagaaagtagtgagtcattggaaatgrctcatattacaggacagtcacatgataaagggaatattttgtgaagataaatgtagcaagatgtggcacaggattgaagagatggggtctagaagtgaattggacagtcattattttattgggaacaggagaggaagagatgggaaagaaagaaatgtattcactagttatttaagaggataaatatttaaaactgcacrtatatatttattatggaatgccaggaaatatagacaagcactgccagttgtgcatagcagttcttttgtctatggctgtagataatacattcttcaaactagggatgaaacaaagtcttatgtaacagtcggtgaacaacattgtgaattgctctgttgtgtttaattgattgaatgtgttcaacctgtttcctgtttttacgtgtatagctagttcccattctctattgttatatattaaaatatcccatttaatatatgcatcttggctatgtatcttcctccacattttaaatttctggatcaatgggtatatttcattttaagcattttgatgcgtggtaccaaattctagctccctgtccccccgcctctccaaaaatgtgtgcaaaatactcaggcgcagtgtgtgagaatgctggcttcctgtattctcatgaaccctgggtcattaaatttgtttaaaattaatttggtttcccaatttgttatgaaaaactcaaatagtagctgagagaatcatacaaagcacagctgtgtcagttgacctctggttgggtttggccagtgggaggtttggtgggagataggaggccccgggatgacatagccccaaagtagttcccttctccctctctgttttgggctgtgtctctgcagcaaacaagtctctccccaaattccagctcctgcccctgagtcctccatggctcccacttccgccaccctgggctctggtgctacctccccttatcccctcagcccaggggtagtcatagcttcctgctactgctaacctgtgtgtggcccccgcctccaccaccatcctggtttagagtcacgactcttcttacaaatctttgtaccagttccttgtattaacttccctctctttaaaatacttgagatgatttgcattttcctgttcgcactcctaataatacatatttattcctgcgtgtgtgtatacaggtggagcatctgttatctgaaaatatgaaatgctcccaaattggaactttttgagccctgacatgataccacaagtggaaaattccacacataagtacttaacacaaacttggacttaatacaaacttggtttcgtgtaaaaaattatttaaaatattgtataaaattaccttctggttatgtgtataaggcatatttgaaacataaatgactttttttgtttaaatttgggtcccatcttcgagaaatctcatgtgcatgtaaatattccaaaatctgaaaaaaatggaaatctgaaacacttttggtcccaagcattttgggttaggggttctcacctgtatgtttatatgtatatgtacatgtgcacatgtacatatatgtgtacgtgtgtatttttttgcactatttgcagacatggcactttaaatactttagaacacaactccttagaataagggtgtttccttaaatatccacaaagctattatcacatggacaattaagaatcatttcctaatattatctcatattgagctcatattaaaatttccctcattgttcccaagatgtcttctacagtgacttcttttttaaacccagcaaggacccaaacaccactcacaccttgaatttggatattcctccttaatctttttgatctagaaaagtccccaggttatttttttaatgacatatttttaacgttttctcttgaaaaatttctaatgtacactttagtgaaatgcaccactgatactttagattcaccagttgtttacatttgctrcgttgtttttctatctctataaacataaagatacacattagtaatagtatgcatttttttgtcctgaaccatttgagactaaagtacagatattataacacttctcacccttattacttaagcatacatttcctcaaaaaatgactgttcgttgtataactagtacaatgatcacattcagaaaacttaccaatgtatcattccattacctaacttaatttgacaaatttcttcagttgtcctttcctttttcatagtactttttctttccagatgcagtatccactccaggatcatacattgcacttagatatcagacgaagtggacttttttttttttttcctttaaagatcagtgcaattgcgttgtaaagacaagacaaaaaacaaagaaaaactcatattctggatttgtctgattgtttccttatggtattgtttaccttggttctctatcccctgtatttcctgtaaagaagaagtgaggctatgttttgattaggttcaatcaggaggatgctgctatcagtaggaatgaagaaggcaggaagttggtgttagagggaagataaggaatataagctttatctatttgaagtaaaataggactccataaaaacattgtccagtcataagtaattcccaaatgggtattcttttgtttgttgcataaaaatttcctggcaggcttttaaaacaagctccttggaggattcagactgctcccagggtgaggtgcagtgagaggtggatgtttgaagtgggagtgctgggagggttctggtctaaagatgtggcgttagcaatcccctgcacagagcctggagttgaaataacactgagaaaggactctgacagtgaacactgagattatctgtatgcttataggagacaaatatgtgtgtgtgtgttcatggtaaccattttaaagatgtaatagctaacatctgtttgatttccgaagtttggatagaagcactaaacccacgagttgttgggctaaaacgtagtgtatagaagaggcacaaggtgtttcagcttcctctctgatctcttctcgcccctcattctgaatcactggttctcaaacctcagtgtgcatcagaaacacctggagggctagtttaaatgtataaataggtggttggtccttcctccagagactttttttttggtggtgtatcccgcttgggattggaatttccagtgtattatcaggtgatgctggcctggactcccacttggagaaccaccactttaaatcatgatgtgattagaacatgtaatagaatttttcatggtgtggcttttcagacttggttttaacagccaacactttttttcttcttttctttttttttttttgagacagggtctcactctgtcacccagactggagtgcagtggcacgccactgcttactgcagccttgacctcctgggctgaagcgatcatcccacctcagcttcccaagtggctcggaccacaggtgcgcactaccacacctggctaatttttgtatttttagtatagatggggtttcaccatgttggccaggctggtctcaaactcctgacctcaagtgatctgaccacctcagcctcccaaagtgctaggattacaggtgtgagctaccgaacccagccctaatttttaaaattttttgtggagacaggatctcactgtgttgtccaggctggtctctaactcctgggctcaaatgatcctcctgccccaccctcccaaagtgctgggattagaggcgtgagccacaacacctggccctttttattaaaatactttatggatctcgtctttttattttaattaattaatttaattgatttttgggacaaggtttcwctttgttaccccagctggagtgcagtggtacaatcgtggctcacagcagcctcaaccttccaggctcaagtgatcctcatgcctcagcctcctgagtagctgggactactggtacctgccaccacgtccagctaagtttttttgttttgttttgttttctgtattttatagagacagggtcttgccatattgcccaggctggtctaggccctctgaactcaagcaatctgccatggcctcccagagtgctgggattacaggtgtgggccaccacgcctggcctggatcttctctttatgtactgtattaacaaatgaagctgttgagaagaggctgggaggaggggctgtggaaagaagacaagcaaccctgacgcttcagattggaaactgccagtgttagtctgagaaaggacttgggaataaatcagcagacctgggctggagtcctggctgccagcatttatgaattgtgacctcttgccggctatttatgctctctgagtctcagttctctcctctgaaaataggaattataagccctctttccacatgwgataatgcacatgaatgcattttttaaaattgtaaaatgcagtgcagatctaactggtggttactgctgtctcattcttgccttgrctgtgtcctgtgccagcgctgtagtctgaggccattcccttcatttctgtagaatggtggaggagttgaaggacttccatgactttgtgttggcatgaaagtcatgtcagatcttggaggtcatcgatgggctgatttctcatattattgaataatgtgtgaccctgtgagagattatgtgctagttctaataagactaaatgccagaaacttatttccttgaggttggacttcacctggtttcatgcctccattttcacttttgattgatgagataaatgaagctatccacctgtcaagggaggcagcaggtttgtggtttgctctgtcttgtgttgtggtgctgaggttttggcattggtattgggtgtggtttggagtggagaatgggggccgagcagtgtacttagcatgagatattagtccctcccttgtggtgatacaggtcattattttgttgttgaacatcagctatgacatctgactgtctgtcttctccctgtattgagaaggcaacacaaacatttgtataatgtttagcagtgttcctgtaacaagattgaagatgggtcctatgtttcagtttattggaaaagattggctttttttttttttcctgagacagggtctgaacttgttgcccaggctggagtgcagtggtatgatcacagcttactgtattgtccacctcccgggctcaagtgatcctcctgctttagcctccccagtagctgggactataggcacacaccaccatgcccagctaattaaaaaaccaaaaataacaacaagaaaaaacttatttgtgagatggggtccccctacattggccaggctggtcttgaactcctgggctcaagcaatcctcctgcctccacctctcaaaagtgctgggattacaggcgtgagctactgcacctggccaatcagcatttttaaaaatgaagctgattaaatcaggaaaagtcagaattgcatgtgtgatatctatcttgaagtgctaatgattcattttttttttaagaacagaacttcagaatatattctaaaaatgtttgtttttggcttaaataaattggagagttacccagagaatctagagagaagcatagttcctgctgatcgtgctcttttgttgactttttaaaatgaagtgttttagaagtctgaggggcatttttaaaaacaaaacaaaaaaatgaaatgttttctatttgttatatcactaactaggactttatttgtcttgttaacttaactatcatgtggctaatctggttggtggatgctaaactgtaaactgtgtgccatggttattatttaaaggayttttcaaacttgtttctctttagtctttgtgtttctcaatgtgacatgtgcacatgatcagatagcactactaggattgttatgaaaaagagcagagccttctttgggagaggttgccttttccaactcttgctcctggttcttttgatatttactttaatatttttatgtaaattgcttatctcgtttgttttttcttgttgtttgtcatctattgagttaacatggaaggtttaaccctatttcactaccgtatgtgtgctatgcccccactcacaggtagccatttctaggatctctgtctctttgtgtgtgtttgtgtctgcctttctcctccctctgtcacacttactttttagaccactttgttacaaaatatggttacaaatttgattaaatattctaggttcacattatttttattattaaagctacttacagctgaaccatgtatgataccttgatcaccttttctttccttcacaacttttgtgtttttcctgaaatgaggaatgttttttcctttggttgatcttctgtacatttataactaattagccttagccttagtcagttgttaaaattgtgtcttgctgtgtttagttgcattgggtactctttcagtgccattttgaagaggtcacatttggggtgtctggactggtcactctgctccaggtttgcagctgacgtcctggaatatgggatccaccttcaccatcgtcccgggagctgtcttctgtgttatgtctcctgttttcatatgctgtgtcattctcattcatggtttattgccttattttgttggaacacatcttccacttacaaaggggtaatgtttttggaaacgttgcatttctaaaaaaggtcttttttctaccttcatactttaccggtatttgggcaagaaatggaattctaggatgggggactatttcttgtaggagttttgaagtcactggtagatgattgtctagattccagtattgctgtgactccttttccctcactgtggcctgtgctttattttctggaygttctccttcccttccccccaccaatcttctgtttttcttctgtgttctgatgtgccttggtgtatgtctgcttttatacattgtgttggggtctctatggaactttttaatgtggaaacatatgtcattttggggaattaagttgaaattgtttttggttatttctctgttttcccaattctctttttctagaactcctgttattcaagttgcttgacttacttgactggtctaattttattattagccttttttatcttctttgtcttttttttttccaacttcctaggggagatattttcaacttctcttaattttcctattgagctcttagtattttgtttagttttttttggacagagtgtctgtcacacaggctagagtgcagtggcccagtcgtaactcaccatagccttgaactcctgggctcaagcagtctttctgcctcagcctcctgagtagctgggactgtgggtgcatgccaccacacctgacttatttttatggtttttttttttgtacagatgggatcttgctgtgttgcccaggctggccttaaactcctggcctcaagcagttcacctgccttggcctccaaagtgctgggattacaggaatgaaccactgtgcctggcctgtttttcatattttaattccaaaatactttttttaaaaaaattctctctcaccacgtttctttctttcttgctttcctcccttctcatattcctctgcaacctgaatgtaccaccatctgacctctctcaggataccagtgatggatttttagtagcatctttttatacagtctctggttctttcaagttgtgtttactatttgttttgttctctcttccatccttggggtgttcttaaaagtctgtctctccatggttggctctgacctaaggcactaatggtaacttgagagcactgagttcaggcacgggcgtacactgtgagcttcactgggtggtccctggactgggccagattcccccctgccttttctctttagatggatagaggcccagggaaagatcttcccacctctagccttggggggataagccctggctggcattctgagagcaagtggaagcagagggctggatttttctgtaatcagtacgtaaatattcacttggctcctctcattttcaacaaggcacctctacaattgttcctcctctagtttctcagtccagacctgctgtctgagcctgcagtgagccgccaggggctgggaggggcagtcactgtgctctctggaagcattgggaagctggggctttaattactacagactttcagacagtattgttatttttcctcccatcttttacatttattattattttaattttattattattattttttctgagacacggtcttactgtgcccaggctggaatgcagtgacgcagtcatggctcactgcagcctgaaattccccagggtcaggtgatcctcccacctcagcctcctaggtggctgggactacaggtatgcactatcatgcctggcttttttttttttaatattaaaattgttttattatcattattattttgagacggagtgttgctgttgcccaggctggagtgcagtggcgcaatctcagctcactgcaacctctgcctcccgggttcaagcgattctcctgcctcagcctcctgagtaggtgggattacaggtgcccgccactatgcccggctaattgttttgtatttttagtagagacttgctttcaccatgttggccaggctggtttcaaactcttgacctcaagtgatccacccaccttggcctcccaaagtgctargattacaggcgtaagccaccacacccagccaaaattgttttattattatattttagagacaagctcactgtagcctygaacccctgggctcaagagatcctccaccttagcctcccaagtagctggactatgggcacaggtgcacaccaccacacgttggtgatttttccagtttttttgtagagatggggcctcactacgttccccagactagtctggagctcctgggcttgagtgatcctcctgtccctgcctcccaaagcactgggagtataggcataaactaccgtgcctggccccttcccatccttgttccggtgttctgacattcttggttctccccattccagagcctcttaccggctctgttggggaagtcttgctgcttcttggctttccccacagttaccttggggttccctttcttggttctgcaaaatgtgtcgcctctgggccatctgcttctcagcttccaaaaactgtgtttccctcatttccctctgttctctttgtctttgtgcgattatgcttggamacaacaacaacaacaacaacaacaacaacaacaacaacaacawcatccccgcgtgtattgtggtttcagtgggctttcagtaggaaataaaaataagtgtgtctttttgatatgatgtttttaccctttcatttttatctttgtgttcacagcgttctgaatcacctctgccattcttccctgctgctcacacccttccccctgctcagggtcctcctcttgtgccctgtccctctggtctgctcattctgctaaaacctccccatgaagacctttccaagtgagagtgatctttccttcctgaattcacaaaacattttttttttggtgtagttttctttgaacacgtggtctacctcttttttatgacttatattttgtcagataaattttattttatttttgagatggagtctcactctgttgctcaggctggagtgcagtggtgtgatctcagctcactgcaacctccgcctcccaggttcaagtgattctcctgggactacaggagaaagaggagctgggactacaggcgcacgccaccatgcctggctaatttttatgctttttgtagagacagggtttcatcatgtcggccaggctggtctctaactcctgacctcaggtgacccacctgcctcagcctcccaaagtactgggattataggtgtgagccactgcgcctggcctgtcagataaattttaatttctgatgttgggtgatgattgtttctttgccttcatgcaatgctttgcatgtagtaaatactcaaattttttttttatcaacatagatttttttcagtgatctttttctggtcttaagttagacaggatattgaccattgctgtatgccatggttaatgaaaaagtagggtgctatttctagttgcagatacttttcttgaaatttgcacatgtgggtaatatgcggagcctatgcattatacatgtcataactcacaaaagctcgccttaggactttgcactgttttctcttaccacatcctggagtagagtgggcctcagcattccttgcaacttgcatcttgtagagttacctctgcttccattcttagtcttaggaaatgttttgtctagcactaggcaaggtgaagttgatgttctttatctgaataagagcagtgattcttcatgtggttttgtctccaggtttcttcggtgggtttggacctatccttgggagccttgccccatgaggacattcactgcttgatcatctatttgatggatgaactctgccyctcgtttattgctgtgtgtgatggacttttggttgtcataatacacaattattgttagtgtttaactcttttgttattttaaatggacatatcctgaatgagaaacattcttcttcttttttagttgaatgttctgtcatgtttgtttattcacccaatgactgatacaattattgtagaattagaatttattggtagtataaaaagtggcttatcataacttttatcttccccctaagagacggggcctcactctgttgcccaggctggagtgcagtgatacaatcacagctcactgcagccttgaatttttgtgctcaagggatccccctgccttagtctcccaattagctgggactgcaggtgtgggtcactatgccttggccttctaaagttctgggattacagggatgagccatcatgccggaccttatcacaattttttgctcagctacatttctgagtgtctatggactggacagtagagattcctactgttattattttaaactttttaatgcaaactactacaaagtggaatcaataagtatgcgctaactttttctcactggatactggactcttsccttgaaaataaagcaagtcctctgttcattgaaagagaattatggtatgaaagctgccagttaaaatttcccaaragaccactgttctacggagttgtatttttcagtggcaaaaatatccttcctggtttttaaactcttgtgggaggaggtcatttttatatgtttattttttatgttttatttattattttttttatttttaatgcagcatgctctgttggggttactgttgatctcctgctcagttcttttcaaaacgtcatatccattcagcacatttttgtggagtggcatttaataagtggcagcctgatatttgccttggcatgatgttatcatgattgcttggcatagctgactgttgagtcaggacccctccggaggcaggagtcaaccattgactctcaaaattagaaaagccttgatcagttagttggaggattacaagccaagtttatagagtatttcaaagagagggtaacatattctgctgatagaccaaataagatgaggacagacaacagacttttgtgttaagcatcgtggaggctgctgtggatatgatggaagaggaagcctgattggaatggggttatgggaggaagacacacttgaagcaagtatagacaatttttaaaaaaaatttgctgtgaagatcatcaaagaattggtataataaccggaaggtaaagtagtgtcaacgaaaggttttgtgctgcatatgtaaaaataattcacagcctttaaaggctcacgcttgacacctgactctatcttccatacgattgtggtttttaggaacattaacagtgggacaggctgggctcagtggctcatgcctatcatcccagcactttgggaggctgaggtgggaggattgcttgagcccaggagttggaggctgcattgagctatgattgcaccattgtacttcagcttggatgacagagcgagactgtctctaaacaaaagaaaacagtgggctggagttagactgctgatctgctttgggggtgtgatggtcaggaaaagctcttggagaagaggatgcctgagaagtcttgatggacagacagggctggcctggagggtaaggtgtggtccaggcattggaggccttgggcacagagtggggggaaaatggtgcagggcctaacaggctgtgaaagggaaagtgctggggaaaaggtggaaatgtrgcaagttctgaaggatgaagttatgaggttgagaaagtccataggtgcggatttatttccaaggggtggctacaaatattatataaaggctgcagataatgatctcatctggagggagtgaacaggattaggaggcttaaagaatggtttcataagccacattttggaggttggtgtgcttgtgtgtgtggaagtattttagaaacgaaagttgatatttaagttgattgggtcacccttgagcttgcttggtgggaagaggtgggcaggatgtggctattctaagtggccaggggacacctctttcttattcacccccaggacattatttccaattttccttgaagaggaaataccatttaccatcagtaaatggttttgggacttcattctttggggwctcaacacatctggagatgccaaattctggagctgtctcagtggcaggtgtcccagggactcctggatgatgttgtaattgggattcatgtgcagtcagaataggccccacaaatgaagaggatgccaacgtgtgtgtgtgtgtgtgtgtgtgwgtgtktgttttacaaacttactctctgtgttctagataaatgattcctttcatagaggtccagatagatgagggtgcagaggaactctgttacttgcaaaatggttttaacggtaatgtttaataactttgaggattaaggtctgagttacttgctgtgctggttaaaaagtgacaaggattggtcattctgcatttttaaaataagtgttccgtttcagtgatwcttaggcatgctttgttagagatggacttggagagcttcttaataatatggattctccccgcacccctgctccagggtcttagtcagtagatctggaacagggtccaggaatctgtattttaactcttcattaatcattagcctccttcttccaatctttgcttcaggaaagaactgtatcaaacatcatctttaggtatgaagaatggaggattgaacttctggatagcaattgtgttgcagaatgaaagcagtagggaatggtgaaacatgcaatttagtatattttcatctgaatatgtacgtaagagtgatgtagaagttcagaaacacacaactatgtttcttcttcaratcatttgaaagcagagttttaaggattttaaaatatrcgtacaccatatagaagtgtataaaatttaaaatgatgtccttttttttccttctcctcaatcccactgcaggataaccactgcaaattttgaggggkgtgtgtgtgtgtgtgtgtgtttacgcattttaatakgtgtgtgtgtgtgtgtgtgtgtgtcattttgtctctgtaaaaagaggctcaagccacacaggatgtgctttgttcactacggtcttgtcagcatccttctgtgtccctatctttagacctatttgtaagaaacacttggagccaccagggtgtgcaaactactttttgcagataagcaaaaatacaaattcttcagacacataatatatgctgtttgcttattagaatatttctgtagattgcattgggggttaataagtataataagtatttcatatattgggcaataggaaatctagtatgctttagagaratcagtattacttatgcagtacatattgcaggtttgtgcagttcctatcataatagagtatcagcatcagagccaaagggaagagtgtgtatgagtcactccatcataaaaggagcagtgactcaataccaaacttagggtgctgtctgaatttttaatcagttgcagtattgttgatatgaggttgattcctttttatgggcaggaagttatcacggtttaaaatgtctaattcccttttggtgatgctaacttgctatattcrgtgtttctgttctttcgtataggatccaaactactggatacaggtgcatcgcttggaacatggagatggaggaatactagaccttgatgacattctttgtgatgtagcagacgataaagacagagtgagttcaggtcctggggaacctgttctgaatgcatttttttttttttgaggactagggagcgggtgcgattcttttcctttctgttttagacacatactttaaattatgtgtgggccacccactctagtatattttcttttataataagtatcatgaatcttcactgtcctgaataccaaggtataatgattttcttgatacctgggacttaacactaggttttggggttttaaaactacacttttacaatggaaatatcacaaaaagatttctatgccatattcygccttaatttaaccaaacataacatctttcttcacaactcgggcctgtccttatcatctccgtgtatacaacatrcagccattctgcattctggtcccagcgttggcccwgagaagatccatcccaaccgtggccttggcggtgcaccgtgctcctgtgcagtgggcgagtgtgtcccaggcagcctaccctgtgcagggcctggccctcaggaagctcagccttgctgtgcgatgggccatttgtgtcccgggcagcctctcctgtgcagggcctggatctcaggaagctcggccttttctccatcagtgctctgatgctctgtgtgtgcttccccagtctttactgtggtctgtgagtttggctcctggacctatccacctactgctcttcagtgttccctcccactaccccactttttttctgtactcttgagaggaatgaggaagaggaagaggagggggaggaggaacgttcagcgttttgagaatgtgtgacaggatgttcggctctggatgtagaagtcagcaaattctttttttttttttttttttgagatggagtcttgctctgttgcccagactggaatgcagtggcgtgatctcggctgctcactgcaacctctgcctcctgggttcaagcgattctcctgcctcagccttttgactagctgggattataggcgtgcaccaccacgcctggctaatttttgtatttttagtagagacatggtttcaccatgttggtcaggctggtcttgaactcctgacctcatgatccgcctgctttggcctctcaaagtgttggcattacagatgtgagccaccacacccggccctggccactccttttgtatttggcttataaggaattgcagaagggctcatagccacatacatagttacatcagcatggtagtatggaggcagcggcctggtcgactgtctcctaaaacctccctgcagtagcacagggtatttaaccagctaggttacatcgtgaggtcagaagatggtaagatcacccagatattcactctgcttcctactggggctccttctcattcctggccctctccccgccggcctgctcttctttccctcagctgtgagctgggtgcacacagctgttgtgtcttgttcacacctatattcctgacagttagcatcatgcctggctgagagttggtgcatatcttaaatgttttcttgaaatttcaagtaagacaaaaaatatcaaataccaaatagtgtataaatttggaagattagattcactgttgcacctgtcatggtggaatttgtcccatgtggctcctgtgggtcaggaatacattgtatcaaaaaatgcagatcctggctaacaaggtgaaaccccgtctctattaaaaatacaaaaaattagccggctgtggtggcgggtgcctgtagtcccagatactcaggaggctgaggcaggagaatggcgtgaacctgggaggtggagcttgcagtgagctgagatcacaccactgcactccaacctgggcaacagagctagtcttaaaaaaaaaaaaaaaaaaaaaaagcagaagttttctgccgacttatgttctgatgctatttttcttggtgccgtttctccttcttgggcttttgagtgagccaggcttagggtaactctgaaatccttttctgcagtccacrtgaagagtaccatctttcatttattgtgtggctcaattccaacactcaaggcaactacagagatttatgaagaatttaaacaggtgctctttttccaccagagtattagaaagcgatgaattaacgtatcaatctttcaatgtcttcctcttctcccttcttcttcgtccttcttttttttgtttctttttttttttcttctccctctctttctcagtcyctctctcttgctgttacttcctatgtaaaaatagcacaactccttgtgaggaaaaattggaaaatgcagaaacatacaaaggaattaatcacctgacatcctgctattgctgagagcttatcactgttgtttgagattttcatcctgactcttccctttcttcagatagatagaaacacagtctttttcttttaaataaagagacttgaatagtagttttttgttttgaggttagcatatatatatttctgtgtccatgaaccatagctatgccaacatggctgtgtagtcttttgttttaatttaatttatttatttagagacccaggctggagtgcagtggtgtaattatagctcactgcagcctcaacctcccaggttcaagtgatcctcctgcctcagcctcttatttttaaaaaagttttattctagattcaggggtacatgtgcaggtttgttatataggtaaattgagtgtcataggggtttggcatacagattagtcaccccaggtgataaacatagtacccaataggctaattttttgatcctctccctcttcaagtaggccctgctgtctgttgttttcctctttatgtccacgtgagatcatgcattatttggttttctcttcccatgttagttcacttagcaataatagcctctagctccattcatgttgttgcaaaaaacatgaccttgttattttttatggctgcctagtgttccatggtatgtttgtaccacattttctttatccactctaccactgaaagatatttaggttgattccatgtctttgctattgtgaatagtgttgtgatgaacatatgtgtgcatgtgtctttatggcagaacagtttatatttctttggatatatacacagtaatgggattgctgggttgaatgataaccctgttttaaattcattgggaaattgccacactgctttccacaatggccaaactaatttacattcccaccagcagcgtataaacattcccttttctccacacccttgccagcatctgttattttttgacttttaatttttttcttcgaatttctcacrcgacacggwtgtattgttttatttaataattgccactctgactggtgtgaggtggtgtctcattgtggttttgatttgcatttctctaatgatagtaatgttgaacattttttcataagcttattggccatgtgtatgtattcttttgaaaagcgtctgttcttgttctttgtccactttgttttgagayggagtctcgctcttttgtccaagctggagtgaagtggcacaatctcagctcactgcaacctccatcccctgggtttaagcgattctctggcctcagcctcccgagtagctgggattacaggtgcccgccaccatgcccggctaatttttgtatttttagtagatatgggttttgtcacgttggccagactggtctcaaactcctgacctcaggtgatccaccctccttggcctcccaaagtgctaggattacaggcgtaagccaccacgcctggcctctttgcccactttttaatggggttgttttatgcttgttagtttgcttaagttctttatagatgctggatattcaacctttgttggatgcataatttgcaaatattttctcccattctgtaggttgtctgtttactctgttgatagtttcttttgctgtgcagaaggtttttagtttaattaggtcccatttgtcaatttttgtttttgttgcaattgtttttgctgtcttcatcatgaagtctcgtccaggacctatggtcagaatggtatttcctaggttatcttccagggtttttatagttttagattttatatttaattctttaatccatcttgaattgattttttttttttttttgaaatgaagtctcgctcttatcacccaggctggagtgcaatggcgcgatctcagctcactgcaacctctgcctcccaggttcaagtgattttcctgcctcagcctcctgagtagctgggattacaggtgcacgtcaccatgcctggctaatttttgtatttttagtagagatgggatttcaccatgttggccatgctggtctcgaactcctgacctcaggcaatccacctgcctcggcctccaaagtactgggattacaggcgtgggccaccatgcccagccctttgaattgatttttatgtgtggtgtaaggaaggggtccagtgtcaatattcagcatatggctagcctgttatcccagcaccatttattgaatggggtgttctttccctgttgcttgtttttgtcagctttgtcaaagatcagatagatggttgtaggtgtgtggcattatttctgggctctctcttctgttccatgggtctgtgtgtccatttttgtaccagtaccatgctgttttggttactgtagccttgtactgtagtttatagttgggtaatgtgatgcctccagctttgttctttttgcttaggattgccttggctattcaggctctttttcagttctatgtgaattattctttttttccaattctgtgaagattgtcattggtatagtttgataggggtagcattgaatctgtaaattgctttggacagtgtggccattttaacaatatttgttgtttcaatccaagagcatggaacatttttccatttgtttatatcatatctggtttctttgagcagtgtttttaaattctcattgtagagatctttcgtttctttggttagctgtattcctaggcatgttattctttttgtggctattgggaatgggattgtgtttctgatttggctcttagtttggatgttgttggtgtgtaggaatgctactgatttttatacattggttttgcatcctgaaactttgctgaagttgtttatcagatcaaggagcttttgggcagagactgtggggttttctaggtatagaaccatatcatctgcaaacagggagagtttgacttcctctcttcctatttgggtgccacctcacctcttgagtagttgggactataggcatactgcacgatgcctggctaatttatgtaaacatttttgtagagacagggtctcattgtgttgccaaggcttgtctcaaactcgtgggctcaagtgctcctcctgcctccacctcccaaagtgctgggactacaggcatgagccactgcgctcggctgtgttttgatgtatggattcatgtacagtctcgttgtacttgctgtggacacttagatgactatggagacagctgctgtgctcacctgtacgcttttccctttggcactctctgtactctgagcagctgagatgagcacgcctgtttctccaccacgtttcctttttacttytacagacgcaggttttccctcggggttctgccatccttctttacaccttgactttgtgcctttccatagagctagcgaggcgtggcttataacatgttttctgggatatgcctggccctggtgcatggcttggaataacctgttgtggaagtttggttgttgcacaagtaggatttatggggctgtacgatctcaatgcttctgagaatgctgaactcaatggactcatttatgctcagcataatgtagtaaggcctgaagggttatgcagtaccaattactgtttccatttgtccccttgcactccagctgacattagatgccctcagagtttatgtttggagccagtagaacatcatgatgtagatgttcagcacaatgatttttgcagtcttttgaaatgtatggagacatattttttggtctagcatatggcctttttggtggacattttatgggtacttgaaaataatgtattctgcagtcattgggctattrtaaaaatcagtgaggccatccgggcatgctggctcgtacctgtaatctcagccctttgggaggctgaggtgggcagatcacttgaggtcaggaaatcaggatgagcctggccagcatggcgaaatcccatctctactaaaaatacaaaaattagctgggtgtggtggcatgtgcctgtaatcccagctacttgggaggctgaggcaggagaactgcttgaacccaggggacggaggttgcagtgagctgagatcgcccactgtactccagcctgggcgacatagcaagactctgtctcataaataaataaataaataaataaataacatgtaaaaatcagtgagggtaaggtggatgatgttgttttggatctttactgaataatgtgttattcagcaactgaaagtcatgcactcttgttttgacacaattaactgttagattatacacaaaaccaagcaaaaggcaaactatgcttgatctttttaaatagtggcatattaaaattatacaattcttagtaaacgacgttttagattttgtatccttctgcgaatttgataataaaaaatatattttctagaatcttttatcatatttcctatacaaattaaaatgtcctttaacctgagaaaaatattttaaacattaataggtgaaataacactttagacaattttatatcatgttgattgaaatcagtttccaaatagaaaaatgctagagcaccttataccatagactgaagtagcttttaaagccgttttttatttgttcagaaatactttaaaatatatgcataattgatttaaatattgttgagtgacattcctagattaaagtgcccattataagttgaaactgtaagaaatatgattagtagcttagactcacaacacctagtttttcataattcacacagattcacagtcatggctggacgcattattcagactgagggatcgtgtgatgcagtcggtcgcacggctcttttccgtggctctgacattcgatcctgatttaatcattctggagtgttttcaactatttttggcagctgctccaagtaaggattttgacacttgttttgctttttggtttaaggaaaaaagaacaagcattatacctctcttaaataataacatgtatctaaaataatgtcctgttttgtgaatatcccctggatgcatgttgaaaacgtagatacctggcctgggaaataggatctctgtgaagggtcctgggcatctgcattttacagtccccctcctgctgctatttaggctcactaagttacaaaaccacagctttaatggctctgcctctgtagcagggaagatgctcttgaagatgcaaattttatacttggtcgttgtgaatttgtaacattattaaaaacttattttttatggaggggaagaggcagtattttaaatgatagcaaaagaaaattaaagtcaagtactaaattacccctaattttcctcattatcctttaattattaacgttcagggcacagcactgaggaagttttctgttagtgcctatacagttctcacttccaggatttacccaaatttgttcaaatggtactattatattrccctggccccttggagtaggtttgattttctaaggtgtagaatactctagatctctttgagtgtaaaaaggtactttgttttgtttgtcctttctctgtgtttctggaacagtgatgtcgtgtttactcttagcatctcagtctcagttttctcaattgacattttgccaaattaggaaaaactgaaacagtttaatgttatcttcaccaccatttagagcagctgtcatgcgtttgtgtacgtgaactttcctgatggacaagctgtattttgtgtgaatctctgtctggtttggtctttgtcatttattatttgaggaccttcccttcgttctcaacagtgggcctaggccactcctgtttattccctgtgggtagtacagcaaatttagaaatgtggataatttttccaaatttatcacagaataaaaatacttgggattcagttcctgcgcaggccagtcacctgagactgattgtaaggggcgtaaacaaagatttcagagccaggcgccatggctcaggcctgtaatcccagcactttgggaggccaaagcgggtggatcacttgagcccagaagtttgagagcagcctgggcaacctaacgagactgtttctacaaaaaatactacaattagctgagtgtggtggtgctggcctgtagtctgagctactcaaaggctgaggtgggaggatcgcattgagcctgtgaggttgaggctgcagtgagccatgatcacgctgctctactcaagcttgggcaacagagtgagaccctgtctcaaaaaaaaaaaaaaaaaaaaaaaaaagatttcaggtgtaactgaccgggcatgtggagtcagtaggtggcggggaagtacacttttgtgtggatgatcaacagggagaaagtcttcctcttccccatgttgtcatcttttactatctttggtgctgaaggtgattcagagatgtaatatcaagcacttcctttgtcgttcttggatgtaattttgctttgagcaggaatgatgtcatgtatgttctgttttggtggtgaccctgtgagatgccttgcactatctgtttcttgccctttgtggaggaagtcttggatggaatggctgtgtaaactcagtttgaagagtttgcacgtttatgctgaagccaggcatggggaaggattgtggtggagattgctggctgctaagcctgttgatgtttatcagagaatttgggattttctagggggtgatttggccagttccgttagaaaaatgttgggaagaaaaagaaactttaaaaaacttattggggatcacaggcaggcaacaactccacgtgctgaggaaaagctaacaggggcacatttccatccttccccagcccccttgccctgggtatagtctctaacttacatactgatgttgttttggtgcctcttatggtaataaaattactgccccattaggcattttatattgatatttttgaaatgtgctataataatttttgcttttgaaatacaagtatggcagaattttcaggttaggaacatgctttaatgtaaaaagttcataattttttatttttctaatttattattttatttgtttattttttttgagacagagtcttgctctgtcgcccagactggagtgcagtggcgctgtctcggctcactgaaacctctgcctcttgggttcaagcgattcttctgcctcagcctcccgagtagctgggattacaggcgctcaccaccactcccagctaatttttgtatttttagtagagacagggtttcaccatgttggccaagctggtctcgaactcttgacctcaactgatccaccctcctcagcctcccaaagtgctagkattacaggtgtgagccaccatgtccggcctggcttttttttttcttttctttttgagatggagtttcgctcttgtttcccaggctggagtgcaatggtacgatcacagttcactgcaacctccttcccccaggttcagataattctcctgcctcagccttctgagtagctgaaattacaggtgcccaccaccatgcctggctaattttttttttgtatttttagtagagatggggttttaccatgttgaccaggctgatctcgaactcctgatctcagttcatccacccgcctcggcctcccaaagtgctgggattataggcgtgagctactgcgcctggccctatttttttttttttaagggagttcttattaatacatactgaagtttcctaaggaagtgcctttggtggatagaattttcaactatggccagtttcctttaacattaaaatatacaaaatattaaaagcaacttgagtatgtagtgaaaagacagaaaagagccataggaaaattatcgcacaaggaccgaggttgtaagttattatccagattctaatttgttaacatttcacagagctacaagctgtaaaaayaagacatattaaatgagggagggcttcacatactacatttgtaacaattgtagttcacacttaaggaattcaagtaaattatgtgttagtgaaaagcagtgatacctgaaataactaaggtgttcttatttcaagtaagtagtattttagttattactaaacatgtgaaattaatttgagttcagtgttttacatgcaaaaatgggatgagttgcagggtggggatcccagaaatgtgtttaatttccattaggatgtggcatcatatgattactacctcgaattttaaaatgwttgcagaaaggccgggcatggtggctcacctctgtaatcccagcagtttgggaggctgaggcaggtggatcatttgaggtcaggaggtcaagaccagcctggccaacatggtgaaaccctgcttctactaaaaatacaaaaattagccaggtttggtcatgcrcgcctgtcgtcccagttacttgagaggctgaggcatgagaatcgtgtagggccaggaggcggaggttgtagtgagccgagattgccccactgcactccagcctgggcgacaaagtgagactccgtctccaaaaaaaaaaaaaagattgcgggaatcacgtgcattaagttgttaactcccttagaatgtttaagccaccggtttactctgagttttttcctttgtgcacatgtggcttaatttccgtaagtaaacatgaattatgatatctgcctagggtgttacatggtgaccagcgtactgttttttgctgatcaggtaggtgagttgttgaattccttgccttccttcaggtgaagtggatgtagcccaggagaacatgmttttaatgcaggcatcttaatctttccatcttggggaaatatacattttaaagaagcagtgttttctgaaggcataccttatcataaatcctacttacagaaaacagtataatgaaaaacttatgaaatgtgttttctgttgtcttaatcaaaaggaataatttagttattcataaatacataccctactgtcttctgatgaatacttgagattaagattaaatggaataaattaaaacctagtttcaatattgaatcaaagctaagtggcctccctctccctctcaaaggttaataagtttttcaaaccagagtgcgtgaataatttaaaagatagcatrtggaataatttcctttgcaagaaaatcagactaatatttttaggtaattcagtttactaagcacctagtttgtaccaggcattgggcttagtgctactatactctgtgtgtgtgtgtgtgtgtgtgtgtgtgtgtgtgtgtgtatgtgtgtgtatatatatacatgtatatgtgtgtgtgtgtgtgtatatatgtgtgtgtgtgtgtgtgtgtgtgtgtgtgtgtgtgtgtgtgtgtatgtatcatcaagccaaagtcttatagacatgtaactgaaagaccagcaggtgttaagtgatcaggtttacatttgagaaatatccccctggtggctgtgtgaagaatgaatgaggaggcagcatggaaggcagaggccagtcagcaggttttctggaaccaggattcgaatgcaggcagtgtgtggctcctgccagttttgtggaaggaggttgaaattgatggcgattgggctgggtggagatggtggggcattcaccaaggtagggactgctgcgaggttgccagactagggatgggagattacattcagtgttgtcttctgtgagtttgagtgtcttggagctgttagttcggcagctggatatttgggactaaccgtagataaatctgtgaatccaatataaatctgtgaaaagtcagtttaaaacaatgtaccaaatataatctaactttagtgcaataattatatacattagaaaaagtttgaggggtagaccaaaaagtgtcagtactggtcatctctgaggacagtgtgtgtggttcactgttttgttttcgttttcactgtccactccatattctacttctgcttaattccagtaggaaagaagcattaggtttagttataaatatagcttagaatagaaacatctttttttggactttagtatgaattggcataggaactgaatgatttaaagattttgataacctggaaatgaaataacttgtataaattgacttcattaactagatgrctttattcatttcctcctaagtgagcttattttagagtgtaaagaagcaaatatttaaatttgctgccaagcagagcagcaaatggctaattaattcagaargatgacttcccaacatttaagtgttttgtgggtactggtttggccacagttcatcartttgtgggagcacagggcccagatatggtacaggtagagcagtgaggtgttagtgaaagggagttcggagggggccaggcctcctgcatgaaaagtgagggtcctcacgagcagtaggagctttggggtcagcctgcacaggatgggctgggcctcagtccttctagcgaaagccctcaagactttgcttatctggggccacccagtgagtcaggggacagaggttctcactctttctgttacaccaatcccaggctggggcttaataacttggtgtgccgcgctgtgcttttctgttgctttggaagtgcctggcatctcgtatggtgggctgtggagccacactgcctgcatttgaatcccggcttcacgctgtctttacttgacttctcttacctcatttttcccatctgtaaatggggtataatcatagtaactatcttacgagttttttgtttgtttgttttaaatttcagattcaggagatacatgtgtagttatattacataggtatattgggtgatgatgggatttgagcctcggtgaactcatcacctaaactgtgagtgtagtacccggtaaatagttttgcaagccttgcttctctccccgcctcccacttttggagtcgccagtgtccatcgtttccatctttatgaccatgtgtgcccattgtttagcttccacttatgaatgagaatacgtggtgttcacctttctgtgtcagttatttcacttagggtgttggcttccagttccatctatgtggctgcaaaggacatgatttcattatgaggttaagtttaagattaagccttagaattcacattaaggttttgtgctcggcaagaataaggtcccaggaaatgttaattgtggttgccgttgtcggccaccatcaccaccaccaccaccattgtcaaattaggctcttcattcttttaataactgcttctgaggttttattttgttttgttttgtttttcttcgagacaggcccttgctctgtcaccgaggctggagtgcagtgatgcaatctctgcaacctctgtctcctgggctcccacctcagccgcctgagtagcttggactgcagatgtgcatcaccatgcctggctttttgtttgtttgcttatttaagatgggtcttggtctgtcacccaggctggagtgcagtgacgtgatcctagctcagtgcagcctccaacacccgggctcaaatgagcctcctgcctcagcctcccaaaagtgcttagattacaggtgtgagtcactgcacctggcctgaggatttaaaaacaagcgagcaaacaaaccaggctatcctagatatttgtgttatgaaatgagtttctgtaggtaatcagtttcacttatttttttatttctatgaatttrtagagagcatggtatatacttggcacccagagatagttgtaagaaatacattgtttattttctgtgtgttagaatttgaggattctcaatacattattaaggcaacctccacctcccgggttcaagcagttcttctgccccagcctcctgagtagctgggattacaggcgtgcactaccacgcaagaattctgaagttccttgcgtctgaatgtgtgctatactgcttgacttaatttcttacaaaagattgtcaagagatacttcttttcaagggcacagtcgaatgatgaccgtccactatcaggcattttgttatcagcacttgtgggtagtgtcaacagggatctcttggctgctgggaacttgaggttgagatgacactgcagttgcatttctgtaacagcwtccttttctttcatctagccctcacatatttattgagcatctgttccattctaggcaggacttgagagattgaagtamatagagaacacttgtccttagggatctgttgtaaaatggggagatgaaaatgttggcggggtgctggtagctcatgcctataatctcagcactttgggaggccaaagtgggaggtctgcttgagcccaggagtttgagggcagcctgggcaacatagtgagaccytgtcttacttaaaaaaaaaaaaaaaaaaaaaaaawawawawatatatatatatatatatatatatatatatatatatataaaatacatacgtaaaatacatatataaaatataaaaatctaattatatacatgtatattatatataacatgtataatactatatatttgatatatattatatataataaaggaaaatgctagcaaaatgtttgcagctacaacagkggtgttccatgttctataaggtatgtaaagttttgtatcctttttttcttagtgtagctgcattccacatacttttaaagcaagaaaagtcccatatgtaggtgggaatattcaggctggataaattaggaggtgtgttcaggtcagcctccagatgggctagttctaactttctctccctccccaaagaggcagtcttgaatattctttctacctttagttaacacaactaattacttctcaaactgtcgctgtgaaggactagatttgcttttttttyccctccaacctgtggcagaacaatacttttaaaatacaatgcaaataaattactgggataaagtggcttgtgttttatgggcctttattttagctattattagagttaacagatataaaattactcagtcaagttgctgtgttctcaaaagcttactctatttctgtacttcatggagactgggaccacactttgagtaatattgcatcgtataacactgttaaatacagctgtccttaaattttctgtgtttatattattcaccagctgtatatttctggtgtaggctgtttggttatgtagcttctttttttttttttattatactttaagttttagggtacatgtgcacattgtgcaggttagttacatatgtatacatgtgccatgctggtgtgctgcacccactaactcgtgatctagcattaggtatatctcccaatgctatccctcccccctccccccaccccaccacagtccccagagtgtgatattccccttcctgtgtccatgtgatctcattgttcaattcccacctatgagtgagaatatgtggtgtttggttttttgctcttgcgatagtttactgagaatgatgatttccaattggttatgtagcttctttaatgattggtatgtgttttaaaaaataattccatgcctcttgttaccttgaacgttttctttctttatctttccccctcccgcttctcattccccttcccctcccctcattttttttttttagacggagtcttactccatcactcaggctgcagtgcagtggtgtgatattggttcactgcaacctccacctcctgggttcaagtgatctcctgcctcatcctccagagtagctaggattacaggctcccaccaccatacctggctaatttttttattttttagtagagatggggtttcaccatgtgttccaggctggtctcgaactcctgacctcaagtgatcagcccgcctcggcctcccaaagtgctgggattacaggcatgagctgccacactggcctgaatgtactgtatctttcaatccttgggttaggcttgtaggtgtcctaaagcattgggttttgtggggctctagtgttaatagtattataagtataattgtattgcaggtattcatagtattcagtactttctctagagacctatttctccattttctcatgttttattttctttaaaatttttatttttatttttatatatttagatagtacaagtgcaggttcttacatgctcatattgggtagtggtggagtctgggcttttagtgcatccatcacctaaatagtgaacattgtacacagaaggtaattttctgtcctcacaccttgcaccctcccacctcttggagtctccagtgtctgttattctgctctgtgtgtctgtatgtacccactgtttggcttccacttgtaagtgaaacatgcggtgtctgatttggtgatttcacataggataatggcctccagttccatccctgttcctgcacagacgacttgtcttattttcgtgacctgttctcgagctcaacttcagttcagtgagacctgagataaaatgaaggaaagatgttcctgttgccttttgaaagggtataaaaacaccctccctcctctttctgtgacatgggaggtggcgttccagactcctaattcgtaatgcttgtgactattttgttttgtgtttctctgagtaaaatatgtgtatttgagcatccgatcactccatttctcattcactggaagaagagagttttcaaagagcttaacaaaatagtcacactccgagggctcctggtttgaagtaggagtggtgatttgatcctatcctatagccctctgtctattttggcaaggaatgcgttgagagacttctttgaacctgatgtgtgctctcacaccctgctgactccagggtgttttgctacaccctgttttactcttgacaaactacctccggcctgtttgactggtgcagttttaatttggtgcagttgaggcgtagctggtttccctggtgaacctggagtccacactgccggatgccgtctgtgccgtccattgaggggttacttaggtggtggaatgtgttcccctattttccacctgctttccattttttaccctttacttgaggttttgccctttccttgaggactgagcaaaacaggttgtttatttacattttgggtggactgtttatttggggatcattttattctgttgttagtcttgaagtctgtgctgttgaggattttgtcttcctaatgggttgagatggcagacagagcgaaggggaaacctgcaaagaggtattactctttttctgggacctctcggaaggattcggtgaaggcgttaaggttttcaaggtcattgaacctcaagagagccacttcagaagtcagcaaaaggcaggttggtacagaaacttccttaaaacacccctttaatttttattttcttggtgggcggggggaattgaaagtcatgcttactctttgtgtttactccttaatattattttgaaaaagtttcctgattaatttttgaacatttttgttttcaaaatcatactgatattttctgtgctatcaattcatttgtgaatgcttattatttattagtgtttatgtttattcacttattgcaagggtttaaattactgtatgctgcaatactaacaagttgtgatattagcagatccttattactcgtatggaatctcttactaaaacatgtttttaatggagaccctgatgttacccaaacatctcactaaaaaggattagttgatttttatgtataacaaaataatggaataaaagcaaattagtgtttctccaatttcacagttctgtacattgttcagaattaaaaatatttttttctgaaaaatactttgggccaggcacagtggtatatgcttgtaatcccagcactttgaatggccaaaggaggtggatcacttgaacctagaagtttgagaccagcctgggcaacatggtgaaaccccgtctctacaaaaaatacaaaaatagccaggcatggtggtgcacacctataggcccagccactctggaggccgaggtgggagaatcacctgagcctggggaggttgaggctgcagtgagccgagattgcaccactgcattccagccttggtgactgagtgagaccctgtctcaataaataaataaattaaataaataaataaataaattaaaaaaacattttttaaaaagaattctttgaagctactggatatatgactgtaagtttaggctatacaatcaatatatagtggatcttttaacagtgttataaagattccttttcttaatgttgatatttttggagctagtttgtaattaccaaacagcaataacagataaaaagtaaagattaccctgcacataaaatgtgctttttttatttttacttttggatgagtgccatgggttatgtgtgccctccggtggtctttcattagaacggtgattttcgagctgtgaaaccattgagagttagtcatggtatctgtgtccccctgcccggagaagagtggtgccttgcagcattacagataggtgcttcagaactgtttccctcttcatacaaattcagctcaaatgtgtgatactgattctggccagtttatgaatgatgtgtgttttgggaatatctcttaatggtttatagaatggacacttaatatgtcatcaattctacacttattttggtcctcatatgtctgctaaatcttgcagttttagtttcttttcttttttttttttttgagacagagtctagatctgttgcccaggctggagtgcagtggcatgatcacagctcttggtagtctcaatctcctgggctgaagcagtcctcccacctcagcctctcaagtagctgagaccacaggcatgtgctactacaccctgttaattttatttttttgtagatgtgggggtctcactatgttgcccaggctggttgcaaactcatggcctcaagcagtcctcctgcctcagcctcccaaagttctgggattataggtgtgagtcactgtgcctggccagtttaatcatctttcttatattttccttattggacaacactgaaatactgaaaataaatcaagtccaagacattccaaatctctattttatatgtaacatacttccttccgcagaaactgccaccatattggatgtttgttggtaaagaattttcagcaaacctgattttcttcgatgtgatattttcttcaaattaatgtaatttgagtaaagacacagaataaaacctgtttttaagacattaaactttctgtgtagactatgcagaaagtaataccagaaatgaatgaggaaattcagagactgcctaaaagtattgttgctgattctgttggcagaatcttttctcttccctttcgaaaaatcatagtttaaaactgcttgaacctgagggtggtggcctaagtgttggtatttgccarttgagaatttaagaatgagtgccttgtattgtcattaagaattccataatattgtttatagaagtagggtgttgacctagagatctctgccaaaacctaatttgtctaattaaattccgccgagcatttctaacttccttccctaaacgacttctaattgcgtgtcgttccagtggtagtgatgataatgatgatgttctgcccttgtaaacatgcctttaaattattaagttctaagctggcaggtaaaatggaattacttttcatcttaaagatgagatgtggccttttggrggatgtgtgtggatggggacattgcgggtagacgaagaatcaggtagacttcttgtacaaaattcctggatcatttgtttattgtgggaaggagcactgctaagaaagacagactttttccccctcaagcaggaaccatcctctcttcagagcgttttgtttccctgctaggagccaggatgtgacatttaagcagccatataaatttcagttttgtgcatcactttgaggtaaggtttccgtagaaaacataagttttaaaattgttttgtgtgcgcttctttggggagggagatgtagttggaataagagtataatacctctgagatttgtcaagagaattgagaccatgctttttccctgctgctgttgagttatggaggcggaggcttgggtgcgttcaagatggggcatcactcgttacctgtggcctgccttggtggctgaggagggcattgctgctggcggtgtgatggttgttaacactgctttacaagcggtgctgaagaccactctcgtccatgatggcccagcacatgagattcgcrgagccgccagagccttagacaagtaccaagcccatctttgtgtgcctgtatccaactgtgatgagcgcgtgtgtgtgtgtgtgaagttggtggaggcccatgtgctgaacaccagattagcctaattaaggttgaygaaaacaagaaactagggaatgggtgggcctctgtaatactgacagagggaagaccctgtagaaaggttggttgaagttgtgtaatagttaaggactatggaagttataaggaatctcaggccaaggatgtcattgaagagcactttaaatgcaagaaatgaactaataaaactttggttcacattcctcaaaaaaaaaaaaaaagttggggtattgtattaaatggaataaaaaagagaagctgaaatatcatattggggagttttctgagctcactgggtgagaggttcagtttatagcatagatgattgaaatttctgcctcagcaaaagcagaacatggtttttgaagtaaatggttgaaattcatgcatccagatgtctgtatgactgggttcatggacttcaatcatcttctttgacacctaggttattattatctatatatctgaatctgtatactgacttctaggttttgattatggagaaaataacaaccaagatgtagaagtccatcagaatgatacaatctgacaaagttgcttaacagcagaaaaacaatgatgctaactcagaaagttagatgattttacaaaattcaacaaaaaagctttaaaagctgtaaattagagatataaattataggttacctgttaaaaaagacttccttttcaaggargtattaatagaagacacaactcaaaataatactgccttgatcttgtaaggccttgaggtaattgtgaatccccttgatagaaaaggtaagaagcaaagcaaattgggtggattttatatttaagcaatctagagatttataatatctattaygtgcatatacatgtgtgaagacaacatagtaaggtgtgttgttttatagttttctgtgtcctacttaaattggcttgcagtagaattatagttaaattgatgcagggcaggtaagccccaaaattgggcttagaccgggaaggttcttggctttgctcaggaaagaattcaagagtgagggctgggcacggtggctcacgcctgtaatcccagcactttgggaggccgagacaggtggatcaccttaggtcaggagttcgagaccagcctggccaacgtggtgaaaccctgtctctactaaaaatacgaaaattagctgggcatggtggcaggcgtctgtaatcccagctacttgggagcctgaggcaggagaatcgcttgaacccgggagacggaggttgcagtgagccgagattgtgccactgcactccagcctgggcaacagagagaaactttgcctcaaaaaaaaaaaaaaaaaaaaaaaaaatcaagagcgtgcaggtggtagaagaaaacagctgtattgaggctgtagtgttacagctctgtggctgctcccgcagagcagggctacccgctaggcagtgagcgcagggtggcagctcaggggcagttctacagtcatgtttatacccacttttaattaatgcaaattaaggggcaggttattctgatctttctagaaaaaggtggtaactttcaggtgttgctgtggcagtgttaaactgtcgagctggtggggatgtcttgtggagaggtgctttttatacagtcgttctttgtacaatagacagtgctacttcttgttaacgaagaaatacagatataaccaggataattttgagtacagaactgttcatcaaaaaatattaaaacatacctatgttctggctaagtgctgtgttagaaaactacttgctaagaatatgtaacaagttgggaattagaactctcctcctgtttktttktttttttttttttgatgcagactctcgctctgtcttccaygctggagtgcagtggcacgatcttggctcactgcagcctctccctcccgggttcaagtgagtcttcagcctcccacatagctgggatcacaggcatgcttcactatgcctggctaatttttgtatttttagtagagatggggtttcaccatgttgcccagactggtctcaatttcctgtctgtctgtctgtctcgatatcttttcttctctgtctcttgtttgtagtagagagaataactttgattcctaaatagaaaacagaatatatatgtgtggatacttgtattgtgttgattgtcttcattactagtttcctaatcgtagcagaaaaggtggtgttggctactaatgtcaccccagccctaaaggagtaatgtgttcttgataagtttgtgacattgctttcctgtgtaaatatgaaaayattctggaacttgatttcttgttactcttgtgttgtgcaaattgtgtgttctggcttcctttaccaaccacaagtaatgagaggttccaaaacttaaatacaattcatattttcgaggatagcttataatttttgaaataattaagtttagctttatgtaactaggtaaaaatgtgcatatcacagtactcaagatattagtttaaaatgaaaaacaaaaaacaccttaagtttttgctatctttagtttaatctgtggcaaataagctttctcccaaaatcatgctctccctagatagagagattcctgatttggattgaagcaggttctccttagttatttttaaggaaatatcatgcagtgtgttgagcattaattcttccggtgcttcccggatctccatgaagattttttttttccagaaatggaagccaagtttaaactatgctgagataaggttggatttaagaatagaatcgtttagatcactgaagccctagatgttcaagagaaatgaagtacatataggtcagagagaggatggaatttatcatcctagaggtattaacaacaaaaaagactgctgaatacagttcaatcaagaaagaatcaagcaagacaaggtctttaarttttacccgtattccacatcccttactccagatagaatttttgccacttcatactactaagtaaagyaggcaacagatgtcaaagtacaggaggatcaacatggaaccattgcttattttgaagaaaaaaatgtagatcatatagttagaggattaatacatatttcctgaaaggcaacagttcttctacaaggagcatactggttatgtgtttttagaaatagggcctcgctctgttgcccaggccagagctcagtagtgtgatcatagctcactggaacctcgaactcctgacctcgagcagtcctcctgccttggcctctcaaagtgctgggattacaggcatgagccaatgcactgggccgttcatgtgtttattaatacaaagtggatataatgcagttaaagttaggaaacacggtacatattgagaactgttagttacatgattacatgatcacagcgaggagctgtttctgtaagatcagaatgaatggagcatgctgcctgggaacctgtagctgcttggttagaatgagtgggtgctcagctggtggtaaattttttgtttacctttttgggttgtgaaccagctgcactgtaatttatgttaatttgtgctttaaaagttttcagggttgtactcgatcttaattgtrggtgagaaagatgaaaattatgcataaatactaatggcagtcgtgaaagggagagaggttattcttttttgaaaaaacagaatcctcctctgtcacccaggctggagtgtagtagcgtcatcatggctcactgcagcctcgaactcctgggctcgggtgatccttctgcctcagtctcccagtagctgacaggcatgcaccatcatacctggctaatttttcactttttgtacagatggggtctccctatgttgcccaggctgatcttgaatgcctgtcctccagcaatcctcacaccttggcctccaaggttatccttttgaataaaaatcatatgtaactaaacccagttttttgtgatatgtaaatctagagttatatctttaaaactgtaaagcatgtttttgtaattcatgacctacttcttttttaccttaggagtgctacttctgaattcttgcagaagtacagattgtacagttaatgctgatctttgcgatagatagaacaacttacattaactgtgaaaagaattctccctgatgtggaaatacatataatcttattttggcaagcattttacccctttcagtttctgcttttcytgatgtttaaatttatcttgtagccttgtatggtgatagcaactccttggtatttttcttgattttaattttcttctgcagtttgaaagattgtattcattgctgtgatgcatataagatttcttagtttttttaccactatgttttaatatgaaatgccaaagaattttaaagtttttttaaaattaagatttcaacgttgtggcctagatgaatgtgttacttgaggaaggaggttttaaatgcatcctatttaatgggaaagtttgacttgcgtgcatcactttatttttccctaccaaaatcaacattttatatcgttagaatatctatcgatatatttgggttacctgactcaaacctgtttcttaaaagcagaaagcagttaactatttctttataatgcttctccacttccattggaaccatgacattgcaacagaaattatattcacaggcaaagtcccacagcaactgtcttatgctrtgtgttgcagcctaaacgcttatttcttttgatttgaaggctgtaattcttactgcgagtctcagtaacttttgcaagagcagccattgacaggtgcccgccatctctctagccagatgctacctcatctgcctctgtccgatgactctggagttggtctggtctcaatttagtaaaacttgatggccgccgatgtgttgctgaagtaatcagttgtaaaatgaggaggtagaaatgtattcttgtcttttctgggaggttcaggtacacacaacttcaggttgatgatgatccaagttccttccctgtttgtgtcttaaaaacaagattgaaagcataaacaaaaccaacaacaaagttctttgatcaagggaagggattgcaactgttcacggatggaattggattggaccctgaattcttacagcttgatttgactttgtcatttagtgtaggatttcttaaccatggtttcactaggtgcttatagatactctaaaacatgcacacactcatacatcccaccccatagatgcccagaaaccactcaggactcgctgaatcagaatctccagtggtagtgggatggggttggggctagtcaggtaccctcacttcctcccgcaaaggtcccaaagtgaatccagcctaaacattgccaggtgaagaaactgaagtctagagcaccaggcgatatgaagataatagaactgtttagtgacagatttgagaaagaagccagtggcatttgagcatatgccctgtgctcaccccagtaagaaatcagaagcatagtggtgcagatcacctgcctgagagccagcggcggcctggcgagccggtgtgcacgcgctggctggtattggtgtcagctttcrtgaaggcgtcccttgtgttttgaggcttctcaagttctgaggaagcacctgcagctgcacagaggtgcgtgtgcatggagttgggaggctagccgccaaatgctgctcagattcccaggccagagagatggtctttatacgtgataagagcacggataagccacctgctttggggtcaaaattaaaaagtcaatatacaagtctttaacctggttactaataaagaatctctcagccctgctaacataacctgtgactttgttcgtgttagccattttctggttatctaactttgaatgaccttttcactataaatcttttagacacataggtgtagctttgtcaaagagtactatatttttattcttcctagtagaattttacttttatcataggattgaaagccaaattttaaatacatccttttggaatatgtttttgtacctatgttagaggaccatgtgaggtgtcagataccttaaatttttttttaaatcacattttaatgcagatactcagaacatcaagtcattaaattatgtgaaaatcagtattttgtgagaagggtccagttccttttcatttgttgcaagcaaattatcacctgcttctctcttacggtgcataattttgttagtaggtaaggtaattttttctgtttttttttaatgtttttaaaattgtgtaaacgtaaggaatacaagtgcagtttcgttacatggatatattgtgtggtggtgaattcttggcttttaaccatcattcaatakgttgctgtacccattaagtactttcccatccttcaccccctcccatcctcctgagtctccaccgtctatcattccacactctgtgtccgtgtgtatacattatttagctcccatttataagtgagaacgtgtggtatttgactttctgagttgtttcactttggataatggcctccagttccatcaatattgctgcaagacatgatttcattcttttttatggctgaatagtattctattgtgtctgtataccacattttcttttatctagtcatctgttgttggacacttaggttgattccctatctttgctattgtgactagtgctgagatacatatatgagtgcaggtatctttttgatataatgacttcttttcctttgggtagatacctagtagtgggattgctggatcaaatggtagttgtaattttagttctttgggaaatctccatgctgtttttcatagagtttgtactaatttacattcccacctgttttaatctgttctgttcactgctgtatccccatgtcctagaacaatgctcataagcattcagtaaacatttgttgaatgaatgaatgaatggaatggaaatgaattaatacccaatctatctttgctttgagaaggtcctattatgcaaataagtttctcttaaaaaaaaaaatcaaacttttaaaaatttttagtagagacggggttttgctatgttgcccagcctggtcttgaactcctgggctcaagygatcttcccactgcagcatccaaaagtactgtgattataggcatgagccactgtgcctggccaagtttttcttcttttgcttatcaatgaaaattaaatatgtaccataagatayatctttgaagataaaaggctttggagtgttttcttcttcctgtgtttgaatatatatattgtgggagtcagaataatgctatagagccaggtttggaggaggagagacgtctgtttttcatcttcctctctctgctcttcctggattttgaactctcttgaagctactcacatggatgtgaactgtgatagatgactgactcctagttcaaaactttgatatgatgcagtgactatgattcagttgcactgagcaggttatatcaggtagagagcacccacaaaatctcatgatagacaatactataatgaaaagagaagggttctccagaggaaggtatttttatgctagtaaccacagaacttttttgataaggccaagaaatttactgagcttttttgataaggtcaagacatttgccagaaaagaggcttgtctcggcacatagtcctggagtcttgatggttttcatttgtagttgttgcagatgaggaattatttgttgcttagctgtttttttcttgcatttacgaacccgtggtagttactgtcttgcttatttttccaccttgaccatttcaggccgcttgaggacaatccgtatccatcctcactccatgcaggaagttaaaggctgagcaggagacatgcaccattagtgtactgcacctcctcttcccctagtttaagaacatcccttcttctcattcccctttatgtaactttggaacattaaagcagcagatggtttctccttcaggctgcacggaggagaatggagcttagcatgatgtgttatccttaataatgtcatcacaatattatttgtttcttgtggaatttaaaaataaacattagcctcagtggctgatatttatattctgcttaatttgccatgcctattcaagctggctgtcaattttggggctggtcttactggcctggactagaaagatgagtttgtccgatatcacccctatgtgaatgccttaatgcttagaatcatctagcaaatacttttccaatatggctagaaacaaaatcatcttaaatcattaggcatttttcagtgccaaaggctatcaaatatcttttttccccattgtgtttttatggttcagtgatgaataggtgacaattttgtagccttaaattcctgcactatcagtaacaccgtggtaaatgccactgcagagaaaggcaccattgatctccccaccactgcctctgggatgctttagacattgacagatgtgctttgtgaaaccttgtggaatgacacttggggtttggtctgttctttctttagaaatgaaacttttatttttgacctattggcatttctttagcagaaagatcactcctactagctatctagatttgctgcagatgatttgttcattttaatgtttggattttgttcttggattttctaacctatttctcaacttatgtatcaataatcttgttatacactacctgttctatgttggccaggctggagtgcagtggtgtcatctcagctcactgcaacctccgcctcccgtgttcaagcgattctcctgtctcagcctactgagtagctgggattataggcatgcgccaccacgtcggctaatttttgtatttctagtagagacagggtttcaccacgttggccaggctgataccaaacttctggcctcaggtgatccacccgccctggtctcccaaagtgctgggattacaaggcatgactcactgtgcccagccaagtttagaatatatctgaaatattctaaaaggtctgaaatgtatgtttgtgtgtgtgtgtgtgtgtgtrtatatatatatatatatatatttttttttttttttttttttttttttkagggggaggggtaggtgaggtggaaggttctgtatgcaaatcaaggtctggtttccaaattaggtcctccaaacaaggtcagattgaaaactgaaggcttcaggttttggaactgtcaatcccatgttaggtgtgcctgccctgtccctctcttcctgcctggagggctgagggtgaggcgaaggagtccagaagcagaagtacaacacatgaggaatccttttgtggactcctggacgttagtaagggtggacctaagtatctggcaatgtgctcggggttttcttgagcaattcctcgagtgccacctagagtctartggtaatactgaattaacttctaagctttgtcaaggagcatggagaacttgagattctcagacatttttrttctgtatcatgaagaaactcaatagtaattggaatcaggatcagtttctggctgcttgatcagccatgtaattagtcagcatggtatgaatatgtacatgccggagttcagtaatataccttctatacttaaatggggatttttctttgtttgagaattggcttttttttttttgataagatcttgctctgtcatccaggctagagtgcactggtgtaatcctggcttactgcagcttcctgggctcagccatcctcccgcatcagccttcagccttccaagtagctgggactacaggcatatgccaccatgcctggctaatttaatttaatttttkttttggtagagtcagggtctcacttggttgtcaagctgatctcaaactcctggcttcaagtaagccccttgccttggcctcccgtggtgctagaattataggtgtgaacgcctggcctagaatctaatcttttcttttcttttctttttgttctgttctgttctgttctgttctgttctgttctgttctgttctgttctgttctgttctgttctttaattgagacgaagtctcaaaaagcccaggctggagtgcagtggcgccgtcttggctcactgcaacctccgcctcctgggttcaagtgattcttctgcttcagcctcctgagtagctggaactataggcacgtgccaccatgccaggctaatttctgtatttttagtagaggtggggtttcaccatattggccaggctggtctggaacccctgacctcgtgatccgcctgcctcgccatcccaaagtgttgggattacaggtgtgagcaccgtgccaggcccagaatttcttttttttaaaaatttttaaaatttttttgtgatgtagttttgctcttgttgcccaggctggagtgcaacggcacaatctcagctcactgcaacctctacctcccaggttcaagtgattctcctacctcagcctcctgaggagctgggattacaggcatgtgccaccacgcctggcwatttttttttgtttgtttttttcagcagatacagggcttctccatgttggtcaggctggtctcgaactcccgacctcaggtgatccacctgcctcggcctcccaaagtgctgggattacaggcatgagrtgcgcccagccttagaatttcttttttagtatgattatcccctagcttatttgaattactattttaataaacacgttctggaaatcttaattattaataactttgattgtattaggcatgaaaagttaggcagattttttttattttaaaaaaaactttgtaattgtggttttacttatattgcctctattcagtaggatccccctccctctccccctctctttccctccctgtctctgtctctccctctctcttcacacacaccacacacatgcacaccaggaagcagttctgtactgtctacaaattctctgtaagccatcatagaagagaagtgaatcagagaaggggattcaacattctacatgctaagacctgtccggcacacacctcttcacagccttgtctgaagtgacagactgtagcaattgctaatttgactaagaaaaaggtttctgggccaggcatggtggctcaggtctgtaatctcagcactttgggaggccaaagtgggcagattacctaaggtcaggagttcgagaccagcctggccaacatggtgaaaccctgtctctactaaaaatacaaaaattagctgggtgtggtggcacatgcctgtaatcccagctacccaggaggctgaggcaggagaatctctggaacccgggaggcagaggctgctgtgagctgagataccaccgcactccagcccgggcaacacagggagacaccttctcaaaaaaggccaggtgcagtggcttacgcctataatcccagcactttgggaggctgaggtgggcggatcacaaggtcaggattttgagaccagcctgaccaacatggtgaaaccccacctctactaaaaatacaaaaatgagccgggcctgggggtgcacacctgtaatcccagctacttggtaggctgaggcaggagaatcgcttgaacctgggaggtggaggttgcagtgagccgagatcacgctactgcactccagcctgggcaacagttcgagactctgtctcaaaagaaaaaagaaaaaggttttcgattgcctttgctattgattcagacagtgacataaccaaatatattaaaaagaactcccacctctggtctctttggtctcggcggcagaagcgagatgaggaagggagtgtcatccttagggaaacatcgcagctggacacactccctgtgctgctgcggccctgaggccccaacctgctaagccaagagaaggcagaactggagtgccaaggcgaaaagacgaagcaacaccagggctggttgaatgaggcgcctaaacattgtacactacagattcaggcctgggctccgtgaaggacagcacccagacccaagggccagctactgcacctcatcttcagaatttcagtgattggtcayggaatacatgttctgtttttttttttcttttaaagaattctttgggaataacaaaaactgagggggaaatgaaaagttttgtggatgaatagaagaatgacacagcttctttaaaatgtttgacacttctggaacctctgaagcataaacagggtgccaccccactgtgttcagtgggcctgtcagctccatcttcgtctaaaatcagatgcttggaagtagagaaggaactttttttaaaaattttttatttttgtggatacgtattaggtgtgtatatttatggggcataagaaatatttcggtacaggcatgtgatgactaataaccacatgagattaagtgggatatctaccccaagcatttatccttcgtgttacaaagctctgttgcccaggctggagtgcaatggtgcgatctcctctcactgcaatctccgcctcccgagttcaagcaattctcctgcctcagcctcccgagtagctaagattacaggcatgcactactacgcctggctattttttttgtatttttagtagagatggggctttgccatgttgcccgggctggtcttgaactcctgagctcaggcaatctacccgccctggccctcccaaagtgctaggattacaggcatgagcctctgcacctggcctcttttagttattttaaatgtacaatgaaattattgttgcctatagtcaccctgctctgctaggaaatattagttcttattcattctttctaactgtatttttgtactcattaactccactcccctgctcccagccccacacccttcccagcctctggtaaccatcatctactctctatttccatgatttcagttgttttaatttttagctcccacaaatgagtgagaacatgcaatgtttgtctttctgtgcctggcttgtttcacttaasatratgatcttcagtttgattctttttttttttttttctgagacagtttctcactgtcacccaggctggagtgcagtggcactatctcacctcactgcaacattggtctcccaggttcaagggattctcttgccccagcctcccgagtagctggaattacaggcatctaataccacgctgggctaatttttgtatttttagtagagatggggtttcaccatgttggccaggctggtctcaaactcctggttcaagtgatcctctcacctctgcctcccaaagtgctgggattacaggtgcgagccatcgcacctggctgatctcattcttttttatggctgaatagtactccattgtgtgtatgtaccagattttctttattcattcatctgttgatggaaacttagtttgcttccaaatcttggctattgtgaatagtgctgcaatgaacataggagtgcagatacctctttgatgtactgatttcctttctttaggttatatacccagcagtgtgattgctggatcatgtgatagctctatttttagtttttaaggaacctccaaatggttttctattgtggttgtactaatttacattcctaccaacagtgtatgaggttttctttttctccacatccttgccagcctttgttattacctgtcttttgggtaaaagccattttaactgtggtgagatgatatctcattgtagttttgatttgcatttttctgatgatgggtgatgttggggaaagggaacattttgagaatgaggaatactgaygaaagrgccagaagttcattttaggcactccgagatgtcagccgagcagttgtcttaagtagctccctgcccagtagtagccttcacggttaggcctgcaggtcaaaggagcagaatttaaccatctccccagggtgcttacatgcaggatctgrctgcaggaccttctttccagtggggctttcaaggtagaaatctgcctctttcttggactgctgcactactccatgattgggaacctttatctaacattgattggataaaatgccccaccttccacactgaagggcttgtctcaaagtcagagcctcttatctcatttactgtctgggcggtccctcctttgacagctgttttgcccaacatttgataacaattctgatctttgtgattctttaattatagaccattgaatctggatgaaggccagatgatggatggaccatagccaggcccaatttttgctgcagatgaataaataggtcatgttcattcttgcttcttccccctttattctatgcaataaaayatccggctctactaatagctctaacttgctttttctaacctccgtagaaaatagatttgcccgtttttcccctcccaggttgctttgtattgattaacccatcaggccatcagagtggtggttagccaattcatgttctttcatcaaatttggggaaaaggaccctaatcaggcatgatcaatacaaaagtttgacatttgcactgtataaatgtcccgaggtactttatttgtacatttcttttagcatttttgaaactctgtattgtttcataataaactgttcctttattaattatagatgagttagctttgtcagcacattgggtacaagaaatgcatcgttttrttccttgtttctcaagtagagtgattatagcttcaattaaaaatgacttttttaaaaaactgagattcccatgatgctctgaagggctatgttatgtcaaaagctgaaaaccgctctgttacacagaatcctcaaactatctccaccagtcccattagtcataatctgagtgtttctgccccatgtaaaaagtgaatttaatgtgcaaaagaaaagaatgttgtcaattctatttttaaaaaagtaacatttatttacattactatttcattatgtcagtagattcagcttctcagtggtagtattgagtattagggataaattggcacacaaccaaaaaaaatttaaaaaattataatgaaacacaatatttctgtgtgatgttttaaaataattttccagtctggaaacagccaagcatagcttctgttttgtgccttagttccttgcattcttgctgtgcaggaattgctatcctatttggtactgatggaatctggtgttggcaacttcagccaaaaggatgcctagtggttgctgaacttacactttctaaccctgagaattgtccattcacacatgcgttggtgtgcattcaggtcagtgagcggatgacagatacactttattctgaaatgcatggctatttgcccggttttgctgtgcatttcagcatccgtgtgatgagggctgctgtgtacatggccatgccctccgaggctcccttaaacccaggtgtgtagtgcagccccgtgcacagtgacatacatctgtgtaagctcctttgaaaatacccctgtgttaaagatgttctttatgtactaaaattttattctaacttttaaattgcccctttttagagaaaaataagcatagataatgtaagtatttatctagatattatttgttgttacctaaacttctgtcctgagataagctttaattaaaatcaaggaaatgtttagaaattgtagtttcaaattataaaattatcttctcccaataattggagttgggagagaaatacacacaatggagggagaggcaggggaaaaattgcatgtaatatgtagctatgtttggctagtattttaggttacagtttacattgtgttttcttagagttattgatgttatgggttatttcaacaatagaggggaagatttggggaaaacatatgcattttaaattaatatgttttctgccttccacaaagttaaataaattctgagagatttctgagtactttttggtaaattcattttatgaaaatgaagatgctaattctagtttgtggctaatgtaaataacctttgaatggattatttctagggaagaaaatgcatgcgcggaagcaaaaagtacctaccattgaaggcccttgggtttgtgttttataacctagatggcctggcttagtaaaacaggttctaactaggtacctaacttgcactacaggaagaagagaagtaaggctttactgagtcaggtggtatgaattagaaattaatagtattatcctgagtggagcttggtggctttttcagtggagtcattttcaccatccttttacattaaaaatgtaaattgattcacagtggggggaaaataaaaagtgatctagatgtgtaccttaaggaaaagaattcatacacctttattcatgtatgctattatgtcttcatttacatgttattatgtatcatctagcattatcctatgaaccattaagaaatggcctctgggtgctacaatgtgagtggcacttcctttaaaataccccagccaaaaataaaaaaagtgaagcartgaaacagttttggcgaagattaataattactacagctgagtgagtgatacataggagttcaataaattatcctctctacttttttgcaagtgtggcaaattagatcattaaaaaaactaaaaagtttttgtaattaacatttttaaatgttgggaacaaaacccttagaaataattttattcttgctctgttatttagtggaggaaactcagggcagatgacatgtgttggtttgtcctgtgtgtcaaggctccttggaggcagagcctcttgggaggtgcaggtttcctggttcctcactttgtgctgggtgtgcctttcaggatctgattcctgagggtgtgtaccaagccagtactgtgtgtgcgcttgcattgccttactcttcactaagaacatggaatttgtaggtaaattctaagcagtgaaattgtagaaactaaaacactttgaaaataatatatataaatttagcatgtcttctgtgacatgcacaattataaatgctgtacttattttaacacacgtggtgaactctgtgaatgggctctggtgttttgtccattttataggtgaggaaattgaggctcagaatgcaccaggattaagttgttatttctcagctgcagttcagccatttgtgctctgcttttcgaggagacgtctcctttgctagctgctccctggagctttagagggagctggagcctggcaggcaggaggggggacatggcccttgtttgcttcctgttcctgtctgcattgcccagcaatagtcattaattggcagttccttctcgtttttagattttttccccctgtccacatctttaggcccccttaacagaatcagcaccgaggtccttctgctaagctcctcatgcctcagcctcagcctcagccccagcccccagcatcttctcctcggagggtgggtaccgtctgcccctggtgccgccttcaagcttcaggttctcataaccgaatttcctcagttccgcgggtggtaggtgtgctgcagttacctgtttaccctcttccttatattaaggatttgttttgtgatttgttttccttactcgatcctgaccttatttttggcatttattaaatgatattcagaattcagcaaattgaatttattctaaggaatattgtaatttaaaatagtatctagttattagtactagtacttatttttacatctttaccaaaaggtataaaacacatttttaaaaaaacatttgaataaatccacttatgttgtggattcttttttttttttttgagacggagtcttgatctgtcgcccaggctggagtgcagtggcgcaatctcggctcactggaagctccgcctcccaggttcaggccattctcctgcctcagcctcccaagtagctgggactacaggtgcctgcaaccacgcccggctaattttttgtattttcagtagagacagggtttcactgtgttagctaggacagtctcgatctcctgacctcgtgatccgcccacctcggcctcccaaagtgctgggattataggcgtgagccaccgcgcctggctgttgatctcttaaaaagctgagaagtggctaggtgtggtggctcgtgcctgtaatcccagcactttgggaggcccaggcaggcggatcacctgaggtcaggaatttgagaccagcttggccaacatggcgaaaccacgtctctactaaaaatacaaaaattagccaggcgtggtggcgtgtgcctgtaatcccagctactcgggaggctgagacaggagaatcacttgaacccaggaggcggaggttgcagtgagccaagatcgtgccactgtactccagtctgggcaacagaacaagactccgtctcaaaacaaacaaacaaacaaacaaacaaacaaaacaaamctgagaagcagaaaggtgacagtgatgtgttaattactaaaatcatgtggctttggggaaggacacagatccaatgagaataaatggttatcaggtgattgtcaaatagatcgaagtagactttttttttggacaataattatttcatcaccagatgaatttcaggccaatacaaacatcattgtctcagttcctacctttctctcccatttcaccctgaaatttaaggaactatgaaatgtttgaaagtgtgcatgttctcgatctggcttttctgacttttttttttttggtagaggtgggatctcctctgttgcccaggctgatctcaaacttatggcctcaatcagccctcccagaggtgctggaattacggacatgagccatcgtgcccagctgtgatctggcttttcttatttatgcaattgccaaggctagaacagacctgggccttatttgataagtttagggtcaaagtttgcatcagatcgtaattctacacagagtaaaaagtagaaaatgtgacagcttgtctcttctctcccttaggcacagtgttgaatgtttattagaaggctgtttcctcacaacatgtttacatcaagatgcatgcatgccttagcttgatgcttttgcaatttttatgtagcatctgttcccaaatacaagagcgctaacaaggccttaatacagatagcagtgaggacagcagggagttgcccctgtcggtttctgacttctcctgcggccctgagttattattcataatgtaaattctctctcagttcccagcatgtacataattaatggaaaagactatccaaggaagttcagcagccacaagtaggtcaccattaccagatgtttaattattgtcattaggaagcttttggaaatacctgatgagctttctaaaagcataacaataagcaaatccttttggattttgatggattggttcttttgtattgaatgatgattaaggttattacaggcacagcactctcgccttcttccgaacatctttatcaaaagtaataattatgctaccctcgatatgaaatgcacgtcactctcctttcatatgttctctgatttcaactgtgccawgttttaattaatgtacttcaatagtacgaaaacttgagcatctataattacatctttagtagcaatatttaaaacctttactgacaatatatttatcatagaacacttcctggaattaaggtcagtttatgtggaactgacatgcatttcagataggtttttttttatcttgaaggttaaaagtagaatacaatataggagaagctaagagaagcccattaacattacaatttttgtggtttatggggggcagtggtgttaagtaagtttaacaaaggcagggaattttaaaaattactctttacttttttcttcaacatcaaatttgtataccataaaaaattttgacattttgctagtatgtgagtgagccattcccaagtcatccttttcaaatgttgtttgtttttgagttcacgttgaagaacacgattaaaaaaattcttttggttttttaattcagttcagaactgaatttaaaaatcagaaatctcagtgtctcctgctctttgctgctttccttcatggcatctgttgttactcttagacttcattcattcccattttgtggcttgtttgtggaatttaaagttcttaaaagcccaatttcctggtctccagttacttttaagatggacccattggctcccccttgtgtctactctttgtattgtcatcctccaggctcttggttaaacagcttgtaaggtaactttattactgctcttgargaagggacaatggctatattcgtcagcgttctcatccccttatttactctcctctgcattctgccctcttctgcggggttggtagagaatagcttgggaagagccataaaatggaaggtcttgaaagccagacatcagagtggagttttggagtatgaatcgtgtgctggtaatttatgctcctccccattctgcacttttctccagggttggttgtgatgtcatgaacttctctccatctcacacacacccacagtcatgtatgatcaggartaacacaggctagggcagtgcttattgtgtgttatacataaaacacacaaatcaatgtgaactaatattctagaacaatttatagacaaacaggtgcattgtgaaaaaagctaaatgggggccttagaagagaaactcatatatacctttatgttgcatacaattcgaactccactttgtaatgatttgatagggygttaagtttatttttcctttgaacaaacctcgtcttcaaattgtaactataacacaggtaggattgcagagcaagtgtgttaaggcacataaaagtcacttgatactagataaagggagtagctgtttccttaacaggttcaaattgcaactattactgtaaaagttgttgacgtgctcagcaaatggtgggtggaaatgttggactcagaaaaaggatttgtcctgggcacgtccgttttcrtaacaagaatataaggtaatttttaagtgctaatttaatggttcttactgtaaggcaacgggagtgtagatggggaaagctggtaacaggtgtgtgcagtcacggagcgatggcaatgtcagaaaaggtgggggtcaaaattgttttggacattgatcggaattaaggaaagcatagatgtggaaaggtgcagtgtgtgtccatatcacggcagagtgtctgcgggagagtgacttgggaggagctgtaggatggaagatcttgaaagctccacattagaggtgaacttggagcatcttgtgattgcagggcaaatgggttgtgggaaatggagaagtaagaagtagattgtgattggtttttgtgttcaatgtgatataacttagcaatgcaggagtttttgtggaacctggaactctatttttgtttttcatctgttgaacttgtgccattctgtagagagttatagatatttttccatagaaaggcaggcagtgcagcttggattctagagcagagagtttggattctgttggcttgagttcgaagttcagccctgctgtttattggctgtgtgaccttgggcaagttacttaaccttttagcacgtctgtaaaatcatgataacaattgtaccgattgcatgggatgttgtgatggtgaaaacattgttatatgatatcaccttatacatgttagctattattcttgccatttttttgtatttgcaaattctttcccaggagccagtagtggaataatgtttacagtagttctttgaacttttttttttttttttacagttttactggcaccaaatgtgtttatctacacctagtccccattagaaccatgcarttacattcatgtttgtataaaggttgtcagtttaatattcaagcaattaataaagacaaggtgtgagtttttctgttaatgcacctctgtcttaatgtgaagcaacgtataagcatgcatcttaccataattggtgtgcatgtctgtgtacatgggcacaaacatttctctttcagccctgtaatcacatctccaagtaatctaagtcaaaaagagcaaaatctaagccagtggacatgctgaggctatctcagggtcttctggaatgatcaaggccagaaatcccatcttcatatacattttttttttttttttttggagtcgaggtcttgctatgttgcccaggctagagtgcggtggctattcacaggtgcgaacatagctcactgcatccttgagctcctgggctcaagtgatcctcctgcctcagcctcttgtgtagctgggaccacaggtgcaccaccacacctggcagtttcaaatgcatttttatataaaagtgtgatgttggtctgagtcttttcctctttaccttgcaaacctggattcatcatcatggttcatgtggtatctcgtgctatacatgctggttttgtgttccttgtgggagcatttttttcttttttcttcagagaagagaaagtttgtcaaaacaagggcaaaggtgaagatgtatggcttttcaagtgcttaaacgtgatgaacctgtttttgttgagggactgaggaaagagtattattggatgtgagggaagaagccagtgggattcttccttgctgtctaagagagcatgatgtgagtcaggggctctagaaggacatcacatgttgcacattttagtatcagaaacaggctgttttcctcaatgggttctactctcagatattatctttttttaatgttcgaacgtaatttgcttcccccctaaagaatacagtccttgtaacagcccaaaataccatttttctgattactatcacttatataagaccctccaaacctttctcatccttgaaagtgatccatgctaacacataacacactttgttctcttaagcatgtgtgtttttttgttgttgttgttgttttttgcgagtctgtgccccctcccttcctttagagctctaaggtttgtcattaaaatgagcacttccgtttaaatgtcctccgggctcatccatttgccttagctactcattgtttatttgaaatgcaaatttttatataacagccaaaatctaacccacttacgcactgttaactttatatgtaagctccttcttataactaaagaattcacatggtggttagttatggttgcagtctgccttgcactaacgtattttcattttctagaatgtatatgcatgcctgtcttttcctcatggagtcttctagggaaatcctcagcacactgcgagagggcagtcatttccttgttaggtgtgagtgagatgtgatccattccccaaacagcgtgcatttcagtaagggcattgtttttatgtgaggccgatccatccgtatctatgctattgtctgttacttgaagaatattgactgtcttggagtcgtatttctatcacatctctaccctgctggcttcaccatctaagtggtccttcagcaaacttctcaaactagacgcattccctgttttctgggttctggtggttagcttgggaagaaagtgaaatgtgacttgcctaagaaagtaagacccctctscccatcacacccatatgtgaaagcttcttgggccattattcttttcatctcagccaatagcctctgtccttgctccttgacatacttcttgatgactggtagtggaccagcaaagtagttaacctgtcccaaaatcacacacgaagagaggctagtgtttacagaatttcagccagygagcctggtgcagtggcgtatgcttcttgtcccagctgcttagaaggctgaggtgggagaatcacttgagcccaggagttcagatgtagcacgggaagcatagtgagaccctgtctctaacaacagcaaattccagccagcttgcttgggagctcagtgagaacccggaggaaaaaatgctggccgtgtgggtcagatgctgcgactgacagtggggattgcttgttaagcaagaacagatactgtgcctgcttcttggaacttcttaggggccagtcattaagcaatgaagtgactgcactctgaagtataaaatttgccaggagggtgattgtatggtacaactggaataagggaatttcacttacagctttcttaggaaaaaataattgtgtcgaaatccaaagcatgagcagaagataagtggccaaattgtccactttgttctaccaaaaacagaaaattccttgttatccatgatgaaatgggtctaagtaactaatatgatacagtttttgcaaagctcgggtctcttaccagcatactgtattaacgtcgcttacaaaaaaacaaccagcatggcctggcctttgttgatctgtcagcagtgcttatggtttttgtcttcactgcaagcccctcttcagggactgcggttggctgtagaaaatgcagtccttggcttcattgtccacacttcctgcccagagcagtagtctctgtctaggggacacccacgtctggctggtgggcagggaaggggcttcaccaattcctggtgtaaatccgtttcccactttctcttctttatgtgcaggcttcttcctctgcacagagaaagcctgtgacatgccctttagtggggagtatcaaagggttgtgagtgctcagtatgtgagagaaagactagtcttaagaggacgtgtgtgtcattcttagaacaacaaaaagaagacatggaaagtatttgactaattgatttttgccatttggagcaaaaatctaatttttgtcaaagtgatgctgggaccatgtaattttgtgaaagtgaagctggaacacataattcctcacacactcagccttgtgcgggcggctgtgattccttcgccaccatgaagtgaagtgcatccaaagtgtgagccagtgtactgccttttttttttttttttttttttttttttttttttttttgagacagagtttcgttcttgttgcccagtctggagtgcaatggcacaatctcggctcaccacaacctctgcctcctgggttcaagcgattttcctgcctcagcctcccgagtagctgggattacaggcatatgccaccatgccaggctaattttgtatttttagtagggacgagatttctccatgttggtcaggctggtcttgaactcctgacctcaggtgatccggccacctcggcctcccaaagtgctgggattacaggcgtgagccgctgtgcccggctggactgtgtttctttttgcactttttggtttttcattttagtgttcttttgtgctttctgacctaagtgctggcaatgtgtaccttcatgtgtgaattgattatgaagacaatttctaagagcaatcctcaagactcagtttttgtctggctttctgtaatcattgaagcaacttaaaaaaaaatgtccacttcatctttagagttctccccctgcccaggcacacaggtctcactgcacaccctattcgtcaccccacaagatgcatgtgctgtctttggcttagcagttcacatgcaaatacaaatacagtcacgtgcagcataaaagcatttcagtcagtgatggaccacataaaccacaatggtcccgtcagattataatggaactgagaagttcctattgtctagtgacgtcgtagtgtcgacctgcagtgcagtccttaggtgtctttggtgatgctgctgtgaagaaacctactgtgctgtggttgtataaacgtctagcacatacagttgtgcacggtgcatggtrcttgatcatgacaatctttgactctgttactggcttatgtatttactgtactttttattgttattttagagagtcatccttctttaaaaaaaagcccgttgtaaaacagcttcaggcagggccttcaggaggtttccagaagatggcagctccatgtgtgctgtcacctctgaagcccttccagtgggacagaggtgctggtggaagacagtgatgttgatgatcctgaccctgtgtaggtctaggctaatgtgtgtgtgtgtgtgtcttagtttttcccaacaatgtttacaaagtaaaaaaccataatttaaaaatggaaaaaagtttataggataaggatagaaaggaaatatttttgtacagttgtccaatgtgtgtgtgtttaagccaagtgttattatgagtcaaaaagttgaaaaaattaaaagtatataaagtaaaaaagttacagtaatctaagtttaatttattgtggaagaaagaatctttagaaaatgtagtgtagcctaagcatgcagtgtttctaaagtttacagtggtgtacactcatgcctttggcctcgacactcactcaccactcactcactcacccagggcaacttccagtcccgcaagctccattcatggtgagtgccctgcatgggcataccatcattcaccctttataccatatgtttgactgtaccttgtctatgtttggatgcacaaatacttaccattgtgttccagttgcctacagtattcaagacaataacacgttgtacaggtttgtagcctaggagcaagaggctatgccatgtagcctaggtgtgtaggaggctctaccctctaggtctgtgtaagtgcactctagcctgatggcacaactatgaaatccctgaatcacacatttctgttttaccttaattaattatggagataaggccttgctgtgtttcccaggccgatctcaaactcctgagctcaaataatcctccttccttggctcccgaagtgctgagattacaggtgtgagtcctgtgcccaagccatgcgtctctcagaatgagtgtgcccctgttaagcgatgcatgtctctgtatgctcatgtcatgcctggcctttactggctacttgtacagtcatctgtcagctgtgacttttggggctataaatccatcaaagttcaggaatctcccaaacttggttcatttaatgcttagcagacgtagctccacagccatatttaaaactgatgatgatggtgtcccttgtttggaggattcatttgtaagtgaccataatgagtttatcctggccattccccagagaacagcaggactcctggttcatctaggatgtgtgaagtgactggccctctgagattgctgggcttccttaaaaatgtcacatacaaggacatagattttcacattgtgtagtattgtttatatcaggggtccccaacccgcagaccactgtgtggtactggtccatggcccrttaggagccaggctgcacagcaggaggtgagcagcaggggagggagcattactgactgagctccgccgcctgtcaggtcagcatcggtgttagcggaactgtgtgtgagggatctaggttgcacgccccttttgagaatctaactaatgcctgatgatctgaggcggaggccagatggtttcatcctgaaaccatcctcccaagcccccrtttgtggaaaaattgtcttacatgaaactggtccttgttgccaaaaaaaagttgggggccactggtttagatcttgcagtattgtgaagtaatttttggtcttctgagagactccaagcagcacaccagcatgaaaagatgagccattcacggcagctcttggcattggttttaagatgaaatacatcaatattaaaaataactataaaacattcatgaaagtttttggagtttctttgaagaatgtctttgaagctgacttaacattattgcatttattacagttgctctgcagttcaactgggctttataggtttgcatctggggttcacatatgcattttaagacgaggtttgagtctgtttgtataaatcaaatgcagtcctcagactcatgtgcaggccgcatggcgatcccgggatgaagtagatatttctatttataaacagattcctgagtacttcagatattatttrtatgttggactcctgtctagaattggcacatatctacatgtacagagaagaataatgaaatgtcaggggtctcactgcaccctcctctttgatcccattctctgaggttttaatttgggcccaggaagcagcacttaaatatccctactccagctgctagcttcaaacaatacaaagctaggcttccaaatatatttatcatttcttggttgaatatttgcaaaaactgacctaccctacgatttctctcaaataggccttagcaactacaaatatggatgagaagatagaaagggaagctttatgtttgcttgcattttagctaaaagataattagaagtgcaatttaagttatgataatggaaaaaaagagctacacgttaagtgtggtgcattgactgcatcgagaaaaggtgcagtctaaagcccagcaaagcttaaaagagaaaaactagaaaaaaagaactttttggaatataaactgtgacagattttttgtattttctgtgggcttgaaaagtccttaacgttttcgttgttactgccctggtactatttatgtgttagaatacagaacaactttaaatttgtggagtcttatcagtaggactgctggctttgcgaaacccgtgcaaaacggacactttgaagtgaccttccctgtttaactcatccgctcctcccttcagtgagtacatactactgtgtgcggtgtgctcttccagatgctgggatgcagtagtgaatggagacaaagcccctgtcctcatgggcttagactccagcttatgacttgttgtttataataaataatgaacattgtgaggttattcacaggaagggatgaataatggatggatcttcaaaacgtgattctggttaactacagacatcctgaagttccaggtataaaaagccttctttaaagcatactatagcagtcagaatgaatgagtagttaataaagctctttgctgaaataaaagcaaatatgttcacacttccaaaaaataaatacccaagtgggagttgtatggttctgatgtcaaacatgttatgagaccatcagaggtatatggaaatttggggaggaagacagtaattatataaaagtgcatgcaagcctgggcaatatagggagaccctgtcagcctgcaaaaaaataatgataataaaaaatcgtagctgaaggtggtggcatatacctgtgggtcccagctgcttgggaggctaaggtagaatcactaaggagaatcacttggggcagggaagtggtggctgcagtgagctatgattgtgctattgcactccagcctgggcgacagaacgagaccttgtctcacgcacacgaaaagcaattactgaattagagatgtgatgtgggaaacgctcccatctaagtaatgaccaagaatattccgtgatagagatgaagtcttagcaggacttccctctcaggttattagtggtgatgatcctgctttgttttattaccttattactattatgctctctgaggtatgaagtgatattaatctgtttgcagtgagaaataacactttatagcattgctatcatttaaacatattaaaatatgttgtaatgcagaaaaacaccctggggagagaggtgaaaacttaggagtttaatttgaaatgcagttgggaaattatttggacagcagagaaagctttagggcaaaatttcagtaataaagtatattattttctaaattattcatcagggagttgagtttgtttttcatgtacctggacttaatcacgattacaaaaaaatgyttagctaattgtagtcattcatctatactaatccaaaaacaaaaatgaggagttattgatggtttttatttaggtaaaacaatttatttgactgtgagtggttacatatgataaccatatattcagttatttctaacttgcctgttttgtgaagaatgctattttgtgactgttcctgcgtctcgctatgttttgggggttctggcctagttcctacaacatatactcttatcccrgttctgtgttgtcctggtgattctcccaagagctaatcagttaaagagattttcttttccattttggattttagcttggagttttactcttagtagtaaaatggtatctaaaaataaaacggggaagaattagaacatgtcagatatagtaacacgttttaataatttgctctaaaaatctgctcatcagctgataacctttcgtttgtccacatgtctgctttttaaaacgcttggtttcttaatatcccagtgagaacaggcacctgcagagatacttagttgctcccagccgcagctgcagagcgacttctagattctgcgtatcttggtttatttcatgctgttttctttaagccatactgtctgctggtcagatggtaagagatacctgttttggaaaatttggtaaataatccagggttacaagtaaatttagcataatgtagaggctttattttgctcatttaaaatatgtagtcttggccaggcacagtggatcacacctgtaatcccagcactttgggaggctgaggcaggtggatcacttgacgtcaggagttcgagaccagcctggtcaacacgatgaaaccccgtctctactaataatacaaaaattagttgggcgtggtggtatgcgcctgtaattccagctactggggaggctgaggcatgagaatctcttgaacctgggaggtagaggttacagtgagccgagatcatatcactgcactccagtctgggtgacagagtgaaactgtgtctccaaaaaataaaataaaataaatyaaaataaaataaaaawaaaataaaataaaataaaaatagtgttggctgggtgtgatggctcatgcctgtaattccagcactttggaaggccaaggcgagaggatcatttgaggccaggagtttgagaccagcctgggcaacatagtgagaccccatcactacaaaatataaaaaattagctgggtgtggtggcactcgcctgtagtcccagctattcaggaggctgatgcagaaggattgcttgagcccaggagttcaaggctgaagtgggccaggatctcatcattgcactccagcctgggcgacagagtaagaccctatttctaaaataaataaataaaacatgtagttttacctctattcagcaattagattccttacaactcataaactgtatgagaaattgaattccactgtttttgtcactgagaatgctcttgtcctagcagacctgtgtgtgctaaattaaggtctgatctccatcagtcactaagatgtggccaaacataaaggcttttcatagttgttataccccgtaagtgatgaccctgagaaatgagagtgagactgtcaaggtacatcttttgtccttattccctagattagttcttgaaataagccaccagttaagaattttgggatttcctgtgcactggcagtggttgaagggtttaacatgcctgaaaccttgagcacaaatccctcctgcagctgccctgggccatgtcagccggcaccagccatgctgtggcaccagagaataagcctgcacttaatgtcatagcatttcagagaactgtcggagcgtggggctggcccttgggatttagctgctgcttgtatgaagcagttttaaaatattaagcttagaaaagtcccactgagctgggtaaagactttgtgtcctttgggtccctctctatgttttatcagttttcagctgcagggcagatgtctcccctgggctgcagtcttaggcactaagatgtgttgctggcagatttgactctagaagccccaaagggcaggcagggataaatagttttgaattttgtttctwgtctcttctgtgttgtattggtttcagagttcagtatccagtcacagtggacagttttgtagtattttgcagcctaaaaaatttatgcaagcagtaaattaaaaatctgaaaaacacacgcatacacatgtgtgcacacgaaggcacatacacatccctccatggagtcttccactcttgtgtgttttgtaattctctttatttttatttgtttacttggagacagggtctcgctctgttgcccagggtagagtgcagtggtgcaatcatagctcagtgcagcctccacctgctgggctcaagcaagcctcccacctcagcctcccaagtagctgggactacaggtgcgcaccaccatgcccagttaattttctaattttttggtagagatggagtctcactatgttgcccaggccaacctttaactcctggtctcaggtgatcctccccagttgtacctctcagactgattataggtgtgagccgccacacctgacctataattttattttagatttacatgagaagtgatgctgttttaaagtgtaatgctctgaattaaaggaattctctatggtaatatatttatacataacaaagcactaacaattacagaaggccttgatgcctgttctattattcgttttatgtttctgtgagtaattgatgctttgatgtattttggccatagaggcactattgtaatgcatgtagactgactttcactggacagaggtttgctgagctggttctgttcatgtgctatggctggagacatgaggcagaggacacagaggccctgccctgatggcactcacactgtaaacttgaggcartgaggacgcacagttaggagctgaagttgtaccacagaacacataaagggagagttagacacaagacgagggggctccaggtgagccagtgagagccgtggggccttctgtccctccagccagcagacgctgagtgactgcaggacccagccgattccaggttcccgagcaagctgccttctgtgcttgtgatttttatgttgtggggggattgatggtgccgcctcaggtggagatcagtgtgacggagtccacagggcaggatagaacactggatgtgtgcagtagggtcttaggccaagtccactttctctgatgggggagcatttcagcaaaggcccttctgggcatatgaaggtttcccagtcagttatcagggcaatgggaagccacagagctgggggtctgctggagagtgatcaggcttgagcgttaataaggtcatctggctgcactgtaggtgatggagccaggtaagaggccctgtagtctaggcaggaggtgtgggtagctctgaccagcagtggaaagagggcaargtggccagatttgagagatgctatttagggaggtggattggaagggctctcgtgggggtcatggggagggggccgtctaggtagctgtcctcagggtttatcatgggtaccacagagaagggaagacatttgggcagtcacttagcaaatttggggcatgccgagtgggggtgccatgtggcattcaaattgcagtttgtgcaggtaatcaaactaggggcttaggagaggcctggggaggagaaatggacctggaagttctccgccaggtggagtgactcagggtctcaggaagagcaggctggtgaggcagagccagggtgtggggcagagtgagtggaaggccgtgagaggcagggccagatggggctgggtggatcaaggaagaggagggtcaagggcgggctttcatttgagagggtgtagaaagcaaaagaatgtttttagaaagattcatgacagctgggccctttgacgtggtagttggaaggattgagtggagagagggaggtggagagtacagaagcagcaagggatgacagagggtgcgaggcagggcaggaggctcaggaaggcagggactgtgtgcatgggggccatgagccttgggtgggcggggatcccatgtacccaggtatgggcccagggtggacaggggccgtgcttacagggcgaggggccccaggtgagtggatactgcccgcaggggtgatgtgcccccggtgggctctgggcagtgtcccagtgctacccctcggccctgggaccttaggtgttcattaccatttagtcttgtttacagcctgggagtttctagtcargcacagctggtggggaggctccgtgcctcttctcctctgccacctccacccttgtgccctcctccacgctcccttctggatgcctcatgcacctgtatttcacgtgcaggacagggytccatggtctgtcagccaccacctactgagctgttcccacgaggcgcatgcctcccagccagtgggtcatcagcccatttcacgaatgggggcaggctcaggactgatgaactgcggcacagctcacccagccatgcgtggtgctccgccatgtggagaactatgttgcctcccctgcggaggccatcggtgagggggtgctgggccatgaggacttgggtgggctggggctgtgtgcagaatggcctcctgtttcttacacgccaaggcttcctccaggccctgagatttttcatgcagtgccttttactagtatgtaatcttccagtaaagaccactgttcagtcaaagaccagaatgcagggctcaaatactttcaggttccgccattgcagacgttagcccaggtaggactgtgcctttctgctgaagaagcaaagataggccaagccccagtccctcctccaggcttccccggcagctcagggtgcgggcaggtgccgggagggagaacctggttaattttaattggcttacatttttggcctctgtgatttccttgttggcctccttggrtgtgtgtttaattcaagtaagagttcattatcggagttcttttaattataaaataaagtgtgttcgtggtaaggaggtcacatcatagaaagctgtagggaagaaactggaagtgcctttcatctcctcccccacctaactccccagaattaatcacaaatacttttgtgtgtatattgttctggaaattgtaaatgtttaaacaaatctactaaggtatactcttctgaaattttcctttgaaaatttagtttataatttggatttatttcttgatgagcacatgctaaactcattccacccttttttgatgaaaattattacatgtttattaatatatcacattccctccctccctgtcccttttttcccccataaaacacaatactgcagtgaatttgtttgaatacatcccacagaatatatagctggcaatggcattgctgggtaaaagggagtgtgcatttaaagtttggataggtgttgtcaaattgtgttccctaaaagtgctttttttttttttttttttttttttttttttttgagatggagtctcactctgttgtccaagctggagtacagtggcgctttcttggctcaccacagcctccacctcccggtttcaagcaaactcgtgcttcagccccctgagtagctgggactataggcgcatgccaccatgcccagctaatttttgtatttttagtatagagagggtttcaccatgttagacaggccccctgagtagctgggactataggtgcatgccaccacgcccagctaatttttgtatttttagtagagacagggtttcaccatgttagacaggctgatttcaaactcctgacctcaggtgatctgcctgccttggcctcccaaagtactggtattacaggtgtgagccacggtgcccagccaaaaatgccttttaaaaggtgcatatgattttcagttccagcttcactgagtattagaatcttttaaagaacgtttcagggtgcccagaccctttgctcttgtaggattcacgcctgcagcctccaggcccagggatggggcaggtgtgctgtgcagttgctgtgggcctcactgtgtcatggtgcactccaccctcattgctgtagcctcgcttgttctttcttcagttgtacaagaggaagactgagactgctagtcagagggattggtattttcttctgttctgaatatagaatcttgggaggttttatggagagaaattaagggcatgtctgtcttttatctatgtttgtatgtaacatggtgtttaatgaatataacccatgtgctaggtgcttcacataaatggattctcataacactctgcgaggtatctgctcttttactgtgtgtgtgtggtgtgtgtgtgtgtgtgtgtcttactctgttaccgaggctggagtgcagtgttgcaattatagctcactgcagccttgatctcctggcctcaagcagttctcccacctcagcctcccaagtagctgggactacaggtacaagcatgtaccaccagctaattttttattctttaaatgttttgtagaaatggggtattgctctgttgcccgggctggtcttgagctcctggcctctagcagtcctcctgctttggcctcgcaaagtggtggcattagaggtgtgaggtacagtgcccagtctgttttccgtgttttgtaatttaataagatgtgagcctcaagaccattagtgagtggtaaagctgagatttgattctcatcctccaccacactaacggggatgtgccctagggcatgaaatgcttcattcctgtttgtttaaaaacgtgttttttttccttgtgttttcctatgtattttattttttttttacttttatttttatttttttgagacagagtcttgctcttttgctcacagcaacctttgcctcctgtgttcaagggattctcctacctcagcctcccgagtagctgggattacagtcacgtgccaccatgcctggctaatttttgtatttttagtagagatggggtttcaccatgttggtcaggctggtcttgaactcctgacctcaggtgatccatctgcctaggcctcccaaagtgctgggattacaggtgtgagccactgcacccaggtgtaatttggtatcatctttatacatcttcatgcctactcatatcttctttcatagattagaatgaatttgagaacagaggaaattttagacattatgctaatggcatgaggatcctaggcctagttagaagtcatctttgaaataacttcatagagccgtatttcatatttctcttctaagaattgtgaaagaacttaattttatttccccagagagagaactataaatcatacgtatatagtaacaaagacaaagaatrtttgtggaggattgaactcaatttagaactgatttacacatcagagcaagcctgctgaaagcataagatttttacgtggttttgccagacaggttgaagggactatattaaggataaatagttgagctgttttgtggtatttttatttcaaaatacccagaaatggaaagcagtacttttcttgtttgggtgtgattcatggactgtccagcagagggcactgccagtttgtgagtgagcatccttgctggcagctgagtgagcctgcgcctgcacttcccagaggaaatgggtctgagtgtgatgtggaaatagttacattttattttagaatgttgtcatgaaagttatcataggtgtcataatagcatttgtaaggtgtcacagaagatattgctgtttcctgctacctagatgtactgaacattttgcagttagctacttagcatggtttagctaattggggactgttactgacacrtggctggatccctactttgcctctcctccttgaatttgagttatataaaggaaatctcagtacttaggaatttaggggaaaatgtttaatttttgatgtgtaaccaagaagaaagcatggcagtttcttattggtggcttcatgacttactgtgaatttttaatttttctgaaatctcaggtatttctttccttgctgtgaatcctgggaaatgattgcatttgaagtggagaatcacacagcctcctttagtccactctccacaatgtccaaattatcttttggttattcttttgtctaccagactatcacagccattatattctgtggactgaattgtcagttttctccactgtaagaatggcgggtgcacagtccgtgtgtcttgtttatgtgtacacttgcagatacagagttgtttttgcctcagcttttcctatgtaaaagttttaagtactgtgtaaacatgcttgtatacctggcttttgaatatatttcacgcctgcaaacttaattatttgatgtgcatggaagttgtagaagagatcacttggtttttctcttaggttcacttctgtttttgtttctcttgctccttcaactcactgatgacaggtgctttccaaactgccggcctgatgcagaggkgctgattccccatttgctctgcccttctttagggctgctgtaccggcagtgcccactggggggcagcgtgattgcacaccagcctgcaagggtctccttggctttcttttcagttggcaggtgtggggggcatttttgagaacaaagcacattattactgaacgctgaaacccccagtgacaaagcattgtagtgaattcaaatgcacgatccgggaaattctcggagcctctgcgactggtctctccagcagggcctgatacacaggatcacttgtaattaaaactaacacttgtggatgggggtgagctctcacgttaatggacgtttctcattgtacaacattcaaaatatgtggcaggcctttgataaggagtcttttttctttcatcccttgaatagttatgaggtgtggaaataagaggagttagttgggaaaaagcttgcatgctggctttgtcgttgtttttgaaaagaatggaaaatacttgcaaataaaggcacatggattattttatccatcttgcacaaaactgggctcatagcacctgatggagtcctggctaacaggtttattttacttattgatttctggaaataaagcaggcactaaaccggaccacttaactatttaaatccttgcaatagggtataattgtactttcagatttgtttttatatcagttgtgcaacatgtctcaggcagtcatcttgattttaagttcctttcttttaagttcatgccttattctcaactttcttgctccgtaacagagctgtgaatggataagactcggtaggcatttgcctaaaaggttttgatgctaggaggaactgcacaattcctttgcccttcttggttttcctgtttcgtgcttattttttataagccgtgcattgctgtcgtgtgcagctgtgcaccctcctgctgcccgtcacggcatcgggtctttcctgtgggcctcctcgccctgccccaccttttytccaggcatgaatcctcccctagagcgcatgcagtcaaattaacgtggagacagagcccattatgaaggaaatcaatttattctaattgggtgacaacattaggcttgacgggaactagcacaccatcgtaagcatcatggttactttgactcttcgtgaggtgacttaggtgcagtgtgattttcgttttccatgcctccaccccgcagaagcacctgtgcggtaactgtctgggttcatgtgtcctgtgcttccaaagcctctcgccagcggcctttgtggtggggtggagggactggacagggggcacccagtgaattaacgccagagagtgtctggcctcagaagggccagcgagcaaaggggtgttagccccgagcccggatggaggaggcagcagtgtgggtttggatgacagagggaaagtagagatttgggaagaagagggtggaaacagggtgggtctccgtggattgcaggggagggtttgtctgcaggtgtacagggagtgctggccctgrtttggtttaaactgatgagggccctgggcacatgcaaatgcgtaaatctatccttcaggcaagggatgaraaaccgttgaagagttttggcttcttcttcttccttcttccttccgtcttccttccttcttccttcttccttccttccttcttccttcctttcttctttctttctttcttcttcttcttttttttttaatagaagaaaagttacttaagaaaagttatccttgcgtaaaaaaaaattctgtggagggaatatggggtgggaggtgtccaggctctgttctcattgacctgggattaaagacccagtctgcccacacactgtcagctttacaaccttaagtagttccagaaccttcccagactttgtctattaatctgggtaatatcaactcacacagcaaatgtgaggagaaagttctactgtatttatagaagtccagctcagttctgggacataccggtaggtgctcacttgttcttttctcttcctacatcatcctttaagattgaatgaatagcaaagaagaaaaactaaaacaagtatctcatcgagtgttttctacataccagttgaccaacctcaaggaatggaccatttagcagacttggttggtgtgttcagagtcataggcatataaatttgagtcgtactgggtgctgttctgagtgctttactatctcccttagttctgtagcaaccctgtcacattgagaccccttaccactaccgtcattgtcgtacccctgtggtccctcaggataggcaggaaagttaagaaactttcccatgtggggaaaaggagctgagccccaaatgcacactctctggctctagggcccaagccctcagccttatgcctggcatctctcgctcagacaggtaaccacaagctgacttattgcccaatactttctggctacccctatttgaaatcctatgcctttagcatttatctgcaaatagaatcagaagaccggcaacatggtgggctgagagcacccatggggagaagccttgaattcatccatggagcttgaacacgtcgctgcatttctccagttctcctcctcctttgaaaatgtcttaaatatgtatttttctataacctcatgttagaagtgaatctccggttttgagcagtgttttcagtggagccatcgtgatgccatctgggtgtgctctgaaacacagtgactatttggggacccagtgtaggccgccattcttcaggtggaygctagacatgaagcaccactgtgccctggactcctgcttcgcctgtggtgatgccatcatggctgtcccctcacctcattcatgttcagattccccctgtttgctttttgatgccttttgttcccagcactccagcttcaatcttaactagaaatcacccaacaaactgaaaaagctcccagttctggaaatggtactttgcagctttcattctgcccgtaatacatttgaaagcaccaagtttagggtctcagcaaaaagccaaagctgtctccatgtttcatttgaaggtacttttgttttcagttgtttctttgtgcatgtaagagcattttttgccctgtttttgtttctttccttcttattgaatggaacaattctttaaaaccttgtacctatcctgctttcagtttcttctgtttatttaaagcctgagtatttcttgtttagttataacagcagtagtacatgctaatgggaaagaaaatggagaagtgtgtaaactggaaaataaataaaaatgtcctgaataccacattccttccctcccctggagggaaaacattatcttttttttcccgcatccttccagaaattttctgcacatatatgagcattttaagcacacccacacgcacaaatggtttcccgctatacgtactgttctgccagtatatcttggataagtttccgcatcagcaaatgtagattgacttcatctgttaacagctccttagtaattaggggataatttctcacaactcccctattttttctgggtttccaaacaagccgccttggatctattcccagggttctccccaaatagtgctcttccagttctgcttcctttaggaaggagtttcatcttctagtgtcatctattcctgccattgtgtagcttcctgggtctgttactgattaccttttgaataagaaagggacaggtcagaggactcaggctggaactagacaggtcaatgtagttgagtatggaataggggttaaaatggacgctaatggccttctacttaaaactctcaaaactagagaaaggaaaagtgaagccacagtgaaatgtcacctccctcttgttagaatagctgttatccagaagaccccacaaaatgaccagtattgtgaggatktggagaaaaaggaaccctcatacactgttggtgggaatgtaaattaatacagacattatggaaaacagcatggaagttcttcaaaaacctaaaaatagaacttaccatatggtccagcaatcctacttctgggtgtttacctgaaagatttgaaatcaatatgtcgaagagatgtctccacacccgtgtttgttgcagcgccgttcactgtagctaagatacggcaccagcctacgttggacggatggataaatggtctgtatacacagtgcagtactagtcagtcataaaacaggaagaacttctgtcatctgtgacaacgtgtatggaactagagaacattgtgttaggtgaaataagccaaacacagaaagacaaatactgcctgttttcacggatacgcagaatctgaaaccattaaactcacagaagcaaagaggaatgggggttagaggttgggaggttagcggttgggaggggggttggggagatcgtaaccaaagggcacaaagcctgggttacataggaggcataggtttgatttatttcttattcttttttttggagctctgttacatggtgtagtgaatgtagctaataattgagttccgtacattttaatactgctgagartaaatttcatatgttctcatcataaaaaatgttgaatatttgaggggatggaaatgttagttaacttgatttattcattccacattgtattaaacaataacatcacttttgtacctcaatgataacttgtcaatatacaagagaaatttaagaaatctcaaatcttgagcctccaagtcaggcgagcccctgggggtgaaagccccgctctgttgtttggcctgcaggttggcctcccttcttagcctctgcgcagcctcctcggttcctccccgagccacctgtggccactggagctctgttaagccaacgggaagtaaagacactccaaccatgcattagaaaaatcacaatcggaatgataattgattccttctgtttgaatctattggagtgttacagatgctttgatgaaggtaagacttgctgggtttatcctctagagctgtacgctactaatgctttgtatttatgtataatcagtataataagcttttgactgcataagattcttattttcaaaatatacatttttagctaccccatttctaatttctctcaaaagcagcatttctgatttgtatctacctggtacagatgccagaggagctggtgttggcagtattatctgtgtttacctacatcgaactgttcataccttcttctgagatactgttcttctctggtctgtcttttgccagccccttaaaaccaaagttaattcctttgtcctacatgggactgatttgcttaggagaaaagtgatgccccactgtcccctggctaatggcgtgtgaaggttgtggtggcctccttagcgcagaggatggggctggattctgggagtacttcttaggattagggatgggggtgatctagggaatggaattgctgaagtcagcagggagtccactgctgaggtcctctttttgagacacggtcttgctttgtagcccaggctggagtgtagtggcgcaatctcggctcactgcaatctccgcctcttgggtccaagcaattctggtgcctcagcctctcaagtagctgggattacaggtgcctgccaccacacctggctaatttttgtatttttagtagagatggaatttcgccatgttggccaggctgatctcaaaagcctcccccttccaaagtgctgggattacaggcgtgagccactctgcctggcctcaggctaatatttctaattaaacatcaatacgagagacctaaaaatggacaactttgtcacttaaaaaacccaaaacatccacctattaagacctcagcggcggctggacatggtgctcacacctgtaatcccagtactttgggaggccaaggcaggtggatcacttgaggcgaggagtttgagaccagcttgggcaacatggtaagacctcgtttttacagaaaataaaaaatttaaccagatatagtggcatgtgcatatagtctcagctactcaggaggttggaggattgcttgagtgcaggaggttgaggctgtagtaagccaagattgtgccactgcacttcagcctgggtgacagaacattatatatttgcctgattatttcaagccaaaaaccagcctttgtgttatgaaattagagcaatttaggatttgttttctgcattttggcaattcctgtgatgctgtaggcatcagttacctgggcaggcagtaggtaaggaagtggggtcaggtcctttaccagcacttatagaaatgagaaacgaggctctcataccacctcttaatcactgccccctcctaagggtaagggctgatgacttggccttgagaatgtttttgctacacccaccccttctctctcatgttacttcaatcaatgtacttgccttgacgtcacggaccttttcgggccgtatgtgattgtgtttttgtaccacatttcgaggggaaaatgttggattgatggttgaagggcaggagaggaggggctgagtgggtacaccccgaaaggtaatcacatgggcattttgcctcagtgatcacttctgctaattatgatgacttgtggatttgggatactggaaaagaaaaatctaggctgggcacagtagctcatgcctgtaatcccaccactttgggagactgatgtaggcggatcacttggggcctggagtttgagagcagcctgggcaacatagcaagacccatctctacaaaaaaattaaacagttatccaggcgtggtggcatgcacctgtagccccagccacttgggaagctgaagtggcagggttgcatgagcccaggagtttgaggctgtagtgaaatatgattgcgccactgcactccagcctggagaccccttgtttcaataaataaataaataaataaataaataaataaataaatctgtttacagaaatcactatgtgtgtttgctcctcctagcacagccttggaggataagatgccaggtgcagtggctcatgcctgtaatcccagcactttgggaggccaaggtgggaggatcgcttgagctcaggagtttgagacaccaacatggtgaaacgctgactccacaaaaaatacaaaaattagccaggcatggtggcttgtgcatgtagtccccagttactccaggaggttgaggtgggaggatcacttgagcccaggaagcggaggttgcagtgagctgagattgtgccactgcactccagcctgtgtaatagaggaagaccctgtctccggaagaaaaaaaaaaaaaaaaagagagagagggaggataagggtggactaggatgctctggtcgggacttgtggccatagttggtcatgggtgtttggaggttgggaacctggatgtgaaaagctgcattyctgcaggaggagtctctgccacatctgggcagggtgttttgaccattgtttaaacttccttgaaatcaggcaaggcctggtcgtggatgcagaagggaatctgtttttccagttttggtgatcaagggtccagctccatgccgagtaagtgcaggcccacaaggagttgaaatgctttacgtttctaaactccaggagtaccattgctatgtcggtgattttagatcactttctccatttcctctctccctccctcttctagtttgataggccctaagtttaggcagcctgtgtaggggctacacgttttcatcagtaatacaggccrtgtttcgctgaccacagttggggacagctgcatgtattctttgtgtgttttgttttgttatacattagatacttagataaatatctacatatatgaaatatacttaatatctatgcatattctatctgtaatatttgcttattgaataaattaacactgtagaccactgacctacagaaaatgacagattatcccaaaaacagtcttaaaatctcctaataaaagctgcgggtcttgaatattttagtgtttattgttttaaataagtcactaaacaaagggttatgacaaccagatgaagtgttttatctcaaacattttagccactgggtggtctctttttaatgggtctcaaataatgcagtgcaatattaattttgatcartctgtgtacatacatatgaaacttgcaactgaggccctctttgtaggttttcgtctagcagattggaagtgatctttcttgagttttcatttagccacactctgagcagcaaaacctattcccaaatctggattcattgaccttaacgtgtgtatgtgtgtgtgtgtgcacatgcacacacatacacgtgtagattgaggaaatacccccctttgtgcctttggatcactacttttgtacatgcagagcgaaagacttccttttgtttcttgtcaagggctataaagagagatcacattagtataacctttgcctcctaaggtgtagatgagtgagttgtggttggaatttaattttaacaggttttattgaactgctaaaagatattgaaaatgtttaatatgagagtccggggcagtaaatcacacacaggcttgttaaaatagatgtccacagtgtatgggcagatggagcctgtgtttctgcccagggacctttcattaccgcaccaattgggtacattattctcacctcataactctgcaatattagatggctgatagagatcgtggtgaaggaagaatttaacacccctctttccccattttgggggagggcttaaagacctattcttttacccatttataggccatttggcttttcacagggattttaaaaaatcatatttgaaggatgtagggaattttcatgtcacctgcaacattggctggtgtcgtgaaccactcctctctgtaatgcgtggaatttttgtttgtttcttgttcgtcatttttctctccactttcttttttcatttttaaatttttggttgttttccagtttttcactgcctcactctctaaaattatattgctccaaacacaggtgtatctgcctctctgtccatcctggtcaggcccatcagtgctgcgcagtgtggctgtcaaagctttttgctttctggcctctgtctctcaggcgtgatgaagccactcactccagggcagggctgccttatctccccaacggctaaggccaagtgcagctctgttattggagcacagccacacccactcgtttctgtaccgactgcagctgcttctcactgggacagcattgagcattggcgattcttgggacagaggatatattgcctgcaaagcctaaaatccatactctgtggccctttacagaagcatgtgctgagccttcacctaaattgtagcaggaattcaataaatgttgactgaatggacgtattagagatttcccaatcaggttttacttaatatgtacacagagtcactggtccctggcatttgactacttgaatactctgtagtaaagacacagcagagtatgtgcttgagcttatttcttgtggatggatcatcccatcccgttattactaaatgaaaatcttgtctaagctcctgtgcagtatctctcaacaggaaaagggaataatttggggagagaagttgccagagtttggaaagtattcccacgtagcatgggtgaacatcctgcatttattgtgaattggttccttcatcatggctgtgcaaatcccaggagagtggggcagattagggcacaacgtgtaaactcagcacctcttctgcctgggctttagagcagaaagcagactctgtccaccaagagggcttgcagcaactttggactcttcatgaagctgatgaggcaacctgtgtgtacccacctctgcccatcatttcttcctggaatcagtaatcttcccacataacactttaaactatttcagtcagagggcttatgtatggtctgttagttttgwagggacgtcataacaaagtaccaagaactggatggcttgacacacagaaactcattgtctcacagttctggaggctggaattctggcatcaaggctttggcagggtcacacccccctccccaaaggctctagagaagaacctgctccatgcctgttcctggcttcggaagcccaggtgttcctggccttgcaggtgcatcagtccagccctgcaccttcacctggccttctccctgtgtgtctgcacagcatcttccctttgcgtcttgtctgcctctgtgttcacacttcccctttttataaggacgttagtcatctcggattagggctcaccctaatgacctcattttaacttaattaatccaataaagatccgatctccaagtaaggtcacattctgacatactggagtttaggacttcacatatttttttgtcgggagaggggaacacaattcagttcataatagatgggcagctgggcacggtggctcatgcctgtaatcccagcacttcgggaggtcatggcaggagaattgcttgagctcaggagttcaagcctgagcaacaaagtgagatcccatctctgtttaaaacaaaaattgaaaattatcttgttgtggtggcacatgcctgtggtcccagctacttgggaggctaaggcaggaggatcccctgagccaaggaggtcaaggctgcagggctgcagtgagctgtgtttgtgccactgcactctaacctcagtgatagaataagaccccatctccaaaaaaaaaaaaaagatgggtatctcagatcaatataattcaaaagaatatttggctttgaaagtggagtcttataaaaatatagccaggcgaagatgacgtgtcatcctctgagcctagaaagtctggaacacgatcgcctgggcttatgcatgtgcctaggtgtgggtcgtggtggttatgacatttcactttggatgtgcacattccatcactcatatctttggctgcagttagaaggaagggagtgttttttgaaagcttgccctgaaattatagtatgtgcaactgtgttagatttgagtgtcataaccatgttcttcttgtgtgttttgtcagttccttggctaattttcagatgtttgcatccaaatatgagttagggctctcaaagcagtcagcattttcttctttattttacattttagtcataacagatataatatatgccctgtgagtggtttcagagattatgtaatgccaaaatgtagagttatgagttaatcacagaataatgtccaattacattgtttgttctctttgtcttcctttccatcccttggcctccccaaaaagaaagtgaaaaagaacaagctgtattcccacacagagaggggatgagagtcagaaagaaagaaagagagagagagaaacagataagacacttcacacacagagaggaggggggagagagaaagtgtacacacacagggacagtgagtgacttgaaaagggctgctagtgtaccttccattccactccatgaacgcgtgagagaatgagcattaaatggaggtgtgagtctgctcttctcttggtcccaactcctggctgtccagggtcagcatcttgctgcattgaatgtaattccaatgtttacaggtcctcctttctttttggggaagagggagtggtcttttatgacccttgaacacaagccagctacttcatctttgaggggaccaaaacaatagcaatctgtttactactgggcagtttgaagatattttgagatagaatattgattaggcaaggtctcggcatctcttttgagttagacttaagaacctgtccccacattaagatgggrctctggtgaagttgacttgtttttgtttttgttttgaggtggagtttcgctcttattgctcagtctggagtgcaatggtgtgatctcggctcacctcaatctccgcttccccagttcaagctattctcctgcctcagcctcccaagtagctgggattacaggcatgcgccatcacgcctggctaatttttatttttagtagagacagggtttctccatgttagtcaggctggtctcaaactcccgacctcaggtgatccacctgcctcagcctcccaaagtgctgggattacaggcgtgagccaccgcgcctggccttgaagttgacttttcatcttactttgaatcccttcaattcctttgttttcaagtcgaaaaccctccactcaggcctcattaacaggaaatgaccgagcttgtacttttctagctacgttgtgtcaacttgagtgcatggactaaaaccacctgtgtgtggagtccccaagcccaccaccagcgcaggcacctgctgtgcttctgcacctggagatgggctttccctgagttgggtctcaccagcagcccagatttacaccaagaaatttgccaggttcatagttggtgctcagtaagtgtattgtttaagctcctttctgatttcacaaagtaattgctgccgactgtactcataggagttccaggagcctccatgagaactgtaaagtcttaacttgcttagaaagcacattttaaagcttttcctgctgcagtcagaacctgaaagaataggctgtggcctcagaatctacaggcacactcagtttttgactctgtcttatagatccttgacaacattggggactgttaacatggtttttatgcccccaaatcagttatatggaagaaggtccctgtggaagctgagcagttgagcttgtccagggctgagggctccgtgagaggtcacctttcttagctcttgtatgtctttgcagcccagggctcagagctgttgacatgtgcttgttgaggtctggtgacccatacccctggcctgagccctgagaagccggttccccagcagtgtgacctgggttgcatgggaggctttctcagagcttgtctggggccttgtcttgctgcagtgggacgtgggccctggaggacgcagccccgacagccctcacctggttgacatcagagcgggctgagcagctggcactgtggggtttcttggggatctgcgttgcagaggggcctgtgcagggcacagtgtcagcctcctgtcctctccaccatcatcctcctgtctgtagggaggcccagaggagccagttgaatgaaggcctgtcctcctcctggtggcttctgggctcagtgcctgacattgggtcttactggctacatcagccgctgagtgcaccaaggatctgtgacatctcagaggcctcacccgaccctgaagtgacacggctcactgtttctgctctgggtacatgaacagggactgtttattcygattctgtggctttgagcagaaatcgatttgtctgaaaagactgcccttagtcacaacagatccttttcgttgtggttttttttacctagttttctttcaataagttctttcctcacagctgtgggatgagggtcaaaacatcatgcttgataggtcaaagctgctgcttctattccaactgctaccttcccagcagaaagggccgtttaacttgttacacaccttttcctgcttagaacaaggtcacagatattagcgtgggagacgcatgcagtcatgaaacgcagttcttcactgaaggattctagagtctccttggcagataatgggaaacatcaacaaaaaaccatgtggaataggagccgtgtgcacacaatcacgtgttgttcctagagaccaggcagctggtgcctgggaccagcagagcaaggacagctgcatgcgcgctgacttttttttttttttttgagacggagtcttgctctgtggcccaggctggagtgcagtggtagatctcagctcactgcaacctctgcctcccagattcaagtgattctcctgcctcagcctcccaagtaggtgggactacaggtgcgcgccaccatgcttggctaattttttgtatttttagtagagtcagggtttcaccgtgttagccaggatggtttcgatctcctgacctcgtgatccgccccacttcgtcctcccaaagtgctgggattacaggcatgagcccctgcacctggccctgcactgacattgttaaacaggtctgtctggagtgggtggagctggggtttagggggttcaagagtggattggtttgttacttttgctgagatgtacctagttaaagctttttcaactcttcttggttaactataggaagtctctcttagtcttcctttcagtcacttgttttattaagacagtaaaacactctgatccagaggttttaaatagagatgctttgttttcaattaaagttgaagatttaagttatttaaaactgaacgtaattattgaagggaaggagagtttgagggcctattcaaagattcgtagaaaattcccattttggtgtagtagtaccattaaataatgcatatctaatgtgcataaatacttgtctgcagaaatcatgtctgctataaataggtgtcagacatggagaaatgcaggtccttcatgggtgggaacagccttcggtggtgttcctgggcttctcttgtatgtgttaatgacacagccgtgaaagtatcatttttcactttcgactgtcgaagcccagcttatattcccatatgcttttgtgtgtctttgtagagcactcttagggtggatttttgcaatttcatcacttttcttactctgccttcaggggccagaaacactgaagtttcacatgtgacctgtacactcttacagctcttatacatggctgaggggccaggagaggaaaacaccacagtccatttgtcaggaaaaaaagacayacatggggaaaaaggtcctgaaaagacccactttacactcttcatagtgattacttcaggaggattataagaaataatattaatatggaatatggcctgtgtactaaaaaaaaaaaaaaaaaagaaaaaaagaaaaccaactcaggcartgtaagtcattgaacagtttgattcctgtagacacctctattactgttcggccttagattttctcctaacaaaattatcttgttttcccaaaagcttcttgtttttgtgaagaaactgaaaaygactggctgaagtttgtccaagaaattcattcaaccgtaatttattcagtgtttccatgtagcctgatggggcctaactggaattgataatcttgcttacaaatacaaactcatttttatcactgaaatgactttctcccccaaccatcaaggagggaataacttctcttrtgacaaatatttttgaacctgtgcttttctaacaattgaaatggccagctttttagatgaaagttctaatgtattatttttagaaatttcagagaaggaaacaaataatttgcttatctgatgtccctttgtatgttaatttatggtatcttgaggctttgagttttaatttaaaccagcttcagtctgaaaattcagaattaatatttatatcaaatacatgcaaaatgtataaatctgaacaaattcgtttcttcagaataaatgatgatcttggacttatgttcctggaatgttttccaaattgagttttataattatctttttttctgcatatttctaatagatgtgtaatattgccctgtttaaggaattctattctttaacaaggaatgttgtcagatgtaatataagcttgatttaagtaaaataatgtaatcgatggcaggtataggaatggccacctttatgagtgctggttcttctactgaattttaagatatgtgaaaactaaataatgattaaataaatgattgatagtcacgtattgattgataactctttttcttcaacttacatggactgttacaacctctgagcaccatggtttgggaatttactttatcaaaatacattttatgtgaaataatgtttggatacacaatcttttttcagttttggtactatgaagttggtttaataagaaaagaatctgacatttaaaaaattgtaaaatctgcacatgatgtaattgcatttgtgtttattgaagtagtttgttataaaaacttgtagagaacaataacaatatccatgctcctttagaaagtgtagtgtgtaaataatcagtgtagtgatttttttaaaaggtgtcaaggtagcagtgctctttctttcagtttgtgcagtaaactgtggggtttgggttctgtcttaggggtttccaggcgtgttcttgaaatgctaggaatgtacaaatacgtcatgttccagtgttaaaagttggaaactaggccgggcgcggtggcttgcctgtacaaccggcaccttgggaggccgagcgtgggtggatcacttgaggtcaggagtttgagaccagcctggccaatgtggcaaaaccctgtctctactaaaaatacaaaaattagccgggcgtggtggcacatacctgtaatcccagctaatcagaaggctgaaacacgagagccacttaaacctgggaggtggagtttcagtgagcctgggtgacagagactcttccctcccctcaaagaaacccccaaaacaacaacaaaaaaaacccccaaaaaaacaaaaacaaaaaacaaacaacaaaaaaagtggaaactactgattctttcatgtgtcctgccagatgaaatctttttctgcgcaaaccttagactagagctggcatctcctgccatctctgttcaaaggtttctccaatgtactgttactggggaaggttgggttttcaccctggcccactctggtaaatgtgtaccatttttgtatgtggcaattgcacttgtacaccaggcttagttaagtgccagggaagttgtagatgcttcacttgtgtaataatgaaagaacacatgtagcaaaatgtggcaagatgtatttttttgtgcatatgtggtttttcttttttctttattggcctattctaaggaatgggtgcttgtttctcctgcagttttcataaaaaatgagagctggttcattgttagtgattcaactttttgactaagaaatttcccacttctttttcaagcttttgaatccgtttaattaaagagcatcctgaaattgcaaggtgagctttttatctatttatctgtgagaggtttaagctgatgctttgtaagtagaacagaaatgcagaaacaaattggatttcaaggttgatgtaatgctccatcccaatttccagttactgttttgttcatcaaacagcctcgtcgtttcctttgattgtctttttaataagaaatgggcatgcattccaaattaaaagataaatttatgctaatgttgacttcagctcttttatgtattaaggttttgtgaaatgttttgtttgcaaaatgggtcctcctgtttcagatgggggaatgaggaagagagacacttcctacatcacaaaaaacctcttggtttccaggaatggtgaatttggaccttataaatgggatctgggatcacaaatgggcgtgggtttcactgctttggctaccagtggaggagtaggagtcatatcttggttgtcagggaggtgggtgatgtcttctgaataaattggtggcatttgggagcaagaacacagaataaccaaggggaggtgagattataccacatgccagtggttgatgatctgggcatatatggcatgggtgattatttgaacaatatctatattttatgcttatttttaactccatgagagtggggtctctgaggaggaggtggtggtggtgtgtgtgttctttatatcccaggtgcctggcctcaaggtatttgttgagtgaatgcatgaagggatgaaccttcataagggttcattctgctattatattatgcagaaacagagagaggtaagcttattttatacaatatcagggagaaggctggagagccagtgtcaggaacagtttcctgaagtcagagctctcaaacattgaggttggctgcctgtggaggaagggagttcaggtaaagggtgagcagtagaaatattgtagaggacattcaaagatttttaactggtagttaaaccagatgatcctaaaatgctatttatattctgagactccattaaatatttgagcacctactgtttccataacaatgtgagcatcacagcagacagattcagcagtgtgagaaacgagatgactacccatgctggagtattccaatctcatggtggtggtggtaaaataaaaattaaaaaagaaaaaagttggcaaataacattataattctatacaataaaatgcaggatatttaagctatttattcattcaataaatatttgaatgccaataaacttcataagtgtcagcatcaccattgtagttgaagagagaacaacacaattttttaggagaaggtggagttgagctacaccgtaaagactttatgggactgtgggccgggcatgatggctcacatctgtaatcccagcactttgggaggctgaggcggacagatcacttgaggtcagcagttcgagaccagcctggccaacacgtgaaaccccgtctctaccaaaaatacaaaatttagccaggcgtggtggtgcatgcctgtaatttcagctacttgggaaggtgaggcacaagaattgcttgaacccaggaggtggaagttgcagtgagccaagatcatgccactgtactccagcctgggtgacagactgagactctgtctcaaaaaaaaaaagaaaaaaaaaaaaggctttatgggactatattggtgaactctagagcatccagtgaggggctgtgggatgagtgaaagctaatttctaagaatcacgaggtgtgctctgaggacaaagaggaaaccttagggaagtggcaccaagtgaaaccagaaaggagactgggatcatattgtggttgaccttaaatattaccttagtgttgaggagtcacctgtgtaactgaggagagaggaggaggtgtgcatgactccagcaggttggaaaaagccagtgcctctgccagacaggaatgtggaacgggtggaaagtggtgtgatcttagatgtgtagagtgtgatattttggaaatcctattggaaacagtcagtcaggaaggatgtcctagctaagaagacatttgaagttttgaaagtggctcatctatttcctgattgatacataccattarttcagtttgggtctattattttttgggtccagttttttttttaaaatgaattgataggcatgtttaccagagtgctattactttgtttttggagatgtcactttctcatttttacctgaattgtgacttactttgccactgttgtggaagcgttcttacattctgacttcacagtacaagatgtcacttgatgtcaccaagagttaagaaaagctattttaagtatgctggaaraggaatctatttcagtgtttgcgggagtcactattttgaagcaaactaagaatttctaaggagcttggagacttgcacatcttctgatattgggaggtcttaggttaaaagacttttttatttggattcattaattgagtgtaggtcattgttaatggaaaatcgttgaacacttaataaatacagctatgtttaaagttcttaaaaatttaaatacagattaggaagcccaaatttcagaggaactggtagaggatttgtgctttgtttttaatgttttaaacagccctgtggttatagtttagaaaggtcatagttttgacggtcctctattaaaagaaagtgatttttccatcagaatacagttgagtgccacagtgtatagagaagccatagctaatactttaaaatgttttacttttaaaatttcaaaacaaactgtaggttttaaaagttttctctctcacagttttaacccaatctgagaaataaaaaagtaaaaaaaaataaatgtataattttgatctctctaggctgagcccctagagtgtagccctttattccttgaaggaggcatccctttagtgagtttaaatttatgaagccagtcccatgaaggctgcctactcatgtctcccttgccttcagtctgtgtgtgctttgcttttaatttgagaaataatcacttggttgtggtcttgtggaccaaatactgtgttatctatagacaaattgaaatgtactttaaacattattttattatttttgacaaaaattatacatatttatggcatacggtgtgatatttaagtgatgtgtaatggtcaaattagggtaagtagtatatcagtcacttcaaacatttttcatttctttgtattgggaacattaaaaattttctcttccagccatttgaaaatacacaatacattagtatttgttttcaccctacagggccttagaccactagaacttaattcttcctatctagctgtaattttgtgtctgttaaccaatctcttcctaccttccccttcccagtctctggtaagcactggcttactctctacttctatgagatcaactttttatttttatttatttatttwttttttgagacagagtcttgctctgtcgcccaggctggagtgtaatggtgcgtgatctcggctcactgcagcctccacctcccgtgttcaagtgattctcctccctcagcctcctgagtagctgggattacaggtgtctgccaccatgcctggctaatttttttgtatttttagtaaagatggggttcaccttgttggccaggctggttttgaactcctgacctcaagagatccccgccttggcctcctaaagtgctacgattacatgtgtgagccaccgcccccggccaagatcaactttttaatttagttatttttttttttttttttttgagacaggtgctctgttgcccaagctggagtgcagtggtgtgatcttggttcattgcagcctccacctcccatgctcatatgtttcttccacctcagtgtcctgagtagctgagaccatagacccatgccaccatacctggcttttgtttttttggtagagatggttctccctgtgttgcccaggttggtcccaaactcctgggctgaagcagtcctccttccttggtctcccaaaaagtgctgggattacaggcatgagccaccacagccagccagatcaacttttttagcttccatgtacaagtgagaacatgctgtatttatctttctgtacctaacttatttcacttcacataacgtcctccagggtcattcatgttgcctgaatagtattcaattgtgtgtatagaccacgttttctttacctgttcatcagttgctggacacttagattgattccaatattttgtctattgtgaataaggccgcagtgaacatgggaacgcagatatttcgttgatgtgctgatttcttttccattgggtgtatatgcagcagtggggttgctggatgtatgattgttctgctttttttaatttttttttaattttttttgagagagtctcaccctgtcacccaggctggagtgcagtagcacgatcttagctcactgcaaagtccacctcctgggttcaaacaattcttgtgcctcagcctcccaagtagctgggagtacaggtatgtgctaccatacctggctaatttttgtatttttagtagagacaggtttaccatgttggccaggctggtctcgaactcctggcctcaggtgatccacccgcctctgcctcctaaagtgctagaattacaggctttttattttttgaagaaacttcattctgttttctataattgctgtactaatttgcattcccaccaggggtgcacaagaagagttctcctttctccacatcctcaccagcatctgttattttttgtctttttggtaacagctattctaactggggtgagatgacatcacagtgtggttttgatttgcgtttttcttatgaataatgatgttgaacatattttcatatgtttcttggccatttgtatgtcttctyttgagaactctctatttagatcattttctcatttttaaattggattatttggtttttgtctgttgcgtttcttatatatcgtatattttactcccttggtggatgaatagtttgcacatattttctcccattctgtagttgtcgcttcacttttttcattgcttctgttgctgtgcagaagcttttagtctgatataattttatttgtctatttttgcttttgttgcatgagttctyagccataaaatctttgcccagaccaatgtcgggaagcctttttcctgtgtttgtttgtagtagtttcagagttttggccttacatttaagtctttaatccattagagatgatttttatatatggagagacataggggtctacttccactctgctgcccatggttacactgtttcctcagtggtgtttgttgaagagactgtatgtatgttctttttgcctttgttgaaaatcagttggctacatgtatgtggatttatttctgttcttttggtccatgtgtctgtttttatgtcactcccatgctgatgctgttttggttactgtagctttgttttttgtttctgtttttgtttttttgtttgtttttgtttttagtagacggagcctcactctgccacccaggctgcccaggctggagtgaagtggcgccatctcggctcactgcaatttccgcctcccaggttcaggccattctcctgcctcagcctcccaagtagctgggactacaggcacccgccacaacgcctggctaagttttttttgtatttttagtagagacgtggtttcactgtgttagccaggatggtcttgatctcctgaccttgtgatccacccgtcttggcctcccgaagtgctgggattacaggcatgagccaccgtgcccggcctgctttgcgttttttaaagtcaggtagtgggatgcctctagcttcgtttattttgtttagtgtcactttggctatttgaggtcttttgtggtttcatataaattttaggattttttttccatttctgtgaagaatgtccttggtgtctagataaggatgcattcgatctgtagatcactttgggcaataggaaatgtacttaatttttatttagaaagttaagcaaaaatatcaaccagtattaaaaatgttttaaatatgtgttagacatttagacatctttaaaatsttttaaatatatgtagacatttatatttaaaacatttaaaaatacatgtctatgtttagttatgtttatgcctgcatgatttaaagaaagaaatgatctgggtccaatgagataacttgttaataaactgtttatcattcataatcagccttgttaccctagaataggacacttattttaatgtctgacttggtttcttttaaatttatggcttttatttctttttttcccttaatcttctgactactcattgttagagaacttcttgatattttcaattagtttccagagcttctgctctggttagctgtttttttagcgccaactctgaaataatttcccaggttcctggtccttcctctgagagatttagtccttcatcccatgtagcggagcaaaaggagagaggtcattggcctcacattacttttctatgttggttgacttaatattattacttttcccaagaaggaatacatttttacagtaggaaaactttttttttcttttcttgaatttagctgtttgcctttgaaagctagatcaagcatacaaacacatgtatgtatgagtatacatgttctcatgtttccctgtttataaacttttcctataaggatagcctaggtagtacattcttaatgtttgctatagttttatatcttgaataagttagttcaggaaaagatttgctgacaatagatgataaattcrtagcttgtgatgcaacatcattttaaaaagcaagtttaaaaattaaagttattagaaaaagatgcaaaatggtttctccacattcaccctagttggtttctcccataaactgagaatcttggaagctgatctccggagaatgtggacgagaaaactatgttttaaaccttttttttattctacaggaaatgaatttgtttgccctttttcctgtggtgccattgtgtctgaattttctttctgttcttataataggcagaatgaataagaaagccacacatttgcgaatcctctggatgctgtgtggggctatgctgtgaggttgaataattatgattaattgtaagctggaccatgtgcatttcagagagtgggtagtaattaagtaagagttaatgattttaccattgggctactggtatgtatttatgatacatagctctattattcctacaagatatacttcgtaattgcacagatgttgttgarctccaatttcaagccataaaagtgttttggggctgctttctttttatatatctttgtaattcactagcaagccctaagaaaggtgatactaaaagctgaatcaaaaagaaagcaggtggtcagtgtgtgtgtatgtgcacacaggttaatcaggaggggaatttgcttttttgatttgttgttcactttgctatgttttaaatgtatttttataaaagtgcaaagatacacttattttaatgctttaaaataacttgaaatgattgagcaatcgtaggctagttctgagcatgcctttaaattcaggaaaaaagggttactttgtatgttggactttaggtagaaatatttattaatatttgtactgtttgtagctttggttgatttatggtcacctatgtaggtttaggttttgtacactgtggataattatatatgttaactttttaaaagattaatttttattgaagatacagagaaacartaactagcattatttatttgattggctgttcaacttactttatcacctcttcagctgttttccagtccacaattgctcaattatttcacaggcaagtaagttataccttcatattttcccaaaatgagaataatgatatccatcttgcagcattgctatgatgactagcaacagtggtttttattcattgtgtctggtactatataccagcattaagaagctttctgcagccattagctcataaaacctcactatagccctctagggtaagaattgttgccccagttttccagataaggaaattaatcatcaaggttcacatggctttgccaaagttgggtgaaattcctaaggagctgagctaggactgtgcatgtagagcaccagacattgtgcctctcacacgattgtcatcttacacgtccatatcgatcctttggaaaaagtaggtaaagagctactttttattttttctttttcctaagtgttttttaaccttccgttgtattaggctttaaaaacaaaatggttgtcctcttcctaaagaataatttctctctgatagggaaaatgtgtgtatatttcaatattttggtggtatatttggaataggatttgttaaaattgtttttaattattattatttttcatattaaacacagctttcaaacacttaggcataaacatacaattaaatacacacatttctagcctatggttatgtttctgtataggttatatactgcatgaacagatgcatactacatttcagtgtctttattagaaatgtatcacagctgggcacggtggctcacgcctgtaatccgagcactttgggaggccgaggcgggcggatcacgaggtgaggggatcgagaccatcctggctaacacggtgaaaccccgtctctactaaaaatacaaaaaatcagctgggcgtggtggcgggtgcctgtagtcccagctactcggggcgggggggtagggggggcgctgaggcaggggaatggtgtgaacctgggaggcggagcttgcagtgaaccgagattgcgccactgcactccagcctgggcgacagagcaagactccgcctcaaaaaaaaaaaaaaaaaaaagaaagaaatgtatcacatttatttcccatcttcatgtacgtggatgaaaataaattcagcagtttttagctctctcccgtccccatttcattatggaaaattgcgtacggggccttaggagtcaacaggatttttgtggttggttcaagatccagattttttcctagacagcctataattgtattccgatttgccttatgagaagtctagaaggaagggattctaaaatagtattaatcttgtgatttgtcaagttaatttttctggtcatatttgaaattaaatttaaaaggcatcagaaaatcccgaaattactcctgcatgtgtcttttccttgccttccttggtgtatgctctgcgttccttttgatggtttggttttgatctgttctgccttccagttcggatagtacatggttaggtaatgcctaaccaagggttagtaaactaagtcagctaaaatgtttctaaaatgtcatactaaaggtacaaagttgtgatggaaaacatttatttatatgtatgttaccttatgttgtagaagtagctagtaaacagagaatacctttgaaagctataattaattttaccagccatcacagttttcctttatccgagcactgaagcattaatacatgtaagaataaactggcccttattctgcctcactcaaggtgcatgattttcatctatttttgggactgagtttggaatgcatcgttaacatagaccggtttcaactctgctaaactgttcaaagactagaatattttcagcaactaggtattttttaaaaaggaaaagaaagcaacttactttttctgtcattgcatgaatgtatttccctgggagctgcttactttctaaaatcattaagagctgaaaatttcaaactcccccccacctctccccatcaccacacaccaccctttacagacataaatargtcttgtatattttcagtaatcaaaagctgtgggtacttctaattgttctattgcatatcaaactttataaaacttagagtatacctactagttaatcatacatacacaatgtttagcagtttaattttgctcagaaacaataaagattataaactgaaataaaacaaaatgctgtcagcaaccacattatatatatatttcaaaaaaggaaactcctaatctgtctagcgtattctaggaactccatatttcacccacgatcatactggctcctgagaattttcctcacactgattcttggttacaggcatgcttatttttccttctttgattaactcaggtccacacgtaaccctttttgggttactgggtcatcttcctaactgctctaagcctagatttctgtttaatattagagtattctgttcccataatgtccgaccaattcttgatgagtactggcatttttaaattttttaaacagtgacagaatgtagtgacagtttttctttgtatgtatcagagcatttcttatgataatagctgtatcggtggcctcctaatcaagagcattcagcaactttcacgttccctggatggtttgctaggtacctggattattgattggaacttcaggagagtttaatgactctcatccttcttgccacatgccctagccgatatatttaatattacttccagtcgttgccaatagaatgcactttaaatagtgtaggaatatactaccagagattagagtagatgtggatgaatctatcatgaataaccagagcttcaataaaaggcccctttggtataaaattctgaactttgaaacagttggcctccgcctaagttttggtatattkccactagctagaaatttcactactcttaataaaaataattctgcagaaggtttcccagcctttctgacggtaatgtcaaatgatttttctcgtctcatagtttattgcctagcactttgtaacaktctgctaatttctgctggttttaaaaacacgatcaagagagtgaagtaagaggctgggcgcactttgggaggttgaagtgggagaattgcttgaggccaggagtttgagaccagcctgcacaacaggttttttgttttgtctcgacaaaacaaaagataaaaataacaggacatggtggctagatagccctagctactatggaggctgagacgggaggatcactggagtccaggagttcaggaatrcagcgagctatgattgtgcccctgcactccagtctgggtgacaaagggagaccttgtctctaaacaaacaaaaagagggaagtaagtactcaagacctcgatctcttcttacgctccttaaccaactggctctgtatctcaggagtgtggtatacttctaagagcaggtttcagtatccacacagtcttgacagtattgagattggtggtgtttgccttgcattgtttgaaatttccatttttacaaaacctgccctacagactttctcatgctaaattattggagcttatatttatctactggtrataattttggcctgcttttgacagaggaatcttattttaatgttgtgtgaatattaattaattttagactcataattaattgacaaaaataactgagttgaaaatgtacctggggattctaaattttaaatagaattgttagttttaaagatgtctatgccattgctttagaggaaatactgacttgagtccaaaattagtcgaattatgaatgacttattcattcctggaatcttaggattgtaaagattttttaaatgttctgggccttttgatgcatctgttaacaggggttatctagtcagttgagagaaaatctgaagatgcccaaggtcctcatattggttggtgcagtatttgcgtatcacctatttctactctcctgtagactgtagatgatctctagattacttgtaatacctaatacaatataaatgctatgtaaattgttgctataccctgttagttttaaaaatttgtaggctgggtgcggtggctcatgcctgtaatcctagcactttgggaggccaaggcgggtggatcacctgaggtcaggagttcgagaccagcttggccaacatggagaaagcccatctctactaaaaatacaaaattaggcgagcgtggtggcaggcacctgtaatcccagctactcgggaggctgaagcaggagaactgcttgaacctgggaggtggaggttgcagtgagccaagatcgggccattgcactccagcctgggtgacagagtgagattccgtctcaaaaaaaaaaaaaaaaaagtattcttttttactgtattcttttgttctgaatattttcaatctgagattggttgaattcatagatgcagaatgcatggatacagagagctgattgtggtggtgcctaagaactagatggctctaggaaggttttttgtcctttttaaatatatgtaatggagaatacaatgatttccatctttcccaacgtttgtattatctcttacgctatatacgttgtcaagaatctatgggtgcgggtagtaattgtggaagagcgaggcagaaatcatggagaaacggttgtgggtggctgtcagtctattttaattctagtatgttttaccagcatggaattcagaagaactgaaatcccctgctctgatggctgcagcatcctgtgctgggaccgtgcagcattgagaggcttgacacatgtcagtatgtggaagagtttggagagcagccagcaagaggagtgagcccctaagaacaaacaagactcttcctcaggattactcagggctggctgcatgatttgcaggacacagtgcagaatgaaagtgcagggcactttgttcaaaaattaagaatttcaagacattgacaacagagcttcaaaataaataaataaatacataaatgggagatctgtgctgatgccagggtgggtggtatccacaaagcctgctctgatctgatgttaggtgaaaraaaagcacctaaatgtttctcrcaaagctttggttcttaattctaatatgagacaacagaatggcgtgggagttgacttagccctaaacattctagatctttaaagttttcgttggtccttccacagactgcagactgagctcacaggagtgtgtccatgatgcaaacagaagtatcttataggtgccaaaggatggacttaccttttcctgccttttaccaacatatttgcaacagaaaaaggatcatgtgaacagatatcacctagggtagctgtcatttggaatttgtgtaattattagaatttgtacaaaacacagaatatcccttttttwaaatccattcattctacatttgcactcttttccctcccactatcccaggaagttacttaattattcagtggctcttctagctgttatgcattaagaattcctattgttggcacaaaatccatcatttaagcctcatcttgaggaggttgtcatcttcttatttctgatatgtctgtgaaatactgcattttttagcatatttgtgtgtaccctggagggttgtttgcaaatacatattgcctgtgttgtgcatttatctgtaaaatgccggaatttcttacacttttaatgggtcttgagtaatgactttgtgggtgggatagggtgaagctctgtcagtttcgaaatctgtaaggtgaagaaaacttggtactagttttccaggaacttagatgggcccccaaagattaagatttgtgctgaaacacatttctcaacgtggcctctcatcttatgcatctatctacaaatctggacagctacttacatgctcatgctccagctgtgtttggctgtctttttttttttttttttttttaagacagagtctctctctgtcaccaggctggagtgcagtggtgtgatctcggctcactacagcctccacctcctgggttcaagcgattctcctgcctcagcttcctgagtagctgggactacaggcgtgcaccaccatgcccagctaatttttgtatttttagtagagatggggtttcacaatgttggcaggatggtctcgatctcttgaccttgtgatctgcccgccttggcctcccaaagtgctgggattacaggcgtgagccaccatgcccagccagagctgtcttattgatagacagactttttttttttttttttttttttgaagacacgggggtctcactatgttgcccaggctggtcttgaactcctggcctcaagtgatcctcctgcctcagcctcccaaaaggctggaattatargcatgagccactatgccaggctgatgctccaacttttataaaaatgtagcttctttattttccaagtcccagaaaaaaccaaccaaccaaaagaaatctttgaaaatcatgctccacagcatgcagatttgaggaggggractggatccggcaggcatgatttttccacttgcctccagcctcatctttctcctcctctgggtgactctgcctgagtttgtggtgcctatactgcctttctctgcacccggagcacgtgactgtacacacctgcacacatctgtagacatacgctgttttagtcagggttctattaaagggacagaactacacacacacacacacacacacacacacacacacacacacacacacacatttccctttatatatgtatagtaatatagatatatgtagttctgtatatatataaagaactaataggatatatctatataaaggggagtttttcctcatatatatatatagaagatatatatatataggagatatagatataggagatatatatatataggagatatagatataggagatatagatataggagatatatatatataggagatatatatatataggagatatatatataggagatatatatataggagatatatatataggagatatatatataggagatatatatataggagatatatatatataggagatatatatatataggagatatatatataggagatatatatataggagatatatatataggagatatatatatatataggagatatatatatatataggagatatatatataggagatatatatatataggagatatatatatataggagatatatatatataggagatatatatataggagatatatatatataggagatatatatatataggagatatatatataggagatatatatatataggagatatatataggagatatatatatatataggagatatatatatatatatataggagatatatataggagatatatatatatatttaagagtatttttggcagggcacagtggctcacgcctgtaatcccagcactttgggaggccgaggtgggcggatcatgaggtcaggagatcgagaccatcctggctaacatgatgaaaccccgtgtctactaaaagtacaaaaaattagccaggcgtggtggtaggcgccctgtagtcccagctactcgggaggctgaggcaggagaatggcgtgaaccccggaggtggagcttgcagtgagctgagattgcaccactgcactccagcctgggtgacagagccagactccgtctcaaaaaaaaaaaaaaaaaaaaaaaaaaaatttcattttggggctgtttcagatcagtggcatacctagtgtagttgacatccggcatggattatttttacaccaccctagtgtacaacaaaattattttcattaataattagagcaggaaacatrtaataataatcaccagaagagaaactcagtgaaagttttcccttagtgaatctacaatttttaattctatcagttaaaaataaatattactgtacaaagaaggaaaaaagaaatggactaataggttttagtaacattgagattttttttgaaaagtgaaaaatgtaaacttatatattgatctgtccagtaatgagtaatagcattgcagtttctcttttgagtcttctgcaaatttatcagtgactttgtcagaatttatctctgccgtatattcgcattcagtagacggtatagcgagatttgtcaatatctttgttgcttatagttcaataaagtacacttttattttttataattttaatcttgaaaatatatatgtaatatagaactaataggatctctatatattttatatatcatatacatctttatgtatcatatatatctttatatatattttatatatctttatatatatataaataaaggagagtttattaaatattaacttacacgatcacaaagtcccataataggccatctgcaagctgaggagcaaggagagccagagtcccaaaacggaagatcttggagtctgatatttgaggggaggaagcatccagcatgggagaaagatgtgggctgggaggctaggcctgtctctccttttcatgtttttctgcctgctttaaatttgttggaagctgactacatttcgcccaccatattaagagtggatctgccttccccagctcagagtcaaatgtttatctcttttggcaacacccacacagacacacccagggttcatacttcgcatccctcaatccaatcaagttgacacttggtattaaccatctcatacccagtttccttctcctccgaaaactgggaagactaacaagaaattagttgtacttgttgactgatgggttgcagtttgtttcactcggacatttgcccttgcttttggtccctgttttgtggcctgaggggatttactcacttcttaagaggattttaaggtagcaggttttggggggaaaactggatggtttttaaatttcttgttcctggacgcacctgggactgaagacacctttgaccgtcaccgccttactccaggatctggttatggagggattggctgcgtgtcggacagttttctctgtgtactgtgcccttggttgctgtctgtcattgagctcagggcagtggcctaaaccaacttactgcctgcccatctttttctttttgctgtgagtaccacatgcaaatttaatgttttctggtacagtttttctgttttcattctgtgctcattttctgcctcctctgatccttctactccctgtctaatatgttgggatgaatattatggcctcacgtactattacttgcctctggttmtaaagatcatggcaaagaartgagtcgtttggagttcctaatcaaggttctagtctgcatattgaactctgattgacttggaaacccctttgcccaaacaaaagatgaaatgttccatcctgaattcagcatctcttgttcaatgtgttccgtgactgtttgtcttcctcttcacattattttggaacaaattaggcagaagagacaatctttgcagattgaatttaggcaagttaataatgtcattgggcaaagaacattaacccctggggctcttggaatgtatcaagtcttctgtgccaagggcagatgccatcagggacagagatgagctcttaagggacacaaggacacaacttaacaccagagctgcggagcaccaggcaggtggttctgatttaaacttgcagcccaccaaggcactattgcttcattctgggacattttgacaacctgtcagccaggggtaattttctaagcaccacatttatttttctggtatactccctcatgtctgttaattttgacagctgtccactgctccaggacttgactgtactttcttctttcccttaatcgctctctaccaaactatcactccaaaggatagaacataattacattttgaaatttcaaaaccacagcactattatgtgtcaactattgttaactatctataataacttttaagtactaatgatgttacatacacatttgacattttttggacctcagttttgctttctgttaattgtgtgcctacgtgggcagtagaggcctttaaaaaaaattcaagaggatatatagtgaaggcttgagaagtttttacatgtctatgaacctatgtaactttcacgcacatgaagatacagaacactttctgtatccagaaggctcgcctgtggccttcccagtcaatatcctgcccgatgttcacaccatagattatacatatgyacattatacattctctcattgctggctgcttttctcatattacatctgtgagattcatctgtgttgttgagtgtaacagtagtccatcttgtgcagtattttgtcgtatgatttttccacaattttcttttttactccattctagtgctgatggacatttaagagtattttcattttggggctgtttcttatcagtggcatacctagtgtagttgacatccagcatggattatttttacaccaccctagtatacaacaaattttgtattttcattcataattagagcaggaaacatataataataatcaccagaagagaaattcagtgaaagttttccattagtggatctacaatatttaattctatcagttaaaaataaatattaagaaggaaaaaaagaaatggactaatagtttttagtaacattgaaattttttttgaaaagtgaaaagtgtaaacatatattgatctgtccagtaatgaataacagcgttgcagtttctcttttgagtcttctgcaaatttatcagcgactttctcagaatttatctctgccatatattcgtgttcagtaagacagtagagtgagatttgtcaatatctttgttgcttatagttcgacaaagtacacttcttttttttataattttaatcttgaaaaatttctttcacataaaggaacaatctctatacaagtaattaggaaacgtcttacagataaaagataattttgcctgagtttcataaacatctcatttcacagtaaattccaggaattgcarttttttcccgcttctggggattaaactagtgagtttcaaatgatgtctccatagctgaaaattttaagcacacataaaaagtccaagggcccatgtagaatgacagaatggaaataagttgtatttctttatcattgcaataaactttgctatcattttttaatgatatttaatgaatttcaaatgtagtskgaaactgaaggattccatagtgccacagggattggagaaacaagctgtgcttagggcaagcttgaatggttctcaactcttaggagcttacctgaaatgaatctgtgactcgatacctgtggggtgggccgctctataatgagttttctgaattaacttccatgtgaaaaataatgttcactaaagcataaataactagttacatttgtgtcatgtaacctaatatgctaatttgaattttatttacttatttattcatgaatgaatgaacgacgggttctcactttgtcatccaaggtagagtgcagtggcgcacttatagctcactgcagccttgaactcctggactcaagatcctcctgccttagccttttgagtagctgggaccacaggcccctgccactatacttggtgctaatttttgcttttttttttttttttctttgtagagataagagtcttgctgtgttgcccaggctggtctcaaactcctggccctcaggcgtgatccttctcctgcctttgcctcccaaagcattaggattacaagggtgagccgctgtgcctggccttgaattttaaattgaaattaaaatttaggcttggcacaatggctcacgcctgtaatgcgtgcactttgggagaccgatgcaggaggattgcttgagttcaggagtttgagactagcctgggcaacaatagtgagaccccatttctacaaaaaaaaaaaaaaaaaaaaaaaaaaaattaaaaaaatgggcgggcatggtggcacgtgcttgtggtctcagctgcttgggaggctgaggtgggaattatcacttgagcttgagaggtcaagcctgcagtaagccgtgatggtgccactgcactccagcctgagcaacagagcaagaatctgtctcaaaatattaaaacaaaaacaaaacttgatggtagccctaccaagtatttagaacttacatgaataaaatgatactgtttggggaggagtctttcatctgtgacattgtttgaaattgctagtatgtggtgatcataaaaacaagactaattttcagactaattgttttcagattttcagtctgttccttagtgcctgtatctgggtcagtcagtccccttacctccctttccttggcttaaggtcctgctctgaacatgtccctttcaatattcatgtacagatattctggtggacacatggatgctgttttttcacatcctccctaacactggatattactgattttttttttcatttcagacattctgcatgtgttccataaataacaacaatattcctcttcctttccaatctttataccttttattttaattaattaatggatttatttatttttgagaccggggtctcgctctgtcgcccaggctggagtgcagtggtacaatcttggctcactgcaaccaccatctcccagactcaggcgatccttcaccttaacctcctgagtagctaggactaccggctggtgacaccacgtttggttaattttttttttttttttgkatttttgatagagacagagttttaccatgttgcccaggctggtctcgaactcctgagctcaagccatccacctgcctcggcctcccaaagtgctgggattatagccatgagccactgagcctggcccttttatttcttttttatttcttgttccgctgggtaggatctcatcacagtgtcaaatatggtgacagtagcatgtctctctttgtcttgttcatgagcctagaggaaaggttccagtttgacaaatgtaggcttctttgtagataccatttatcagattaaagaagttccaagaaggccttttattaaaaggaaaatttagttatgccatagtaaatttaaaacatggctttaatatgatttcatgaacatgttgtagtggaaagaaagggcattgctgtcttgtagacctcaggttgaatgtgggtcttactgtctgtgatctggacttctgaacctgcagagtaaccaagtaagcccacataaggtcattcgaattatgaaagtaaaatgagagaatctcttcagttgttggctatttttttcctgacattaatttgaatgaggtcataaagtaaaattttaaagttgaattttatgtagacttggttcattcaaatacttgaagataacaacattcctagtctgagttgtctcttaagaaagatttagtaggggttatgtttctcagttccatgccggcagtctgaattctaattataaatgcctgttctgtcataatcttccaatgagtggaattgaactgttcatatacattttattgatttatgtctgtatttaaagctgagtgatttaatcattttggacggtggagagagccgtggaatcgggtctggctgaagtgagggttagctatcatttgtttaaccctcatgtgtctggtgctgagtaagatgagttttagagtttatgaagggattaggtgacagcgatgaaaattccaagccatacttacgctaagagttatgatggagtcatcttcggaatgtgctgatgacggaagtggggatgcggttgcttgtgggttttgttttgtttgggggagtgtggggagagacgggtgatggttgtagagaatggggaacgctttcaggcatgacccttgtgttgattgggtcagtttagctgcaggggaaggcgcagggatattcctggtgttgggagaggtatccacactggcagaggctggggcagggttctgtgtgtgcagttctggaccatcaagggcagggtgggtaggggctggactctggaaggccatccttcatggtgctgaggggcttgggctttcagtcttgggaatgctttgccaagatatgccgaatctgagtgttcagatctgtaactgcaggtctatggcagtagcattgtctcctgtgttagaggctctttataactctttactgctggtacccccaggacttactgatggctcttgaacccctgcccttgttttccccagttttcaaatgtatttggtaatggggtgcaaccccatttactaatgaagtcctggtttaaaatgaagcatgcgtaataatagttcagcttaataaatgttttggaaaaagagccttgtttacagacattcactcttccctcgatttaaaaaaatattttttttcattctcatattgtcaagagagtgctctgaaamgttacagtgtaacagtaattgaatattctatttatttttgcctttgaatactaagatatataagtcaagggtggactattccttgtcataaagctgaaagtttaatttcaaactgacatctgctgccagttctgtgtttcagtattttatttatatttaaaattccaccttccctatatttgtaatatcatttttttgtggtaattgtgtctttgtgttcttcctttcagtaggtgttatttattaggctcacttttattctgcgggcaacttcagagatcccttgttcctcagaacatgctagaattccttctcttcttcagtgtcctaagtagatgatatgaatgtgcataattaactacgttctgcagttctcagctcaggaatacttttcagctcttacagatagacacttaggcrtaacagttgttacttatgagctcattttaaaagtagataaatgtctgaattttcaaagacaaagggtttcagagttcttgatagtttcttatagaggtgggtttagagcctgtgagaaagccactacttcagaatcttaacaaatagtaattgacacccagtggcaaaaatcagaatccgcttttctttcaacagcagatatttaaggcttaattgctgactgaaagtgcagttcgccctcctgcttctggagacagtgatgcccccagcccagctcactggacaatcagccagggtcaaggtgtggtccccatacccagagacgtcatcttctcctcttccgatctccacgtgtaccccagcttaccccagcttcatcttccctatgcacagaaaattaggataattctaagaattgtttttcttggaaacaatgttttcaatatggcaaagtgaaaattgtttttctaaacaagatattggctggatgtggtggcttacgcctgtggtcccagctacttgggaggctgagatgggaggatcacttgagcccaggagttggagggtgcagcgagctgttattgtgatactcctactccagcctgggtgacacagtgagaccttgtctcaaaaataataataatartaaataaataaaaatttaaaaagttaaaaaagtaagatgttgatgccagcaaaacttattggtgatgattgaaagccaaaaatatattataaaacacacaagcagtatatcaatattatattatatataaatataaacaaaaacaaaaaaaagcgctaaaattatactaaaggaggaggtgcagttatgcttcttgtaggtcaggtgctctgagcagcagctgccatgccggtcctgccatcaccacaaatccaaggcgactgacaacaccaaacccttcccaactgttcttaactctagtatattcttgctaatgcctttcagtactaatgttttccctgctccagcgtaacacccagaatcttttccttgaccattctgataggagcctagaaccttctgtagttttcagtgtttctttggtgaggcaaattcttggaatatctttggcacgggggtgtaaaatttccactcgctatatttaagtctacagctgggagcaatttcttattgatgtacctaaaactagttaaatccccactctccttagcagtccctcttgagagttatttaagatttaggtaatatattacaaattgtgagtgcaaatctctgccactctctgagattgctgcactaaggaatcactagccctgcccttccctgtctcatcctcccagcgcctggaattggattagcacctgtggtgtgtgttggcattttctgcagggctgatatggtctggctctatgtccccacccatatctcatcttgagttgaaatccaaattgtcatccccgtgtgttggggaagggaactcgtggagggtgatgagatcatgagagaagttcccctatgctgttcttgtgatagtgtgtgagttcttgcgagatctggtggttttataaggggctttccccactttgctctgcactaattctctctggtgctatcttgtgaagaggtgccttccgccatgattgtaagcttgctgagtcctccctagccgtgtggaattgtgagtcgattaaacctcttttctttataagttacccagtctcaggtatttcttcataacagtgtgagatcagactaatacaagggctttaaacatttgtgtgtttgtgatagaaggaaattccatatgcaggtatggtcaactaagtgagtacatttccttaaaaaaaaaaaagtaaaaatttggatttgatggatattgcttacaaacttgagtgctcccaaagttatttccacaggcatgctgaatctcatctgatctgtagtgactctcacatttaacttgaattagagcttgggcacaaaagcaataatttgaacaaagtttgattcttaaagagtaatatggtatccacttccccacttccattgtttttcaagaaaaagttggtatgcaatacaagggtaatattaagcttttatcttcatcatttatttatttatttttataaagacagggtctcacaatgttggggaggctggtctcgaactcctaggcttaagcaatcctcccacgttggcctcccaaagtgctgggattacaggtgtgagtcactgcacctggcttcatttattcagtatttgaggcagaataggaaaaaagaaaaccaaggaaattctaatgtataaactgtgacagagtgtttttttttaacctaaataatgaattccttatatttgaaataactaagtgaaaataaaattttattttgtgtctgtttcaatgtaaaagcttatttcattccactacagcatacagaaactttattctttttcctagaaggttatagtaccagacacccttcttccttgaaatagtttagatgggactgactgaaaagaatcactgtaattggcatgtagagtgtcactgggtactcgttaggataagaaaatgtagtgaaatcaacttgaaatttaaccaaattgatggcattgtgccttgtaaggtgctttatggaatgtagtcacattttatagtagacttaagttctagttttaagtaaattttttttatttttacattttcaaatgacttttaacaaatactctgaatgaatactcagtaaatacttaggccattaatattttgcaatggaaatttctattgtagtttcagttcatgaatctttgctccttaccccatcccacaagaaagacttaaacattcaatgagaggcaaatttgacttcttcaaagccggaatggaagaagggagacagaatgtcacaaactgtagtctgaacttgacattgtgatattcttagagaatgtttttacttttaagccttaaaaagtattcatgttcttgaactgtggaactccagtctcaagtttggttgtttggcaagtaaattaagactaatcattataacagtcctttgctacatgtctactgtagctgagctctgtcctgtgtgttttagacattaccgtatttagaaagagaatgactccaaggtgctacatggagaaactaaagagagtcacatggccaagatgtaccacactggagatgccaaaacttggttaaaagccctcatctgactgactttatttatttttattttattttatttttttgagacagggtctcacacttttgcccagcctggagtgcagtggtatgatgtttgctatagccttgagctctctgggcacaagtgatcctctcacctcaccctctcaagtagctgagactacgggcatgagccatcayacctggctaatttttgtatattttgtagagttgaggtctcaccatgttgcacaggctggttgacttattttgaagccgattttctttttgtcgtcctcctctaccttcaggacttttcaggtagtataatcctgtcgtcgtaattcctggcatcacttactccattcttgaggttttctggtctcttgcatagccaggtgagagctgagttgaaaagctttttatacaggcttcatggatatgtatactggtataagtgcatcacacagttaataaaaatattggagaagaccatttagttcacttctttataacagcagtgcctgtacacactttcctcaagactttctggtagttggaaatatgagtttaaaagtaatagtcattaaattaagtggaaactgtgggtcatttcaaagacattgtttttacaaattgattatacacatactaggtccttccaagagcatgcttaggttgaacagaaagtcttactaacaaaacacgtgccctgtgctctgtattgtcctcagggcatatgattgactattacagtaataaacccttgctttctctgaggtgcaaaaagaagctatagtctgagtgcttgggagaggcataagtcataattgtaggctgtaataaatgcaaatctatgaaaaatgggttagcttcaaacagctgagtcgcagagtcttgcaaaaccatgccccattattcctctctggagcccagatcatagaagaattatccatcttttttaacagtgggatttctaaggcttctcagaaatctccggtctcttggtttccagcaagagaacaatatcgagtcttaaatgacagaaatgaattcctaaataagttgaactttttcaagtttttaccaaatttaaataataatgctcatatgaatggtagctcatgtcttccctgtgcaggtggtactgaactaacattctaaatttgaaatggcaggctctctgttcccctgtctgggtaatctctgataaaacattaatcatctcaaggttctattcaagtccattgatggaaattgtgaaatgtaatttagcttgaggaattgaattaatgttttctaatagccctgagatattcactgatttataggtttgaatgctgggaggtgcatttgtgtttctctgtgtgtgcgtgagctcatcctagttaatctaaataggtgtttagaaatgatgcacattctatatcataaaaatatgtattatctctgtgactggtgaatattggtatggtttatttgtgtctgtcatggaacttatacattgctttatacacctggtataaattcgtgctcaactgagaaatatttgttgaattttaaaaatcctttaaatgtatatgcatatatatgtagacatggaatcacagatgtatatatttagttctaatgttttattttcaagcaggtgcagaatttatctgatttgattacttacactatgtgcctctgttgtgcaaatactagttttctcatcctttgtttttctccttacagctcctttatcactttgcaatatctagctctgctctgtaacatttctgcctcaaacccacattgatggcgtacttgtgtctttctcactaccctcttcctttacaatgttacagcttaacaatgggtgcagcatccatttgtctttcatttcattcccttctgcatgtgtagcgtctgagaagtttctggcccaggtaggcatgcagtaatgtattgaatgaatatggtaagggaagaaggaaaaaacatggttccaagatcctggggaggtctagttgaatggactgtgccttttttgtgtcaccttggagcagtcatttcatctcttgaggcttggtttcttctctgtgaaatatgcatgattattattatatagtttttgagacagagtattgctctgttgcccaggctggaatgcagtggtgtgatctccactcactgcaacctccaactccgggttcaagcaattctcctgccttagcctctggagtagctgggactacaggtgtgtgccaccacgctcggctaatttttgtatttttagyagagacagggtttcaccatgttggccaggctgatctcaaactcctgacctctggtgatctgtctgccttggcctcccacagtgctgggattagaggtgtgagccaccatgcccagcccagtcctctttttgatggcagtgttctgtatggggtgctctatggagccttccaatagaatgctaataggatagaatgcattctaatattacattctaggagaagggaaatgtcagttattcagtccatgtcctcacctgtgcctttgtatcaattaccattcacagaggaaaaaaattagtgtcccaggtgatttaaagtagggaggtttcacctgttctcatagaatttattacatcagtatgtgttacaggcaagttccaagtgttacgaacaaatattgtgacataattcactgggagttgtgtatcatgagtccagaaaagaaagttgtgcctatgttgtggaggcttgaattaaggataaataattaaagttgatggttagttaggagcgcctaaagtttgggtctgtgtcaggactgaaggtttaggaaagaaattttggaatctagaagtgaagaactttggaatggtggcgtttactggagtgtgttctaaatccctgtctgtgtttcaagtcgttgctaatctcccttgtggctttytgctgttaccatccatcgtaccttaggcctgcagctgcatagaggacagggcgtgataatcatgattgtgttggctcatcccagaagctggcatgtttaggttttaagtgtagtaacaatgagtacagaaactcctaaccttgatcgaaactcccccggcttagcttgcaccagttgtaccatacccaccaacacaatggtcatacggagtttctttttgctccttgagaccagcgacttcatttctggattaaggccttgcattctgtttccccactgggaattctmgtcccctgattttaggtgggctcctctttatcttgggtttgtcttcagtcttgatgmtcagaaaagtctcccctgatcgacaagtcatgctccatcacatcctcctattttaattcttactttactatatgatattaccttattagtgtaatgtgagctcatgtgagtaaggtctttgtctggctcactgctgtagccagtgtttagaatgttcgacatgtggtagaaactcagatgttggttgaatgagagaatgaatgggtaaagacaccttggcctcatttcctgtatctgttttccttacccagccccacttaaatgtaatagaaaaacagaaagaccatatttactaattataaacacttactgagagctgggtaatggagaccctttgtttgggcacacacagagataaagtaagatttatttattattggcaagcaggtccaggctcacaaattggtattccattaccagaggtggatgaaygatgtggagtgggatggggagggggtgatggggggtctgggaacaagctggtcttcgtgactgggactggggccctctgggttgggacagaatggtgtgcaggtgtgttttcccctgttacttcccgccctgtttcctggtagtcctgccattgcagacctgtatctgtgccagaaggaggcatttcaaggtgtcaatggggttggtagtggctgaggaaggaaaggcgggggagttaataaatggccatagtaaggacagagagagattttttccagcatttgggtgctttgcctccagtgcctgtctcatgcagctgcttgtggacacagcgtttatgaggtttctcttgtgcattttaaagaatcaggatttccatagaagtcctaaaagacaaatctagactctgggtgtgcccacttccagttcttcttttaggaaccatttcaggaaggattctttatacaccaggaaggatgccctaagtgtgatcattgttggacagggatccttagctgacagcgagaagagagtggcaaggcacctttgaacgtgacctctcctttggctaacacaaaaatcaaaagctggtgtttcccttgctgttctttagctgaatttccaaccactctgcccactcccagttttaaaataataagtaacaattttactatgaatcaatgaaaatgcaatcaactatggattatacagtattacagttttcagtgaatgcttatgtcttttctctgtcctttccctccaagggaaaagttgggaagtaggggaaaacaaaaggagaaggcattcaggcaacaattcctcatatattctgaaaagcaattagatgcaagtcacatttgatttgttgcaattttaaggattctttgagtggacgttggtgtgggctggccggcagggcatcagggggacgttgtgagtcctgcccctmctttagcactaattttaaattagatttgaagagtggttggtgaacagccttccactgcccatttgcagtgaaagagaagagccttgagaaggacgtcctgctgagatggtttttcatagaaggtgtcatcatattcgtgttaggaagacccagagtgagactggcaattggcatttcatggaaataagtgtatgaaatgatcctggattggtaatgttcaccatctttgtataaataccaaaaatggaggttgtggatcactacagatgatgtccatgtcattctctgcttcctgttagcatgcaagttctagtgtgcgtagcagtagaaattatgaataaatactgtctgttactgatacatatgacttctgtacatggaatcacttgagtattctgatgtaaggccatttggagaattctaaaaatgcaacacttgattaacagccccccacccacccaccccagccccccagtaaaactgtgaattcaggattaacaagatacaatgagttcatggatgttgtccaaaaaaggaagaaactatattttgacatgcttggttttttttttttttttttttttggacatgtacttatattagttttgctgggatgccataagaaagtgccacagactaggtggcttaaacaacagaaatttattttctcacagctctggaggctggaagtccaagatcaaagtgtcggcagatggtcatttttatgttcacatggagttctcctgctgtgtgcgtctgtgtccaaattttttcttcttctaaggatgccagtcatattggattagggcccactctaatgacctcattttaacttaatttcttttctaaagactatttccaaatacagtcatattctgaggtactgggtgttaggacttcaacgtgacattttgggggatacagttcaacctataatagtactacacttttttaagtgattgtggggagctcttgataaatgaatttaagggtacactctggctctgtttaaccaagttcttacattgatttttatagagcaaaatatttcacttctactcattactatgtaatctcacaggctggttgagttttggaccatttgtcatgtatcttccacatatcttctatgtctctctctctctatgtatacatagtagaaagagagagagacagggtatcactatgctgtccaggctggaccaaatgaaccttctgtcttggcctcccaaagtactgggattataggcatgagccatggagcctgtgctactttgtattttaatgtagaactattctcaatagagcagtacccctcagactttgaggttatattaatgtcctacagatcttgattcagtaggtcttgggtggaacttgagatcatgcatttctagcatgttctccagctgatactgatgctgccagccctcagaccatagcttgaggaatagagtcaggagtggctgcacaatttgcaggttcagtgtttcagaaccactcagtgtagcaaagccaaacactaacgggattgcagcaagagaaagtgagacatttattgcgtggccccaagcaaggagaatcgggcagcccatgtttaaaaccccaactccctgatggcttacaggtagggatttttaaaggcaaggaggcagaggtcacaggtatggtaataaattcatacatggaggttgtacatggttttgacctatacaggtgggctttcttgaagcgccgggtgattaaacgtgataggtagattttaaaattttcagatttgcagttggttaaggaagagaagctttgtttaaatatttggggtcaccagaaaagaatgttagctgtggcttgtatcacctcagatagactttacagcaaagaacaaraagagctgtcagaggcccgccctcagttttctctcacctgagctctgcgtgccagcaggtctgtttagtaggggtccaggtttctgaaaaacaggacatatgctaagatgttatcttacatttctgttgagaacaaaacatctcatgactctaactttgttggctactgttttaagcaactgttaccttcttatcaaattgctcatttacttctcagggctagcaaggtgcctggcatttccctcatatgaactcaagctttttctttacttccatgcctggaaggggtggaggttaggcccgtaagaggggtccctgcttcatcttagtaatgcagaatgaaaatgcgagtctattgtttaaaagtgattcagaattttgaactggtcaccgcagagcaagacacctattgtggcccctgtgtgagtatacrggtgattccacccacggagccagccctgagctgtgtgggagtgctgatggaaattatctcagggcacttatccgcaatgatttgtaagatgatggcttttattggccagtgatgaaatccttatacttctaactagtcatggttttacatagtacttgcacgaaactcagagcatggaggagcattagcatgcaggagacatagctaaagcaagttgctcctgagactgtagatatcttggtgtctaaaacacagaatatcaccaccaacaccacagtgattataatatataacttgcccttcttttgcaaagtttcaaaggaatctagggtatgacacatgaattcctctgcccaatgatgatgattctcctttgtccttgaggtagcactgtgcctgctttttaatggtggtatttaactctgggagcaacattcattgcatttttcagaggggaacaatcatcatcatcataatacaagattataaaactcatgggtcaggctttgcacggtggctgacacctgtaatcccagcactttgggaggccaaggagtttgagaccagactggccaagatggtgaaaccccatctctactaaaaatataaaaattagccaggtgtgctggcaggcgcctgtaatcccagccacacaggaggctgagacaggagattgcttgaactcgggaggtggaggttgtagtgagtcgagattgtgtcactgccctccagcctgggtgacagagggagactctgtctcaagcaaacaaaaaaacacaataaaaaaaataaacattagcctcagtggcttatattttcattctgcttaatttaccatgtctacccatgctgggcattaggatgtcaattttggggctgtggtcccagttgactggactagaaaaatgagtttgtcccgtatcacccctacatgagtgccttctttttttcggagatggagttttgctcttgttgcccaggctggagtgcaatggcaccatctcagctcaccgcaacctctgcctcctgggttcaagcgattctcctgcctcagcctcctgagtagctgggattacaggcatgtgccactatgcccggctaatttttatttttagtagggacagggtttctctgcccaggctggagggctggtctcaaactcctaacctcaggtgatccaactcgcctcggcctcccaaagtgttgggattacaggcctgagccactgcgcctggccatgagtgccttaatgcttagaatcatctagcaaatatttttcaaatatggctagaaacaaaattttctttaatcattatgcattttacagtgccaaaggctgtcagagtatattttttccccctatagtgttcttatggctcagtgatgaataaggtggatttgatctgtataaaaacacagacactgatgtgctcagtcatacatctttagacctatctccatttctctgccccttcccctccctttacattatgagagctctgcaggttcccttatggaagtcacagaaatgttttttcagttacaaggtatgatgaaaatggtctgaggtctattcctacttatcctactagattgcctcttggtgcttattcaaattcttgatcctgaattcctttaatcaagtaattatttcaaagaacataattaggtttccatagggtcgttacttcttttatattcttggttctttttaccttatccacccgtatctttattttcagggatttccatatccatcagttgggactgaaaactaatctgcattaaagtagcagttgttacttgatatgacttacttttttttttctcatggatatttgaatgttacaggatttgggaaggtaatttttttaaattactgataaaaatcttgtggaggattctgattctcaggtctggaataacctgcattttttgaataagtggagcattcacatgtggtttaaaattcaaaatatgtaattgatgacaccatatccgagccattcagtttccttctcaggaggcagtgttgttagtgggtgtgtctgttgtgtgtgttcttctagagatagtttatgtttatataagcaaatgcagatataccttcctctcattttacatacttttcagttttctaagcctttagcaaaagtatataaattaatgttatgggattttacaaaaggcagaagccttcaagactataagcagtgcagacagagtgatttgaatgataggaagtaggtatgctaagtaacctctgaaatgacacccgcacaccacaattttcactttctgtgcacagagatggtactatctgtagatttccagagttttgccaaaaaaaaaaagaaagaaaaagaaaaaaaaagaaaaattagaaaaagtggtgagccttagtactagaaatagtaaagaattagcaggtgaagtttagcagattttttttaaattaacattgttagtttaatttcagttcctaatagattgatgaaataaacattaacaagaatgtgtaaacatctgtaagttaatgggtgcaggactaaagcattttaagtagtaatcatcatacaaaaacctgattgctttccttgatagctctatggaattacttaattttaaaaaggctatagatgttaaatatcacgattttcgagtaagtgattttttgaaatcttattcaccaaactaaccgaattggataaagaaatgtcaagtgtgtaataaactgtccaagagttagtggcaattgaaaacatatcaagttgaagagaaccacaggataatgtgtatcttttcttttaatgatctagaagaattagctaagcaatatattaaatctacagatgatcatgaatgaggtgttttctttttgttttttatgagtgttactgagaatgaagcagtagggtcaaacatgcaagtttaataaaatggcaaaagatgaaaaaaaagtctttgcaaaaagctaactaatgtttctggggatggataaatccctaggaacaagagaggggaagacctaatgagcctgggaaaacctaatgagcctaaagtgttttattccatgtaacgaaaacatatcaaacagtaatcttgggtgactagcctatttttttgtctgcccagttagcttaattgacagccatcattagatggcattatgattgggcaaaccaggaacttctgcagtaatggaagttttcaaaaaaaggtttgtctctcaactgaaaaataatagacaaacatcacagagacgcttaaaaattgattgagtcaggtaacgtttgttttcatgtgaattattaggaaactccgctcgattagttggacaccatgtacctctctttttcaaggtactgtacacaggagcttgagaagagatgaaatggggccaagaaactagcatctgaatgcactttactaaaagcattttttctgttttacatatgttttggcttaaccttagagatgttgcaatatcctaacaaatgccttacagagaatccatggccaaagtggaactgaaagtcctaggtctttctgccaagtgcataactctttcctccttactacactagaaagactttagcattgtaatattctgagacaacatcagtgattcattcctcattttaggaagcagtaagggataggtctacatggacaaagaggaaggtaaggtttcagtctctaaagcaataatggtgggttgcccttttgttaaagagtctcatgtcaacaaattcatgtctagtttaggctaggaagaaataatagttgggaaaacaatagcttgaaaaatcagtagggcatgccaggcatccttgtatcttcacatttgtgtatcacgtataatctaagtgatactaaaaatttgttacgctctaataaatgatgatttatgtataccaaaggctctaataaaatatctagaattggtagcatcatagatatgaattaaatagatggagatgaagtaattaaaattagttcctaatttgcactgattttttttaatcttcaattttgtaggaaaaaaaaattggagcattaaactgatagaaaattgtaaagaacattctgcttccggtagggaaaatggtctgttttcttttcttactttaacataagatcaatactaatgtcatttatattgtactttagtgtttacaaagtagattcacatatattctcttatttcatctgtgcagtaacctctggaagataaggtttcctcattctgttttttaatgtctgtttcttaactctgtgtaaaggcagattgattgggcctcatttcctcaatttagaaggctggactgattgatggaacattaaagaaggcagaggtaaataagggatagtgattctaaaaataaaagtgacacttgaagtggtttgactagcagtctcacttatttttccaaaggcaaaaattaaaaaaaaatcaaaaagacaaaaattaaaacccagagatactaataaaagcagggagcacatgtatctttctgatcctaacacttagagtagcagctatcttgacagcctatttttgtgaatagaacacttagatgtccatttttaaggacaactttgttttttcttcctggtgttttgttgttttactggcatatatctaaatttgatttaaatttcatggcattaaaccaaaaacttagatggttatatcgtgtcatttgttatatttattcagtatttgttggtgcattttggtaaattttttactttattagttggggttatataccaccacatttaatcccaggtactcacaataataacagcttaaacatgctaagagtttgtttctctcttatgtgaaagaagtcaagcagttggcagtccaggtctggtatgtattgacaaccccagtgtcagagaaccagacacttktctccccgaagtatcattcttagcagtatcacctcatggttcagggtagctgcctgagcttcagccatcaggctgatattccaggcagcagaaaggaagaaagaagaagggcacctggtttcccttttaggatgcttttgtgaggtacaattagcattcttgtctttaacttcttaaagctcatgcgaaaacagcttactgcaaggtgagcacatgactgcctagcttaacacagaatttccttatgaaggaggactagaacagtggatgttggtgtaggcactgcttagtctgtgtcacatatagcgcataacacatcaatagtgagaatgcttcagttcaaccagttcatggctttgggggctgtaccaattggtttataatggttatgattttgtgaccaattattctttatgtggagatatatataagaggaactgctttattcatttagaccaataaaagcgatacctgaagtgatttgtggacaagtggctacaagaggatattggtgagcatatttgttcccatgagtcattttctaaccagttatcctaacactgggtttctgtactgtctttaattttcacattatctctaaagtcttcaggaggaaatataagcagtgtggtgctagaatagctttctrtgtgaattcttttcccccttattcattactggaaccagtaattgcctagagaatgatgggcaaaatgccagctcatcatttctttwagggtctaagaattggctttggagaatggaagaaaattccagaaacactgtcaagaaagttattatttatttcaaatgttatttggaacagcaaaggacaatatgttttatagcacaacttttaagatgactgaattggcaataaattcacatgatgaaacttcagcaagtctttatgtttctgccggggaattctttggttcttggcgtaaatttttaaatagttaatatcagcttcctattcttaacattcctttagttgtagagctaatgtgaaaacagcttgctgtgttgtgaagaatgcctttagttagccaataaatcaactcatgcgtgtttcagttgtcaagcatgttaaatagtagtttttagacacaagagggattgcccataatatcgttattgtgagattctgtttctcatccaccacgaatgaaatcccttctttcccagactgcctctcacagcccctccagcactgtggttcaactctacaccaagagatgacaagtcctgggttctcaaagacttggattttggttctagatttgcagtgtaggagtcaggcaaatggatgtgtctcttgaggcattagtatcttcacatttcagacaagggcttgagttaaaatactgtttcctttcacttccaaaattctataactctgtgcaatggtttttaacaaaaatctttgaaaaataacctaaataggccgggygcggtggctcacgcctgtaatcccagcactttgggaggccgaggtgggtagatcacgagrtcaggagttcaagaccagcctggccaagatggtgaaaccccagctctactaaaaatacaaaaaattagccgggcgcagtggcaggtgcctgtagtcccagctactcaggaggctgaggaaggagaatcatttgaacctggagggtggaggttgcagtgagccgagatcgtgccactgcactccagcctgggtgacagagtgaaactccgtctcaaaaaaaaaaaaaaaaaagaaaagaaaaagaaaaataaccaaaataaatttctagaacaaatttcccaagaatcccaaataaatattaatttatatttaaagatgctgtatttaaacagtgcaataattatgagcttttaaaggaatctaaatcaagatatgtttaacattggctacttacgatgagttcaagtacttaagctaatttttagcttgatacctgtatttcgttgggggaaagaaaacaatatcacttcacacactgatcatgttttatattttcttttagaaattaaatgattaatgtgttagaccatgtaagtcagacaaggaggattgaaggacataccttatgagtcagctaaaaatcttgccagttcaaatagtacacatttccttgtgtgagcagctgtcattgttctgaagttttggaagttgtggtgaataatacgttgtgtctctaagtggccctgctattgtaatctgtggttactctttaagttatggtggaaatctttacgtgaccaagcttgatcacagtttcaagcttaaaaatttaaatgtgggagatgataccaaatttttggcaaatgttttatggcccacagccaggattagtaaaaactatggttaatagataacttacagttttctgtaaacatattaaaatgctttttgggattcaatcaagcttgatttatttgtttatgaatgaatgaatgacaggatctcgctctgtcacctagctggactgcaatggtgagattatagctcattgcaacctggacttcttaggctccagtgaccctcccacctcagcctcccgagtagctgggaccacaggcacgtgccaccatgcctggctaatttttgtatttactttttattttttttttctagagacggggattcgtcatgttgcctaggctggtctcgagtgatctacctgctttggcctcccaaaatgctgggattgcaggcatgaactactgtgcctggccaagcatgctgtaattggaaaatttaaaatgcttttctggctgggcacagtggctcacgtttataatctcagcactttgggaggctgaggttggtggatcacctgaggtcaggagtttgagactagcctgaccaacatggtgaaacctcatctctactaaaaatataaagaattatccaggcatggtggtacatacctgtaatcccagttacacaggaggctgagacaggagaattgcttgaactcaggaggtggatgaacctcagtgagctgagattgcaccactgcactccagcctgggagacagagtaagactccatctcaaaaactatttttttttttttctgtagtgaaaatggtagctctaggctgtaatcccagcactttgggaggccgaggcaggcggatcacaaggtcaggagttggagagtgggtggatcaagaggtcaggagttcgagaccagcctgaccaacatggtgaaacccagtctcaagaatacaacaattagccaggcgtggtggtgcacgtctgtaatcccagctactcaggaggctgaggcaggagaattgcttgaacctgggaggcggaggttgcagtgagccaaaatcatgccactgcactccagcctgggagacagtgtgaaactccgtgtcaaaacacacacacacacacacacacacacacacacacacacacagagaaaatggtagcttttatttatttagttcacgttgtctgacagtgaactaggcttcttacgtattttttttcattgattttaaccaaatgcccattcatgagtgaggaaactaagttcatctagggcacctgggaggggcagggggcgttacggaagggctcacctgacagcagagccagaggtgcacatcctcacgcaaggtagtgcttagaggcgctggggtttattgaaaaggatgctgctacactggtttaataattttctttttctttttttttttttttgagaccagtctcactctgttgcccaggctggagcgcagtggcgcgatcttggctcactgcaacctctgcctcctgggttaaagcgattctcctgcctcagcctcctgagtagctgggattacaggcgcacgccaccatgcccgtctaagttttgcatttttagtagagatggggtttcaccatgttggacaggctggtcttgaactcctgactctgtgatccaccctccttggtctcccaagtgctgggattacaggaatgagctactgcgygcagccttataattttctctttgaataagcagatatcttgaaaaggtatatgcttaggctatctagctcccctccatcttcctcaacacctctacctataagtggtataaattcaacctgaactaattataaaagaagaaattaaaaatttcagccacataaaagtctagttagtatgtataattcaaggactggtagttaactcactgttagacaagtaggtaatgtgttccctcagcgattgagtgtatttgagaagttggaaacactgaatatagcttggtaagggctcagtggcctctgtagaagggagcttgggtttgaattctagctccacaaagtacttgatgtttgaccacctacagcttcagtttcttcatatgtaaaatgggctaatagaactcacctctgagttgtcaggttaaaatgagctaatgtgtggaaattacaactgtggtgcttggcatatactatgttctcaataaatattagttgctcttgctattttaaaacttattctttgacaattctgttgctcattggtatgggaatactttcttatttaagaaaaatggcatgttctaacccatttatgcctgaggttgcaattttgtgaattttgaaaatcagaccttgacaatgactttgagcagtaggatataaacaacgctcgcatgcttggtgttccagtaatggaacactaggcataaatgggcttaaggatggcagtatgtgatgattcaggtaaaaaacttaaaaaaatttttttcagcacgaagttttgctgtgttttggttggaatattgtaaggaggtatcacatttttaaaaagcttatcttagcctctaatctcagcactttggggaggctgaagcagcaggattgcttgaggccaggagttcatactgagacactgtctctacaaaggaaaaaagaaaaaaaaaaagagcaacagaaaacaaaaaaacatagccgcatgtagtgaggtgtgctggcatgttcctgtagtcccagctactcaggaggccgaggcaggaggatcgcatgagcccaggagtttgaagctgcagcgagctctgattgtgcccctgccctccagcttggttgacagagtgagacccctgtctgtttaaaaaaaaaaaaaaagtttattctagcattgactaatgcattaaataaagaatttctatgcctggtcagcataaagccctcatcttaaaatttaaagaatccatctatgtacccacgtgtgtgcctgtgcacacgtgcacacttccacacatattctagtagtcatgtggagttagtgatgaaattttttttcatccccattttacagacaggagatgagccatatggtgctcattttacgatagtgatagaatgatggatttagacagaaggaaaggtgtgtgaacagagacacattatcgattctcattcaaatcggattcattctgctatgctgtgttgccttcagctgagtgtccagcggtttgaaacatttctaaattttgatttggggccatcatgcagctcagtgcttgtgcttcggtgcaaggtctcttgggcagagatgctaatttaagaatgttgtcggtttaaatgttcctaagaggattaagcaaattctacagcatataaatggacatatttggaagatttttttccccaagcaatttcagaaaacacacatgcatcatttgctaaaactctgcaggtgtattaatgagttcatctcacatgaatggacagtcactgagggaacttcatatgtaggcttgagttcaggtatatgaaatgcaggctaagttttaattagaatttatttacagctcgaagctgctcctktgtttttctgcctgaagtcagtaatgaaccattcctctttgcctagtcattagtattcagagctccatcagcctgcagttcaaaccctttcccttgtttttgtcagagaagatgatggagcaaggttgcttagaaacacttagccacactctcaacgggaattatcaatctgtgctgtatgttcacccccacacgcaggggagaaaattgagttttactgctgatgacgttaattgattgcaagttgttttagtgggagtgtgatgttgaaaacyagatttcctttcatttttatgcattagatgcagagaagctatacagtgacatgttcattccactgtaactaaaaatatcatagaggtatctaaatttggttttgyatgttttatattcagatcttgacactggtcagcttacaggattatctttgggttggagactgtttctgtagtgatttctttagttcccagtaaattcacacagtcatctccttcaatagagttctgattagtgcagtcagggggtgacacactaaattaggggtgggcagaggggtgaaatggaaaccagctgttatctgcttacctataattttatatggtccaaaaaaagcttttgtcttttttttttcttttgtccctgttcttttcagatcatcttcttcaaaaatttcttgccttaacatgtaaagagtgcagtgtgtttctatgggtgatttaatttgacttgtatttatttttaaagattccttgatttggctattaacaacttttaaaaggtgaaacaaacattgctgatgagagaatgcacaagcaagcagacagcccctctggaaggtcgggatggcgagaattggggtgaggaagagaggccagaggcaagcgaactgtattatgttgtttaggattttgtcctccacagcatctaagtggatgtgtatatttaagcatagtgtcttttgttatactttatcatggattcccattgaaagtaatagattgagactttgtgggggagggcttaccctgtacttctctggcaaacatcagtgattctgctgcttattcattcaagactgcacataaccattgcctgcagagcttgaagaagcaacacacatttccctgactcgttcttatgagtcagtagaaaagaaagatggctaagcctatgcctggtgcatctcagttagaacctacagagaagagctcaaatacctgattttctttctttctttttctttttttttgagacggagtttcactcttgacacccaggctggagtgcaatggtgtgatcttggctcactgcaacctctaccttccaggttcaagcaattctcctgcctcagcctcctgagtagctgggattacaggcacccgccaccatgtccagctaacttttgtatttttaatagagatggggtttcacgatgttggccaggctggtctcgaactcctgaccttaggtgatctgcccaccttggcctcccaaagtgctgggattacaggcatgagccaccgctcccggccaaatacccaattttctacaagtgtcactggaaagtgctgctcctgtaacttaggagatatgaaatatgagttcatgtgtcaggcctggggtttcttattacacagaagctaaccctatcctaaggggtgtgctctttatgtgcagaaataggagataggagccaaattatttctgtgtctaccaaatttttccaatttgaggaaaatagataaagcctactcccttgtgattatgtcccaagagtttaaaatcaaattaaaatttggtgttgaaatctcaatttcctttaaataagatgacttaaaaattaatagtcactggtcttaattatgaataatgcattatcatgtaatattaagcctcacataagatataatacgataaaaattctgggatgttgaatctggtttaagaatttgtgcattctcagaattttgttttactttcattaagaaacagtacatttaaggccaggcatgatggcttatgtttgtaatcccagcactttgggaggttgaggcaggaggattgcttgagcccaggcatgagctatgattgggccactgcagtccagcctgggtgacggagtaggaccctgtctctttaaggggggagcaggggaggggaggagaaccatttcagtaatcttttctactttatgaatgtgttcataataaagactcctgtggaaactgttctggataaaattattagtgcaagtagtgccagaatagcagatatttctgcatggctgcttaggaacttagtttttgctgacaattttgaaaatgtttcttattccaaagtgcttagaggacctccaggcttatgattgttctttcccaagagtattttttgagggacagggagaaggagctcctatatcttggttccgtggttctctgtctaaagggaacactgccgtaaatacttgagtcatactttaataaagcccatagaagagtgaattgggcttaactccctcatttttcatttgaggaaactaaactgcctgagtgaggcctgaaagccgtttttgatgattttcaggcgtatgcactgggatgggtcactattttggagtcatgtaactttggattttgcatatgtctttgattcctggtgaatgtggaggatttccatgctcctcttggtagcaggagcactgaggagtgaatcctgctatattgcttgttcagaggcctggaggacacaggaattatggacaagtgtctaaatttggtgatggtcagatcagaatgctgagagactagatatgtctgtcagtgaaactgtgaattcaagggaggagtttgggaaggattggcacaattaagataattaaaatcatttgcttttgattgtttaaagtaatgatttttaacccataagtccagtgtcccctttttataatcaatattttgtaaatcttttggtatcctacaataaaattcttagaaaatataacctaactgaaaatacaaataaatgaataataagtaaatagaaaaaagaaagtacctgaattcttatagaatatactatattaatttataatattaacattataggatgtattgtattataggctaatttgctctcaaaagataaatacaaagggcataacttataataaaaatatcaatccaatatataaatgctcaagcatgactaaactggaaacaaatgccttcacaatgtcaaaacacctcccactgggtggcagagctcctcttgacaaactcttggttgaatacttcacagtggcattgtatgaagagtgtgtgcatgaagcaagtatagttcggtacttggaggctgattctctgtgtgtgtgtgtgtgtgtgtgtgtgtgtgtgtgtgtgtgtgtgtttttgtttgtttgtttgtttgtttttgagacggagtctcgttctctcacccaggctggagtgcagtggcatgatctcggcttactgcaacctctgcctcccaggttcaagcaattcttctgcctcagcctccttagtagttggtactacaggtgcctgccgccaggcctggttaattttattttttgtcttttggtagagatggtgttttaccatgttgcccaggctgatcttgaactgctgagctcaggcaatccacccrccttggcctcccaaagtgctaggattacaggcatgagccactgcacctgctcgattctgtgtattcttacttagcgaagactgtaatacattcttkaaattcttacctatttttaagagacagggtcttactctgttgcctaggctggagtgcagtggtgtgatcatggttcactacagcctcaacctcctgggctcaggtgatcctccaacctcagcctcttgagtagctgggactacagacatgtgccatcacacctggctaatttttgaacttttttgtagagatggggcctctcgctatgttgcccaggctgatcttgaactcctggcctcaagggatcctcccactttggcctcccaaagtgctggcattacagatgtgagccatcacctgacttatccttgaaattcttgatattaagtacagatgctattttaaatcttcaaaatttggagtatctgtgtatgcagtgtcccctagaaaatatgtaaggtagacaacgttgagacctttttaggatacaaatagaaaataagatattatttaaaaaattctgccaccgaaatggattttatgttaaaattcattattaggtttcacaattgcattatcacttttaataccacagctagttgttatgttttatctatagctttagaaagaaaaaaaaaatcaggccatatggcctgcgtaagagatgacagatgaagagcaacaaaacccccgttagttttgatgctgatcagtcaaaaattaacttagtcactacttaatggttcatctgagctcagtgtgctttttcctctttaagtttttttttttttttttgagacagagtcttgctctgtcaccccggctggagtgcagtgatatgatctcggcttaccgcaactgctgcctcccaggttcaagcaattctcctccctctcagcctcctgagtagctgggactgcaggcgcacccaccacacctggctaatttttgtatttttggtagagacagggttttaccatgttggccaggctggtcttaaactcctgacctcagagtgatccgcttgcctcggcctcccagagtgctgggattacaggtgtgagccatcgtgtctgcacctctttaggttttaatgagacagggtctcactgtgttgcccatactggtctcaaactcctaagctgaagtgatccccccatgtcagcctcctaaagtgctgggatttcaggtgtgagccacttccccagcctcattgtgcttttttcaagtcacaatcttggaataatttctgtcttggttagttttgttagtgagacaaatctttttcttccttatagcatcagtaatattttcaagatacaaaagaatttgtagaaggtatttagagttaatagttgcttgatctagtaattcatagttccaaatgttcatatttatgacaatttgaaaaatgtctttttttgtagaaattctagttgcttgggtaacgcaaaggcaaataatttcttaccagatagagcataataatatttgtattctcccactaaatctagagtccaacattatttttgcttgttaggtaacttttttcaaaaaacaaatggttttgtttatctggatagctaaccttgtgaaagcggtgcaacatcaaattggtacagatattaatacctgcatttaaataaaagagtaatttcacaactcagtgttcccaaaacttgacttgttggttcaaccttactaggtatattagcattcttaattgaatcagtcattgcattcttcaacaaaagtttccattccatctgttctttggtttataattctttggtgtgtcgtttgctttatttcccaaatatataagattttttacatttagaattattgctagttttgctacaccatgctgaagaggaagccttgtgactttatgttttatagtatctgatttgcaatggttaatcctcctcacaggattgtaaagcccaaatgagtgatatatgtaacagacatagaacaatgcatgtcaatgttagctgctcttatcatcatcatccttttactatcatcagcagcataagaagaagtttattctaaatataaaatctttgccaaaattttatcaattaagatactttttttgttttgtcttgttgtttttaagacggggtcttcctctgtcacctaggctggagtgcagtgaggtgatcatagctccccacagttgtgacttcctgggctcaagtaatcctccagcctcagcctcctgagtagctaagactacaggtgtgtgcactactacccccagctaatttttacaattttttgtagagatagggtcttgctatgttgcccaggctggccttgcactcctggcctcaagcaatccttccctcctcagcctcccaaagttgggattccaggcatgagttactacgcccagtcgaaacatttctgtagataggaccataggtgcttgatatgtgtagttctgccccttccacatgttgttgcaggagagtagttttatatgcctgatgatcagaacacttgacacttacaagaatgtggtctagggacacctgggatcctcaggacccttttaggatttactgaggtcacaagtattttcataataatgctgtcatttatcttttaactcctgttccctcctgagtgtacagtgcattttccttgtagctgcttcatgtgctggggtgtcatctgtctgacagtgtgtttgtgacaatatgtgcttttctattgtttttctaaaattttatttttcggttkctgatatgtagtattcatggatttcacccacatgaacaaaagctctctggagttctccgtgatttttaagagcacccagattcccaaggcatcgaaactttagtctaaattggaggggaccaggccacagctcctaagtcccacttggcagtttgaatttggcaactcagttggctcactgcagcattagggtaaaaaattttgaaaagtctattctgtgttatctttcatggaatcccagaattgaacattttaatatccaaaggggagtggcaattttaacttcatctagtaagaatatattagtgtgcctctcacaatttggaactcaataattaactattagaattctcaatggaaacaaaaacagtctatacatcttgatttttcctgaaaagtccttggtaccccaaccttcagaagtaagaagacacacattgccaagcacagttggaaaaccacagagtttgctgtatcgcattgaaaaaataactccaacaatgggtagaaattgaaatatatgtatttgagtattttggccagaactgggagagtaagcaacttttataattcaaaactaaaacttctttacttattataggattagatagatgtrctatgttaagttttctattttgagaaaattttgtctgagcctaatatttgtctctgtttgagggaaataaaaaagtcttacgataacattggaatcacctattctttatatacagcttttaataacaaaatgagaaatatttataatgtaatctgtttttttttttttttgcttgagtaggaagaaaaatcttgcataactaatggtcatttaatcttcattctttaatcttcattgtgaatgactttagcgtttttttcctgaggttagattttttcaaaaataagttttgatatcctttagtcatgctgacttatgtccactttttaataaaattagtcactagtaggtgccgggcacggtggctcacgcctgtaatcccagcactttggcaggcggaggcgggcggatcacgagatcaggagatggagatcatcctggctaacacggtgaaaccccgtctctactaaaaatacaaaaaattagctgggtgtgatggcgggcacctgtagtcccagctgctcgggaggctgaggcaggagaatggcatgaacccgggaggcagagcttgcagtgagccgagatcatgccactgcactctagcctgggcaacagagcaagactctgtctccaaaaaaatatatatatatagtcacgtgtaacacagtgttatatttaagcattgcaaatttactttgtgaataatttctccctcataatttaaaaatatttaaaaatcaaacccaaattaaatatccactgtaaattatcctatagtaaatgtcctgtggtaacatgaacatttcctccccaaaccctcattattctgttgaatgattttgcrtttctctacaatttccacatgttgatgtttgaaccttaatgcaatacaatttttctcatgttgtatttggctaatgttgtctgctgtctgcttactcaggagagtgccacagtgatttgcttctgaaggaaaataaagttatttcttagatttgtaaaatacagttcatctggcattaaatattttttaatacttttacttagcatgaacaggactttggaaaatttgatgagtttagatttgaatatcaataaccttagtgagtgtttatttttagatggttttgttaacatttttatttggagataataatatatactgaaaatgtaattaagtctctaccagttgaagtgtttcatattcagtattattagaaaagtgaagagtaggaattgagcaattaacatttgagtgcatcttttttacarttgaggaaattgaagttcagagaggttaatttgccctgaagtcaaacagccagcaagttctggagcaggactttagctcttctttaactgcagcatctctgttctttagcttggaaatcgctgcgtctgagaacaggggaggtcacgccacatggtctgccaccccacagctgcaagagtgtgtaaatcattattcttaagactcagaattttgtttcttatgaaaatgaatataatctctgtagtctttgtaaaaattaaacccctatgatttttatatcttatttctataaattccatgaaataaaatttgtagcggttttttggtaaaattgtcaaagagaccagttttctttcttgttgtctagaaactttcaaaacgagcaagattttgattcaaaacagaagtatttaaaatcctaatgaattaagtcctcttaaaggatatctcatttgccaataatggaaacatcaccgtatgacttgttgaatataaacctgtgatcattatggtggcaaacttcaaccacacttgtagtactaactttagcagggtaaatttcgatttacctttatggtcagtgatattccmgcagcataaaatgcaatttttggaaggctgttcctaaaactcattcccttttcactaagaactgtggataacagactcaaatgtggttcagggtggttgcagatggacactgggaggcagaggtgagagagcagaatattcgattaccccacaggaagaaagctgcctagtgaatggaagacagttggttttgttccttaacctgcccatgagcagtcattatcccattgacaaaactagattctcttttgttggatataggatacaaggacacgttcctcgtagtgaactaatcatgcttgctagctagagcctacaacaattacatctcacgattctgaggacagatggctggaggataattttgaaattgttcatgtcacatctattgtgcaaagcttcttggtacaatattgatagcttcacgtccagctgtagctgctggtttcagatcttcctatttttatcttattgtttaaatgaataatgtcattactactttaaaagccactgaaaaatttaaattagattaaattgtcaaagtgcataactratgtttgtatctctctgtccttgtgttaattaaggatttgtaggaagtgctgtggatgaatttaacccgtgagtggttgtaaatctgactagactacttgtttgatgctaagtcaaacctgtgtaaaaagaaaatgccgccaaaggactcaacttttcttaaggtttaaaactatttcagaaatgacttggcggtttaaatgtttataatattggtaatcacagtatgttaagcacacatgcatatgtatatattttaatattttaatgtaaaatagtctcgttagtctccattctttaccattatttttgaagtgaacatttattttgacattgtttttaaaaaattgtatagtggattagcatttatttttagaacacatgcagaatcagtccatcgcataatacaaatataaatgttgatatcagtactttgttcagtatcattttctctattgcacatcacctagcaatcctccttttaggaatggttggctcaacaagatctcattaaccttgtgttttctttgagtggtgcactatactaacagctataaagtgcatttcctgttatttgtttcctatgtggcagtctttcttaacttgtcaatactttatttccaagtctttatagaggaagtgactatagtcaaagaagttaaatgttatcttaaaatacacttaaaaaaatcctggaagtacctgaaccattttagaaatattcttgtcatttttactctttaaaatrgtacattcaaaaaaagagtgttaataataacacttaaagatatattcttatctttaagcaatattggcttcaacagcagtcacatcagtgtcttgtgctttatttggcctgatgtgggaatggatggtgccaattgtaaaaaaaactttggttaatttatttagtcagtatctagatagaactctataagactatgatggggcttttgtgtaatattttctattgtaaaagcaaaagaacacatttcttgtgcatttaggtaagagaaaaaactcacatatttaaaacctgcttttttgcgggagggtggagataatacacaggtaaatttttattttggtttgttttgcaccaccttctttccatttttggtcagctgttcaggctgcatttccgggataatgtatttaccatgcattttagtcattgtacctctcagcctccagctggccttcccccagggtatctttgcacttgcaggtcagaaaagaccaagttatgaatgtgatctcattttcaagggttttaatctgtttttggaattagtcaaaatctgtgttttgctgtaagattaagcttgtgaaaggctgcaaggctttcctctttgcagatgctttgaatgacttgtatagaaatgtcccacagaggtgcttcctgttgttttcacatccctttcaggaatacacaagcccccctgtttgtccatctctgagaaagacaaaatagctcaatactycttgcaaaatagaaaatgtcatttgttggttgtggtggtaacagggccggacattattcctcattcccatcccaaaacattgttgactcagctccagacctcatgtagtaagaacagccgtcctcctgtgttatcactggggtggctccaggatcgatggaatgtattgagttggatcatcagtgccagttcactggactgtatttaatcattgaaaaatgaagatgtgtattttccttttgacacaatggaaaatcagttgaatcacgactttttgttccttgaatttgaaaaatggaacaaattatgaaaagccaattatcaccatcatttgaattccacattttttgaagctttcctcccctcaaaaataacctggtgatctgattagtgttgtcaatttccacaggatcttaagggaaggggccactgtctttccacatctgaaaagtgaatgccataaagataaaacagcttatcaagccatggtgtgaggcacactgtgcatcaaaatcacttcttaaaaacgaggattttaagaaccaggaacacaaagttgttaaagagcaagttatttacagagttaagataaaagtgtcccggctgggtacggtggctcacatctctaatcccagcacttgggaggccgaggcgggcggatcacttgaggtcaggagttcgagaccagtatggccaacatggtgaaaccctgtctctactaaaaatacaaaggtagctggttgtggtatctcacgcctgtaatcccagctactcgagaggccaaggcaagagaatcgcttgaacccaggaggcagaggctgcagtgagctgagattgcgccaccgcactccagcctgggtgacagagcgagactgtctcaaaaaaaaaaaaaaaaaaaaaaaaaaagccttgctcctttgtcttttatctgaccatctggtcttctgtagtgaccagacgaagaactgtcttaatataattaaactagctttcatgatgaagtatacttggctactagatgatcttagatttctggccagcaattaatatcactgatggtctaaagttattttaatgttattcattttatagacagtattgctcagcatagtgagtatgggcttgagagccaatctgcctgatcttggctccagaagttaattagttctgtgcacttgggcaagtttcttggcttttctgggcctcagtttacccatctctaaaatgaagataagagatgtacctacattgtaaagttgttataagaattaaatgagttgcatgaacattggagatgtgttgattattgtatttcatacatacattaaaattatattaatggcttgcarttgtagacagatcatcaaatgtggttactattttcacaaaacaagaacatcctaartgtctactcattcaacttgtatgcaagtaacagaaaatccatccgaaagagatttaaacaataaaggatctgtatgttgcataatcacaaaataggttgactgtgaattaactgcataatgcagtaatgttagcaaggacccaactctttctctttcctctctgcctcttcgctagctcttttccgaatcacagaggctacagcagctccatcacacacattccagctacctgagctggaaacctaccctcaaaaccctccgaagattgctgatgacttgtgagcaagacctgtgtcttttgcctttttctaagcaaatcctgaaatggaatgaaatttactgtgagttacctggtcaaccagagaaaagtagatccctgataaaatcagggttctgttagtgaagaaggaaggttggatggatagtgagttagccagccttgtcttgttgcatcatatacttttttatataaacaatattcatgtataaattaaaaggctaacattggatgacacactacttctctgtcaggagatggttaattgatattttatgagacataaattttatatgcacatgtaacatttttacttctcataaaaaatgctttggggttgaaattaacttcatttcatgcatagagaaggtcagtattcgaaggtgctagaacaagtaactgctagcaggtatgtgatcctccaaaggtttatgcttttcccattatgacatgtaagtttttatttgcattaagtgtcaggatattagatgtaccattaatcttattttatcatcaacactgatttaccttagttatttttgaaaacaggtatgaattttatctatgaaaagattatatatacaagacacggtgttttatattgtcatactagcaaaattttttctaatgaattagctctttttaaatatacatggattcggtgtggtatctcacacctgtaatcccaacactttgggaggccaaggcgggcggatcacgaggtcaagagatcgagaccatcctggccaatatggtgaaacctcatctctactaaaaatacgaaaattagctggacttggtggcacatgcctgtaatcccagctgctcaggaggctaaggcagaagaatcacttgaacccaggagacagaggttgcactgagccaatatcataccattgcactccatcctgggtgacatagcaagactccatctcaaaaaaaaaaaaaaaattagcaggcgtggtggcgtgcacctatattcacagctacttkggaggctgaggcaggagaatcgcttgaacccgggaggtggaggttgcagtgagccgagatcgtgccactgcagtccagcctggtgagagtgcgagactctgtcttaaaacaaataaacagacaaacatgggatataggattcatgaaatgtttcattagctcttatgcagtgatatgtacatacttcttttcagcctgtgacttcaaccttattttcaggcttttagataatcaaaaaaagtattcatttttgcccacattcaaaatattacatttataatccgagtaactgaaagaatgatgatacaaaatatggttgtatgtagaagaatgaatgattgtagtgttatggttagtatagagttaactgatattcatggaattagaaaaatggatttgttttttaaaatcaataaataaggtcaggtggggtggcttatgcttgtaatcccagcactttgggagatcaaggttgaagrattgcttaaaggcgggagtttgagaccagtctaggcaacaaaggtagacacctgtcactacaaaatataaaaattagccaggcgtggtgacacatgcctgtagtcccagctacttgggaggctgttgtgggaatatggtttgaggccacgagtttgaggctgcagtgatctgtactgcatctgtgatggagccactgtactccagcccaggtgacagagtgagacactgtacttagaattaaaaaaaaaaaattaaaataatcagttttaataagttaaaaaggccatatttctctcttcctctcctctctccagataatgatggtgtatcatttggttgacactatgttttgcttggttttaaaaaaaagtttttaacatttatataaatgatagactaagaaaataaaagtgggaattgtcccatgaaatttctgacacgaagcttggaagatggaaaagcagattgggcctgtagagtaaccctgcatgtgagctcggtgctgctgatgccacttggtggggaaatgtggtagatgggagctgacagtttttttgtttgtttgttttgtttttgagacagagtcttactctgtcgccaggctggagtgcagttgtgtgatcttggctcactgcaacctctgactccctggttcaagtgattctcctgcctcagcctcctgagtagcagggattacaggcacatgccaccacgcccagctgatttttgtatttttagtagagatggggtttcaccatgttgaccaggctggtctcaaactcctgacttcaggtaatccgcccgcctcagcctcccaaagtgccgggrttataggcatgagccaccccccaacaagcctttttttttttttttttttttttttttttgagacagtcaggctccgtcacccaggctggagtgtagtggcgtgatctcggttcaccccccctcccaggttcaagtgattctctccctcagcattccaagtagctggaactacaggcgcctgccaccatacccagctaatttttttgtatttttagtagagatggggtttcaccatgttggccaggccagtcttgaacccctgacctcaagtgatccacacaccttggcctcccaaagtgctaggattacaggtttcagcccaccatactgggctgagagttgatagttttaaatgtgcgttacagggccgggcgcagtggctcatgcctgtaatcccagcactttgggaggccgaggtgggcggatcacctgagattgggagttcgagaccagcctgaccaacgtggagaaaccccatctctactaaaaatacaagatcagccaggcatggtggcgcacgcctgtaatcccagctactcgggaggctaaggcaggagaattgcttgaacccaggaggcagaggttgcagtgagccgagatcgcgccattgcactccagcctgggcaacagaatgaaactccatctcaaaaaaaaataaataaattaaaaaaaaataaatgtgcgttacagcttcctaagacatctgttgtggaaaatgacattttaacatggctttcctgctgtacccagttttaatgaatatgactttgtataaagataaatggaaactggaactgacaaatgaaatactggtttgggattgagagcaaaaattcaaagcagttggtaaacctttaacaagataagattcccatcatttcacctttacaattgtcatgatgaaaaaygtattttaaggctggagtcatttcattccctggagaagaaaaaggttcggggatggtggccaaaggatttcagagacctcttgattttcttattcctcctcccacctcacacccctcaagattagagtcggtataatttgcatcacacgtttggagtattcagaataatatttcctgggcccttctccccttctcaagattagaatgtcagcaactgcacacttgacgctgagtagcagggctgcctgtttttaccaccaggatttctttttgctttaaaagcttatcccaaatagtggtttgagggagtcctcacctgcgcacatgcccagagggaaggtctgagagcagtttgaaatacagttctgacatttttgcatggaaatgttgagttccaaatacctcatcagattcagatgaggtgctgacatttattcccctagctatcctttgcacctcatgaaaacgtgatcataatttatttaacaccattgtctcaaaagaaaaagacttaaaatgaacgcagtggacacgccatggtttctgctgttccggaaccaccccatctccccaaattacaggagacaggctcccattcttgaaaaggctttgtctctctggaattttaaaaataaaattcttgcatctgttgacattaactttcaaatgtagaaattgttgttaatattacagacatttagtaaaataattgtgaaaatgcatctcatagaagaaccaaaaaacaaatgtgttttcacttagtagattgttttgtttttttgtgacattgtctgtattggccttgtgtcctcttttcatcaagtccttcacatgtaacaaccccctgaactcgtcaaatattagaatgagaattgatgtatatacaaatgtctgcttagacaagtatctatggtatcgttaactttttctgcacggcggtgttctgaacagctgttttgggtttgagaaatatgattgatatatgccagcacccctgtatagaacctattgaaaaaaaattcagagtaaagtaacattagaagctgaaggtcaaggaaaattcccacaaaataattgtttttggctttaataccttccttaggaattatggttagctatggtttctcctgtgagtcttagaaataatttctatttcctcggaagccaaagatttaccaatattttcaattattctgaaattgtatgtgcaataagatttattggtttttatgatgcagataaataattatatgtcccatctcagccttcaattcaaacttttaaaatgtttggcttaaaaaaagaactctcaagcttctctcttcactgactcattttaaatgccctatataatgtgaacgatctcagttcatctcccgggatcattttaactaacacacattgtgcccttctccattttgatgagtggtaacagccaaagcctcagaagtgcgtttttgttgttacagtcgcttctattctcatcaagtaggtaaggtcaaattatatcgctgtcctgggagtcatccttttcatcacttattgcgtgtctctttgttgggtgagtaactccatttattaaactctggartaatgatttatggaagaaattgtggcattgatgagtgggcattcacttcgagaatcttgatgtgttgggatgttaaaaaggtagcaatcttgttttctcttttgttggcatgtctattcttctgactgctaatgcaactcaggtagaattcacatctcagtgtttaggttctcctttaggaaatactgtgaaaggcctagtggcttgtagtttcttttctttttttttttttcatttttttttaggagaaaaatgaaaaacatctctgatcacttctctagtgtttgtttatgacccctgcctaaaaatgcatggctaattctaggtacttaacagttacaaataagaagccaagacattccaccgaaggcatgggttttagaaaatcacaacagttttgtatcaattagcctacaagcctttgaatcttggatcaatgaaaaatactactttgccaataagatcaattcaatcaaattgagctcttgtgagacacgtccgcaattaactaagatataaggctgagtatggtgcctaagttagagacttgtggaagtccaggtgaatgagaaagtcacagtgctttggcataggggctccagaaagtgcaaaaggccttagaggctaattctgtgggggggaaaaatgagttttcaattctaatgaagattcttctagaaaaatgtgtggatttgaaggcagcatttatttatttacttacttacttacttacttacaagaccgggtctcactctgtcgcccaggctggagtgcagtggcgcaatcttggctcactgcaacctccgcctcccaggttaaagtgattcttctgcctcagcctcctgagtagctggcattacaggcgtatgccacgaagtccagctaatttttgtatttttagtggagacggggtttgagatctgtggggtttcaccatgttggccaggctggtcttgaattcctgacctcaagtgatctgcccacctcagcctcccaaagtgctgggattagaggcatgagccaccgcaccaggccggcagtgtgcatttatgtaattaataattggagtaaaggtaaatgtgtacattttctgggaaggggatatttggcaatggaagctgaggcacactttctctggaataatatagcttcagcctcttgcagatttagtataattagagtcaagggggctgtcagaaaggagatagaactcattccccaatcatggttgacttaacactttgaggaaatgaggtagcaagaatgataagtattttatcaattgttctgaagatcaaagcaatatgatagtttatgattcttgcttataatcccatatgactaatacagtgaagcagaagtcctattaagaactgtagctactgaaaactttgtaacagcatccactcaaattggttttggaataagtagatcatacataaacctctgaaatagcggtagtagattcatttgggttgctgcaatggggaatataattacgtattcaactttttttttttagcaaaaagatgtgcagtccacatgcaragtgagaacatggtgagaaacgttcagtgtattctgtagaggagtgtggggagccatacttagcacatacagccagcaacaccaaagttgtggtcatcttttgattgaaaaatagccctggcaaaatcataacgagaatagtaacagttttgtgataccttttgtacttttttctttctttcttttttttttttttttgagtcagggtctcacactgtcacccaggctggctggagtgcagtggcatgatcatagctcattgaagtctcaacctcctggactcaagcagtcctcccaccttagcctcccaagtagctgggactatagatgtataccaccacacctagctaattttatgtttttacactagagatgggaggccgggtgcagtggctcatgcctgtaatcccagcactttgggaggctaaggcaggtggatcgcttgaagtcaggagtttgagaccagcctgggcaacgtggtgaaaccctcttagccaggcatggtggcggacgcctgtaatcccagctactcaggaggctgagacaagagaatcgcttcaacctgggaggcagaggttacaatgtgccgagattgcaccattgcactctggcctgagcaacaagagcgaactccatctcaaaaaaacaaaaaaacgaaacagtagggatgggactctctctgtgttgcccaggctggtctcagactgctgggctcaagcgatcctactgccttggcctcccaaaatgctgggattttgctgaccctggctcttttgtattttctagttattctgtttgataactattttctaggcatataccatattctgtatgatgtgttgggtactgaggatacaaaagtgaatagagcacactccctcttgtcaagtcgcttggttggttataacctatttttctcctcaaaaccaacatactcggagatgagcacacattctaacaggaggagtagcccactttggcaagagtaaagaaaaagagatcatggagtcaatattatctggcagaaagtcagctacatggttgacattcctctctgcagggtggacccctgggtccattgaacattgctgagctattggctgaggaagaacatataaccccagcagttataccttcctttaccacctgttaggatttaaaggacaggacatctcacctggcttggcttgggagtagggtagaatcaggtatatctatgtgtctagaaaggttttgtatgacaatacaaaatctgtgaacaggagtatccctttatacataatgagggtgtagaacatagcccaatacaggagagtggactaggggaaaggaaacggtttgtgtggttttatgtgagagggttaggtaactcttgaagttcatgactggaacagacatggacagaaaaaataataaacactacgctcatctgaattctttaagcaaaggaattgggctgggcatggtgactcacgcttgtagtcccagcactttgggaggctgaggcgggcggatcacgaggtcaggagattgaaaccatcctggctaacacggtgaaaccccgtctccactaaaaatacaaaaaattagccgggcgtggtggtgggtgcctgtattcccagctactctggaggctgaggcgagagaatggcgtgaacctgggaggcggagcttgcagtgagcggrgatctcgccactgcactctagcctgggcgacagagcaagactctgtctcaaaaaaaaaaaaaaagaaagaagaaaaggaattggaagggtggtagcgcagttgtgtctattaaattcttcttgcacacaggatgttacactatattcatttgagtttcttgatgtttcacttaacaaaagccagattaatttagctttagtagaaaagaaaaacgttgttgtaacggtactaccgggttcttcataacctcaaccagcatcgaaagttaagggaaacaagaactagaaagacattgagaactccagcagtacctccattcagtctctgatttctgctttcttcagggcttctgctttattcttctttcccatgagttgctttctttaatgctctatttccttgttacagtttgtctgactagtgttgctaagttttctttatcatagttctagccacaagtagagatctctctctctgtcctacctccaagttctgtggagagataatctagttggttccacttagatcaaagggtccaaccctgatgtcatcagtggtggctagaaggaggtggtgcagggtgatgacaatgaaggtggctgtggctgtgggtgatagggtggagtcatccaggacacctctgcctccccagggctcactcctttggatgggggttaggtaggtaggtgtgtgggcgggtgatggtatttcccagagaatggagggtaccaccagagcttggataaactggtaccttataagatacataggattaaaaaagactaatacatattgagggtgtaagaaaaataaggtcaattaaataatgatgtaaaagataagcatacagcccatgatccagcttggtttaatgtttcctaatatttaaagcaaaagttgaagtattacttattctgtgatcctgtacttcttttgttttgttttgttcctcaattatttatgatataaaattttcctaggagaccattttcccatgcaggcagtataaaagattttgtattctaagtgaattccaaaacagaagaaaaacttcccatcattttcaagtaaaaagtgattgtatcattctgttgagatggaatgggatcgtagttcatgtgtttaaaggtaacattcaaagggccttaaaaaaaaggactttattttttagagcaatgttaggtttacagaagaattgagtgcaaggtacagaaatgtccttatatccctttcccccacaaacttgcatagcctcctcattaacaacatcccccaccacagtggaacatttgttacagttgatgaacctacatggacacatcatcatcacccagagtccataactgacgtgagggttcacttttggtgttgtacattcaatgggtttggacaaatttataatgaccccattacagtatcagacaatatagtttcactgtcctaaaatcctctgtgttctgtgcattcatccctccatccccttgaatttctgtacctaaaagactatatctgcttacccttgattaagtaatagattctgaaatgctagactctgtcatctcagtattttastattcgatgtctagrtatttcttcatgaatgaatgcctttggctgtttgtctcattgtgaaaagttgatttgattttaatgtaaatatatccattcctcatcttaataattttttttccaattttaaagcttgataattttttaaaaaatgagcaccaatactgtgagatttcgattcctaacgaaaggccgctgagttgtcattggccttaattgtaactagtattaagtttctttgtatttctattacttatttgtaactgctagatttattttccatagagtttaaagtctttgagttatgagaaatctatatcctcccttttaaattacttaagaataaagcttgtattaaaaccatgtgctagacattttaacttttcctgttgtttaaaaaaggccttcattaaaagttggtacaaagaaagatcttaagctaccctcattcagaatctttcacattcttaatacattgaaarcatttgtcaacacttcattactaacatggaatataagttaatgatgcacaaagtttaaaaccttatattcaattagagaacctattagctttgaaagcagtaaataataattggcatttactgaattttaaacaggatctacatgttacatttttgttttagagtgcatataacattttgcattgtgctgtgaaaacctgatgttttgagaatacagttgccttttagcatttaacctaaagtctcttcctgattttaatgtggaattatttcctccttttaattgctaacatgtttttcaattatttacacacaatttttaaggtgctaattggcactggaatagctgatggaatgtaaactgttggaatcaacattaacttaaagcacatccacagtaaatttttgtatcctggcctggaattgctggcatttgtgcattaaatgcatcactagtctagcagtaaaattcataaaacagcagtaggcggttgtagtatttaccttatcagagcctcaagatgccagccactggatctgctcagcagaattccaaagcatcctttttagtgttgtaaggttgggttaagtgtcttagacctcttttgaacaaaaacattgcttatttatgtgttgagctaatttgatccaagggggttaataaaataaaaacccaaaccattctcctaaaaccccaacattcgattcatgtaagcttttgtatctcacgcttgctttttgttttgtgcttctgttttcatcccgagttgtctttagttgtgatttgctctccttagcatgttccatgagaacccaacatgccagtaccttgcatgtgctgtgctgagcaagrcagttttctcatctgtttatccccttttccctctgtgtggttttgctgagaatttgccatttatttatcccataccctaattttacagttattcctccacttggtcatgcaatttctattgtttgttattaataaaagactttcaaaggccttaacttctctgaatctaaaacattgctggcaatcacagtacccaggacatatttttgtgtggcttcttgggttctgctctgtgcactcagattcagagactggggaggaagccttcctttaaccagccctttccatggttctgacctaggaattgtgtttggcaaccaccacagcactcaggtagtcatttccagtgatttccaccactctgaacctggctgctgaccatggaggagactatttcccaggcttggtggatcgatggcgattaacctccgttctgctaagtctctgccaggatgtcacacaggatgtgcctgtccttaagtacaatcacatagtacgttgtttagttcattatgtggcatcattttatagggcatttgagtatttgaagtggcygcttcatctaaggacgaagtcacttcaagttggcattgacgtagtttcagttggtgttactgttatattaggttggtgcaaaagtaattacagttttaaatgcaaaaaccgtaattacttttgtaccaatgtattttgatagtaattttgatattttaagtgtttttttcagtccgtttattaaaggtctcttcaaacttaaaattagtcatggtcataggcagtagttaaaaattagattctggaagagtaaatttagattttttttttttttgagatggagttttgttcttgttgcccaggctggagtgcaatggtgaggcctcagctcactgtaacctccgcttcctgggttcaaccaattctcctgcttcagcctcctgaatagctgagattacaggcgtgcaccgccatgcctggctaatttttcttttcttatttttagtagagatggtgtttcaccatgttgaccaggctggtctggaactcctgacctcaggtgatccacctgccttggcctcccaaagtgttaggattacaggcgtgagccactactcccagccataaatttagatttaaattatttgtaggctgggtgtggtggctgtctgctgtaatcccagyctttgggaggctgatgtgggaggatcacttgaggccatagtttaactccagcctggatgacatagcatctctacataaagataaaaaaatttagccaagtatggtggcccatgcctgtagtcctagctactagggaggctgaggcaggaggattgctacagccctaagtttgaggctgcagtgctgtgatttaccactgtactccagcttgggtgacagagtgagactctgtctctataataaatgatgattttttttgaagttagatttattttttgaagcactgagtgggaaataggattagaggtctttttagagatgctactgcctaaaacacaattttggacatacactattatgtggaatcttccttttacctcaagtcttgggtagtacttttttgtgtagggtcaagacagacaacctttggcagtgacagtaacactgtgttgctactccagtctatgagattttttttgtctctgcaaaatgcattgactaatcctggtggcttctcctgtgaggtcacagttcctcctacctgtggtgtcatccaatgctctgctttaagagaacctttggggaacacaggctttgctcctctctccttccccatggccacccccagtgcccatcacacgctgcccttacgtcctggcctaaccgcagcctgagctggaacctatgcttaattgctggggaaaccttctgcctctgccgacaccccgttattgcccctgcctggattcttctcgcttagttttggtcccaggcaggagtcggggtgcaggaggctttctgcttggggcagtttctcagccctctccataaacctccagcccaagggctgttgcaattggaatcaaaggtggggtcagtgaactcctaggctctttgaccctgaggtggcctgttagaatctgttatttgtgttcatttgagtgagtggatggactcagtgggtaaagaagtgactctgtatgttgtatatgactttaagttgttgtgatggattggttgagcagtcatgttggttaaaattgactgagtccacaggtagagctggtgatgctggtggctgggcttgctgcatcccaccctgcttcctggaggggctgaacagggcactgcttcgggatatgagcattttcttcttacccctttgacatacggatgtgcaaaattttgtgactttgaactttcatatccaactatgcatagccaagcaatgtgtcctataattcatatgaggtttcattgatcatttcggttgctttgggttactctttttttgcatacattttgcatttacagaattagtgtatttttgtaactggactcaggagagctgggtgaatatgagagaatgtctctactacttatggcattaaaatgacctgcgtaagtggagttcttgctcgtgcttgaaagtgaagggcatatgtaatacgaaacactgtatctgtgatgttttagattgggattgtgcagatgtgtttttttaaaataatgcataggtgaaaaatgagtagattattaaaataatgaaaaacattctgtttttgaagtgaagtcttttaatatcatgcttctgctgttttatttttaaactaatagttaaaagagcacaacgatttctttttttctgggttggaaggaaatcctaattatctccaaatatggagtgacttaaaataagtgagccctgaggaggggaacatttgtttttcttaagcttctgtgaacaatgatttccttgaaaatttttattttgcattctaatgtttttttcaaaaggaaggtgttttttttctaggtggtaaaggttccaatacattaaaggtggccggtaggccaggcgagatggctcatgcctgtaatccaagcactttttgggaggcctagccaggaggatacttgggcttaggagttcgagaccagcctgggcaacatggcaagaccctgtctctactacagatataaaaattagccgggtgtggtggtacacacctgtagtcccagctacctgggaggcagaggtgggtggatcgctggaatccaggactttgaggcagtgatcctaccactgcactccagcctgggtgacagagtgagatcctgtctcaaagataaaaggtggagggcacatggcagtgacccgcctgtctgtggtgacgtgcaaggacggtgtcctcctcaccatgcatgtgtgcatccagccctacctcgcacattcatgtgctccggatgtttgtgaaagaatcaaccagtggaccgtgattcacctcatggagcctgtgagattttcttttaacgtagtcggccaggatgtgagaaggtccagcaaggctcttgrtgattaaagcagcatgattcttgttgactggagcttacatttgtatgctggatggtttctgcttgtccagctctctgggcctggtcgtggaggagaattggaaattttgaagggtttagatgcttgtgctgtcatcagaaccttcttaccttctgtgtgctcagagacacacagaccacctcagccacagaaggagacagtgggagagtatgcctcatctaaagacagacatggtgactttacagtttgaaatgaagtttcaatgaaatttattcctgtttgaggatagtagcatgaaaattttaaaaatagtggcaaaacccctccaaatacaactctagccaatgtgtaattgagtgtattttagggtatgttataaatgttttgtcactaaactggtaatcaatgtcatgaaaaaatacaactgcatggatggggtggggctgcagggactggctaacttttgacaaagtgcagaatctcaatggaatcagcagccaaaacaaacaaacaaacaaacaaaaaccagatcccattcttaccttgtgttggtgaattgtgggctactttgtaggacttcagaagagaagagaatctcatctctgtaaagtgaaaacagggactatggataagagaatgtttttacatatttttaatgttggactatgaggtccatcaaaatttaagactttcaaaggaaaaaattatttaaaatagggttttgtacattaattaaataagactgtactgtgggtactctttaaaggcaaccacccaagttctgttgaaacacatacccataatccccacagagctcttctttcagaggatttctcatgggaacaagttctactgctagtagttgaattatctatgttatcacaattgtatgaagaaacatattggatcaagatttctactgtttgcgaaaatatcggctacaaacacacagaaatgcaactgtcgagctctgagttacctgttggttgcagttttgttctcctgctgcagcccactctctggaaatgctggggcagccactgtttgatttgtttggacctggctgatgtaaggtctaagaatggatatacctggattattcctgtccaagtagttgaaagtggactgcttttttagagtgctgaacaggaattgaatttgggacgtgatagagaccaaagaaagacttgtaggaagtgaatgtcatttttgttcaaagtatttgcaaaactaaagccaataaaaggctgccttctcggtggcccttttatttagttcctggctttttccttggaatcagagaaaagwatggcaagtttccccacagaagagagtggaatgtcaaggaagattgttcataaaccacattcattgagtgactgctgtgtttagggtgacattttaatgccagctggtagttaattgcatgctattttatttttttttctgttatcttaaaatatccttcatacgtgaccacgctattttatttattagtttattttattttgagacagagtcttgctctgttgcccaggctgcagtgcagtggtgcaatcttggctcactgcaacctctgctgcctgggttcaagtgattcttgtgcctcgacctcctgagtagctgggactacagtcatgtaccaccatgcctggcttttttttktgtgtgtgtgtgtttttagtagagttagggttttgccacattgcccaggctagtctctaactcctggcctcaagtgattcacctgcctcagcctcccaatgtgttgggattacaggcatgagccaccacgccygcctgcccatactattttaaacagtggagaaacttctgtaggaaatgagacggacaaatgaagagagaaagagcctgcctgtgacctacagaaaatggagtttcctggattaattaatgttattgcttacaatgtttgaagtatagcctaactgctataacctaaaaaaatcaaatggaaagactgtgtgcttgatcagtagaagatgagtggcccgaaggtgtccatacctttgtataatttgcttgtcaccatctggttagcttttagagcccattgatgtgcaacaatatttatgacatcatggggaattttttatgttaacacttcataatgtaggctattttttcagtagttatcaacacgtagggccagaatttgctggttaatttaatgcttaaattttttaagcatcatcattgcctgaaatatgtttttttcttttttccatctgtgcagtgcattttttgtcatcattaagcaatagcattttaattggagtcaccacttggtcaatagatgtcaggtcatggcatgggaagaaaaggaaagcrcactcagtgataacctgtcctatcgggaactcacccaagtacttactatccactaccctgccttcagtgatcctttctatgtaatgttaaagttaaacatgtcatttccttacagagcataggagctgtataactcaacgtaataaatctcgacgagttcttggcaatgatgcccatattttatgtgtgctaagattatctctagtcataattatttaatacatatggtatatgtaacatttatagccttcccaaagggaaaaatgatgtggcataattctggcagattgtttatattgttcatgtttaaaatgtattgtaaaaaatgctatgcatgtgattttgaaaccccagtgttctatttttaaatgcttgtatgtctgtaagaaactaagcacagtaagtaatccagtttttaagtatttcctcttgtaaattgctgttaattgctaatgttcattgaattgacctgctaatgggcacaggctgacaaagggagtatccctctagctttttgatgaactgttcaataatgtcagacaatccataaatttgcatgaatgtttaagtttcatcagccgttgtggtctaggcaaatttctgtgttcttattatcaaacattgagaaactaaagtttataaaaaataacttgttagagtgagctaaacatttaagaagtattgcttttgtgtgtttgatgggctaaacaattccttgtcttttcagattatttcatttgtgttctgacagtaataactgtgttttatctggctgtcaggggtccttctagaatggtcctaaattctaatgtgctcattcattgtgtttagcctaaagaatacattaaatagctaaaaaaatttatgaaataataggaaagccagttcggttaattccaatgaaaattaaaactatacatttgtacccagtgaaaccctggaacttattgatgaggtggatattggtaattgctatgatctgcaaagtgctttttttttctttgtataaaagtgtattcatctagtacattcagtattttgcagtagttatttaaattaaaatttgccaggccagcccgggtgacagtgagactcgggtctcaaaaaaaaacaacaacaaaattccacttttttttttttgagacagagtcttgcactgttgcccgggctggtgtgcagtggtacagtctcggctcgctgcaacctctgcctcctgggttcaagtgattctcctacctcagcctcccaagtagctaggcttacaggtgccagccaccatgcccggctaattttttgtatttttagtagaggcggggtttcactatgttggacagactggtctcgaacccctgacattgtgattcacccacctcggcctcccaaagtgctgggattacaggtgtgagccactgtgcccggcctaaaatttgccacattttaactgttaacttmaaaaaaaagagtgttaacttcaaaatgtaagacaacttttcatcatttaaaaaatattaatagttactatatgttggtaatttgttaggttttaaaagtatacaacatatattttatttattgtatttctaatttcattttattataagtatacttttacgttaaagacatgcttatagcgcaagcaattgaaaaacaagtgcaaagcagaaaatacatcccttataattctacagtgttaagtattttatatactatgttaatgttttggtgcctagttttgcctttctatgcctatggatatatattttaataactacataggttttaattaaaatggttataaaggccaggtgcagtggctcacatctgtaatcccagcacttggggaagccgaggtgggcagattgcctgaggtcagaagttcgagaccagtctggccaacatggtgaaaccccgtctctaataaaaatacaaaaaaaattagccgggcgtcgtggcaggtacctgtaatcccagttactctagaggctgaggcaggggaattgcttgaaccagggaggtggagattgcagtgagccgagattgtgccattgcactccagcctgggcgacagagcgagactccatctcaaaaaaaggatataaagtsgtttgtttaattagtctcctcttctgtatgtttaagggtgttttaaatgatttttttgtaaggcagttataatattttttctgtcaatgtccatgtcaacaaatttcttactgataccatgtccaaatgtttatatctgttgacaagtgctttggggcagtgctggtgtttggccctaacacckgagtttgagggagatgttactttgaaaactctactcccaggttatctgttaagttcttaaccatctgaccttgctctttagatttggaatgttgaagttttggtttgagatgaaccagttgtggaaatttgcatgatgctggaacaggtgatcaggttgcaaagatcaggtaaggtgggttttgtaggttattgttgagtcaggtaattaaataaaaatctgatgaaagaggaatcaaatagccattaacacccttcctattttttgaagagggaacagcattatgcatgttgggttttgaagctcatgtgatagaagactgaaattatgtcttgacagaaccccttttttcctaaattctttggcaatttattgagtgcacgaactcaatacaggtactatgagagcagaaagtgttcttgcctgtggcttgtagtagtggttagtggtgggctttatattaccttttagtgtctctgcttcatggcttaacttcactaagcaagaggtgctccagtgtaaatgagaataatagttactacatcctaacattactgtaagaattaaacaaaatgaatttatggatgtcacttggtacagcaagtcttcatagatactgtagtttttctttgttcttgtcctttattctcaaattgtcatctctataaggttaggacagagtttcccaaacttgagttggtattacagatttctggactccagccccagagtttctgattcagcaggactgatggggcctgaatatttacatttctaacagttcccaggtgatgctggtgctactgggagggaccacactttgagaaactctgggttaatgtattataaaggcaggtgttattttgagccaatacattatgtaaccctttctttttaaaccccctgagtaaatagcatttaagatgggcaaacttgatattatatagtgccatatgccccaagcagttaaatttgaattgttttttattattaaggaaatttagagctagaatgacctagttatttcagaaatagaatgatttagatttttgaggattttgatagcatctaagtatatacctataatattggcttaattttaatgaaagttgttaaataaacattttccttgaatgtggacactacttatgtttctagtgaattttattcacttaaacatttttttccaaaaattttaagtgttaatagatgcagaattcaaaaagaaaagttaggctaggatccttttaaatttattttatagctccctgtgaaagatctgcagaaactgagctccttttaacgtcatgatttttaccacatgttgaagataactagaattgtcaaccaagtcttgttgtgagttgccagtgatctgccatcatctgtgagaattaagcttcactaatgtaattttcttgatgagtgccagacaggagcaggtaccgaatatatggtgttgacatacttaatttagtgctctttccacaaagctattacattgactattaattggccttctgataaaatttcagcttaatgcaaatgatgacaaaaggcatcctaggatactggctgctgcttctgaaattattcacatgccctgagatctcattagtgacagtgcacatacccacttttctttggaatgtaattagggttcttttaaatataatggctaacatttagactgtgattwaaaaaaatatttttgacaaaacctctaacttaagactttgtagtttgttcttctgttgtatagttgcacatcttccatagtttgaaaagcaaagaggagcttatgttccattcttcacactctctggttttccattatattggccttgcctgggaacaggttgcacaagaaaagttcaacaagaactttaagttgcgttttggtttattgaagtatgcatggtgaacagcaagtagatttctgtcttttcatggtttggtctttttttcttcttcttttcagttttcagtcctcttctcatttattagcttatattttaggattttgcaaaatgttattcttttatttatgttaaatagaaacatgagaaaatcctttgttttttaatttttattttttggagacagggttttgctctgacgcccaggctagagtgcagtgggacgattatggctcatggtagcctcaaccttctaggctccagggttcctcccacctcagcctcctgagtagctgggaccctgatgtctggctaattgcttttttttcccctaaattggaaaaaaaaaagcctttaaaaaaagtcagaatattccttatggatccaaaccaagttcatggatgcaaataaatgttgagttatttggacactttcatatcatcttagaattttttaagtcaatcctaacatctaactcttgagcatgttctsatggcctgagtgagaattgtcttatcattaaagttcttgtgtgaaaatagtgacgtttaaacaaaaattctggaaaatagtgaatttattcacaatatgtagatcacaggaatgtatcattttctggtaagtgatgtataaatgatgatgccttgttccatctttttaaaattgtatgacacaatgctttatgcttttttttagttttacagttctctgcaatgagcacctatgatattttataatcagaagaaaattatttgtaaccatgttttaacaatgcccattaagaggctactgttacacttactttgtaaatattatcagattttgcttaaggcaatgcacatataaatccatatatgttctacaggagtgatcaccagatgggatgaagtatagggtcagttagtggcctttaactttttggttgtctcctataatggggtttctcagcmtctgcataaatgacattttggactggattattctttgttgtgtgggactgtcctgtgtattgaggatgttttgcagtttccctgacctatactgtttagaggtcaataatattgaccccagttatgacaaccaaatatgtctcacacactgccagtgtcccctgggggcaaaattgcccctcattgagaatcactacgctagagtaaaaaatacatttcacttggcagcccagtgggtaaatgcaagcgtgtgtgtgtgtgcacacacacacacacacacacacacacacacacacaccccaaacaaccttactgctttgtaagtgtacattgatatttcctattttattttgttccattctattcattccatatcattttctttaaaaatgtttgtgaggatatttttctgaatagggtggttcctgtgacagttagtcttcactttaaaatgtgcataggccaggggcggtgttgcttgcctgtgtctcagctactcgggaggctgaggctggaggactgcttgagcccaggacttcaaggctgcagggagccatgatcatgccactgcactccagcctgggccacagagtgagaccctgtcccaccttcccacccaaaaaacgtatgtgggttaaagatgagctgttttgactctatgtgggtttgcttacagcgaggcataccaagattaaagaatactgcttattctgggttctctgtggatgggatgtgtactgatgaatacatataatattggcttaattttaatgaaagttgttaaataaatgttgttttccttggatgtggacactgcatttgtggacacttaaaaattagctgcagtttaggcaccagcacttcccaggggcctcctccctataatctgacacatcacacacaaggcagattctctgaggtgtggtctaaacatgagcaggagacaaaggttgtgctgttagcatgaaaaggttgtgccttcttgggcttcagggttttgtacaaggttgagatggaaggctgcctatgaattcagaattcatatacagaagattcatatagaatgagagagttttgttgtcccttcaggaatatagattgtatcttggggcagatggctttatgtgtctcatactgcagattcgagagatttaaattttcatttctctaaaggaaacatttatagttctcagttcttaagcacactggaagttcttcccttctctttgcatttgtgtttcttatacaaataccatgtgtgaaatatcagttatactgcatttatgtacaggatgaaggtttctccctagggaataaataaaccatcctccatgtgcctcattaaaaagataggaaaagaaacgtggctttgtcttctaaaaatcagtcacaattttctatattgcatttcatggtatggctttatggaatatttttattatttaattttttgaatggctttttgtttttgctttaaaattttacttatatcttaaattaaggatgctggatcttgaaaaagttgctatggtgactatatacttaagcttgatgtctccaattcagaaatgggtcattgttctaaaacttcattgtaaaatctgttacttggaactttattttctcatggaaacaatattgcaagtaatagattccagactcaataaaaataacttatttaaatcagaaagtaaaaagattacacccccggtcccctccgagacaggatctcactctgttgcccagtctggaacacagtggcatggtcatggctcactgtagcctcgagcttcccaggctcaggtgatcttcccacctcagtctttcgactagttgagactacaggcaaatggccaccacgcctggctaatatttctatttttgtttgtttgtttgtttttgtagagacagtatcttgctgtattgtccagactggtctcctgtctcccgggcccaagccatctgctgagcgggcagctcagcctccctaagtcctgggattacaggtgtgagccacaatgcctggccaagtaaaggaaacattgtatacttatatctttgtatttatactggagtagtctccccgccatccaccttccttccttccatgaattctcatgctagaacacgaggtatagcagatactatgtttggcattttttttttttttaatatagtgtgttgtgaaccacagggagctttggaggatttgttcattccctgaatagatatttactctgtacctactatgtgcaagacactgttctaggtcctggggatgcagcagagcaatcctgctctaatgcgtgctgttgtttgacagcataacctgtaattgaatgtcctgggaagcaggaggcaggcagcatgaagaagccttagagctgcctgcagctgagggccacgaccctgggaaaggacacggtggctcctgaggcttctgttccagggactctgactccccattccgccctgcacacttggtgtggttttctagaactcctttttgaaataggaagatctggaaggtagtcgcgtatggtttcaagagagcttaaagtgacagtgtgttagtaaaatgtttcacaaccactctcagctgaggctgaaggagtggggactgatttgtagtgtttgccaatttctttggtgtacacactcccgccctggcctatttcaggaagccaatgggatgtccctgagtgtggagttggaaaacacaccatcatacacttttacatagtgtttccactgtgtagatacagcagacctaggacaatccaaggccacacagagtagtaaaatgcaacacagatgataggaagttttactttctttttgagacggagtctcgctgtgtcaccraaactggagtgcagtgtcgtgatctcggctcactgcaacctctgcctcccaggttcaagcgattctccctgcctaagccttcagagtagctgggattacaggtgcccgccaccacacctggctaatttttgtatttttagtagagagggggttttgccatgttggtctcaaactcctgaccttaggtgatctgcccgccttggcttcccaaagtgctggraatacaggcgtgagccactgcgcctggctgagttttacttatttattactctgctttttaatttatttaactgtaagtttatatatcttaatttttaaatgatgaaggtggtaataactggcttgcaaaattcctgaaaacttaagagtcctcatgagctagtcttcactggctccagcatctgggagcaccacaatactttacctaaaatcattatggctggatgttagaatactgagttgttcagattttaggcaggtaatatggaatatgtgtcataagatgtaacacctcctgtgatgtctgaggcaggaccctgtagtcaaaattttggtatttctgtagcaaaatgtgaatattcaccaagtaaataaatactacaaataatcttggattggttcagagttgcttttgccaccaaakgtacttctaacaaacttatgaaaaatttttcattttgagagtcatttgattttggaattgtggacaaggcatcatgaatctgtgtcattgtgtttgcaagtcacggttggtgttccaggtctagaagaaactgtgtgtttgctttctcacaatgagaaggagaagaaactcagcatgatctcctacttggatcattggtgccctgccggagcggcgcctcacccctgcgtttctgcagcctcttcttcctagaaggctcctgtcccggtgactcttcctgtacttcattctttctgcccagctcgtctggcctccactcctcaccaagtgcttcatgcaagattgatctgatttttcttttcactccctcggttggtgtgcagcccccgagcacatacttgaaagagtgaagtgaaacttacagccacctctgaataaacatcccagcagtggaactgcatgtcccaaagtgcttgaaatcttggcttctgtgtcttggcaaagcttattttctttcaatttctatgattcagacaggttgcaatctagtcagtcattacccacatctttctacacctattgtagcctgtttatcagcgaatgtatctctgaaggatttcagctggtaaatttgcattagggacagaggcagttgagccagtgtctcccagagtggtcatacgtgctaggtgctctgatttcttgatgttcctgttgtttttaagatctcacatggaatatttgatgctaggaaccctaacttaccgaattcagaggtttttcttcagtattactttttatgagtgggaaactataaagattacattttatttatttatttatttttgagacggagtctcgctcttgtcacccaggctggagtgcagtggcggatctcggctaaacaattcacagtcttgtgcaatattctgttttgttcatttattacacttaggatgaagtgtcacactttgtgaggtgatttttttcccttgtcatttgccacttgcctaagtgtacttcgctgtctgacagtactgaatcaggtcagtttttaggtggcagcaatttataaataaccttctctttccaaagaagaagcaacagcttattagtggtttgtttatgaagcttgcttttagttttaggcagcctggatgttaattgtctaatcagagttgtgtttcaccataaacactaatgtggtcagtgtttgagtttctgtttctctttcttggactggtattgaaagacataactgattttagatgtctaagcaatggcttttctttgtatttgctgtcatgtctccttattaccatggtctgtggggactggtgtatgaaagtgattttattgtcagagtggcttccagttcttggggcattaagacatttccagtaatttctgtggttgcagagataaagttgttagtgggaagtgtggaccccagtgtagtcaaggtctgggttggttggacttcgaatctgtgaacacccaktgtctccttggctttggcagatgcatcctggttgctccttttgtagtactgctcttatttccttctgtgtcattggctctctcattcttcaccagaaattgttttttcattttgtttttaattttctttacccagaatataactcaattcagaattgactaggtcttcaagagaaggaatcaaaaagttagaatacgggccagacgtggtggctcatcccagtgctttgggaggccaaggtgggaggatcacctgaagtcaggaattttgagatcagcctaggcaatacattgagaccctgtctctacagaaaattaaaacataagccaggtgtggtgacacgcacctgtagtcaaagctactctggaggctgaggtgagaggatcgtttgagtccaggagtttgaggttgcagtgagcttagttacacccattgcactacagccaggatgacagagcaagaccttgtgtcttaacagaaaaacaaaacttagaagttgcttcctgttatatttctaactttgaccccaattaagtttatcactgaagccctaatttttctttcgctcagttacccacctaggggcctcatcactttttctttcagtcttttgstcatgaatatcaaaaatttaatgttttaaattaattatgtcccatccaaggtgttgactgtgttgacttctgcttagaagagcagggtgatgagtcaaggccactgtgccaacccaaagggacaggaggtaccactrtaaaggttcaaccaagaatggtgagaaccataattcaagacttcacactggtgattgtattctggtgtggacactgtccacactaaagattgtgagatgttttcaggaccttctacaagaaaacgtgatggtttttgggaaataatgattcagtacttgtaatatctttatataggttttaaatagtgtttccttgtaatatctttatataggttttaaatagtgtttttagaaaactgagagattaaagataagagcttaggccttttcccacttggatacttgacatgttgtttacagtctttgaaacatgttggtattgtaaagcagtactgctagcactgttacttctttcatagatgtttggggtgattattaatggagacttagtttttctccaaattttcttctgttcagtgaagtcactgtagtcactgtagatttgaagatataacaacattaaatgatttaagtactttttrtatgcatatttgagggagtgagtaaaactattagaatattaaaaattttttttttgttatactgaagtcctacaagtggctccaatgtgtggaagcgtaggtgttgagtagaggtcaaggtgaatggtgggagagacaccaaagtctttcaacgagagttttgaattggtgatgaatcagtggtgaagaacttgggattatttttggaatgttttatcagctcttgattgacagaatacactctcgttctcagttttttttaacaacactattaataacagtactgactagatttattactaaaaaccagctcgggtgtttgtccagtaagtttactgtctttgaaggaaaagcatttttgtaccaacaaaattttgagcattgacatggagttaattataatcagatttggctttttaaagcctaactatttttttttttttaaagataattgtgggttaaacattaatttaaaactgtcttggccaggcagggtggctcacgcctgtaatcccagcactttggaaggctgaggctggtggaccacctgatgtcaggagttgaagaccagcctggccaacatggtgaaaccctgtctctactaaaaatacaaaaattagccaggtggtaatggtgcacgcctgtaatcccagctgaggcaggagaatcacttgagcctgggagatggaggttgcagtgagctaagattgcgccactgcactccagcctgggcgacagagtgagactatctcaaaaaaagaaacaaaaccccaaaacatatcttactttaatattgctctgttttaatttgtgttactgttcttcgtcatggaagatgctgaaatactctcgtctcattgcatgaactgtctggtatccgttttgacttccctgtttccctttgtgtcttagakgggggattttcaggcacaccaagacagcgttctctgatggcgataagccctttgatcttttccccaatacttaacactttttgctaatgtgttagaagaatttcttctttccattctcctaatctcttcctgcttctacccatgccaatatacttcctcaagacatatggggattaaaacgtaggaatattcaaagcagctacttatacagagttttatgtagattgttacataatttttttgttgcacttaatattattcttaaaccctgggtatcctgctcaggactacaatttgtctgcaaaatagacaaaataggatgattcattttttgagacaaggtcttgctctgtcacccaggctagagtgcagtggcatgatcttggcccactgtaacctctgcctcccaggttcaagcaattcccctgcctcagcctcctgagaagctgagattacaggcatgcaccatcatgcttggctaatttttgtattttttagtagagacatggttttgccatgttggccaggctagtcttgaattcctgacctcaagtgatcccccaacctcggcctcccaaagtgctaggattacaggtgtgagccaccatgcctggccctaaattaggatgatactaatgatagcaacaacaacatcaaccaccgtccctactgttctgcagccgctggaccttgggctcacttgctttgtgcctgtgattttgttcactgtctgcatatacaggcacatttgctcataatgacctcagaagtttatggcaacttcctgtggttggcattgtagccctcttcatttattagacgaacagaaactgaggcactgagagctcatgtgacccattcaatgtcacccactagtcagtgaaaatgtgtggatttgaatctttgtcttctgacctccagggctgccccctcaaatttctcctgccgctcttcagcctgagaggcacgcccrtcctttggagtggaactcacctctttccattgacttgacccagacagactcctcctgtctgcatttccacagcattcacattccttctgggtctttttttttttttgagatggagtctcgctctgtcacccaggctggagtgcagtggcacaatctctgctcactgcaagctctgcctcccaggttcatgccattctcctgcctcagcctcccgagtagctgggactacaggcgcccgccaccatgcccggctaattttttccttctgggtcttaagacctcctcacactgatacttgttgccttacaagtagacctgcytccaaaagttaacccgttggctatgtggaaattgaagtgcagcctttcatggaaatgggggtgtttattatctcttgccgacgtactgaatgctttctagagctgaaatatttttgccaacagatagaattgcaaaggactgttttgccatttctagtggatgtagatgtttagggcaaatggtgttaatccaaggagtaacagtgtacttttgggtcaatagtctgtttttttttgttgtttttttagatggagtcttgctctgtcacccaggctggagtgcagtggtgcgatcttggctcactgtaacctccgcctcccaggttcaagcgattcttctctcagcctcctgagtagctgggattacaggcatgtgtcaccatgcctggctgatttttgtattttttagtagagatggggtttcaccatgttgtccgggctggtcacaaactcctgagctcaagtgatctgcctgccttggtcccccaaagttctgggattataggtgtgagccaccgcaccctgcctgcaatcatatttttggtattctcatgttataattctcttatagttgatatagagtgattgaatattgcttttttaaaaaaatattttcaacttttattttggattcaggagatatatgtgcaggtttgttgcatggatatattgcgttatgttgaggtttggggtatggatgatcccgcaatccaggtagtgarcatagtacccagtaggtagttcttcagcgcatgtccttttcccttcctccctcttctagtagtgttcagtgtctattgttcccatctttatgtccaggtgtacttaaaacattgtttacttttaggttctgccttcgtacatttatatggtcatttactgaataacaatattttggtcaatattgcattgcatataggatgatggtcccataagattataatcccatattcttattgtactttttctttggttagatacgtttagatatacaaatacttaccattgtgtttcagttgcatagggcattcagtacagtgacatcttgtacaggtttgtatcctaggagcaaataggctgtaacataatagcttaggtgtgtaatagggtatacctccaggtttatgtaatrtactctatgatgttcacacaacaatgaaatcacctaaccagaatgtatccctgttgttaagtgacatgactgtatcataaagtagaaaaatggagtagaacaactggaagagatctttcagtgtaaaaatagagttagaagatattcagaagaaattcacactctgctaatatgtaactttgtagtgtcagagtgatgtcatagaattgaggaaatgctcattgatatttaagtgaatgttagaaaatgtactttttcttctaatttctcatagaacaaggatctatgaatctgccgaaagtatatccagaacgaaacaactctgtgcatgtttttatggagaaagttcatttgtagctttattagattaacaaagtgttctataagcagcacttcacacagttcacaccatgtggcacatagcgggcacatggtgtgaacaaaagaataaatataaagaaaacacgtgatgagcccagccttataagctggtgcaaagttgtctactcagaaataatagttaaaaagtatagttgacccttgaacaacttgtgtttgaactgcttgggtgtacatatgcatggatctttttcagtaagtatattggaaaaatttttggagatttggcatgttaaaaattttagatgaactatgtagcgagataaggaaaaaaatttaaaaatatatgtcatgaatgtgtaaaatatatatatagataccctgtcatttacaaccataaaatatacaaaaatctgttacaagaagttaaaatttatcaaaacgtmcatatacacagagcatacgtggtgccattcacagttgagagaaatgtaagtaaccataaagatgcaatattaaatcgcaactgcataaaattaactgtagcacagactgcactactatagtaatatcatagccccctcctgttgttacttgcagtgagctcgagtgttgtgcgtgtctgcttaaagtgcagtgtgatrctcatcatctccttgtgagcaatttgtcttcccaggaaattgcatatcacaataaaaagtaattgctcttggttctcatgcatttttcatcatgtttaatatgaaactgtaaaccttgaataacgccaagggacccatgtgaagtgccactagtgatgctggaaatgctcccaaaaaaggagagaaaagtcatgacattagaacaaagagttgatatgtaccatagattgaagtctgcagctactgcagttgcccaccatgtcaagataaatgaatccagtgtagggaccattataaaaaacaagaaaggaaattcctgaagccgttgctgcaggtatgccagcaggcacaaaaaccttgtacttttgtgaaataccttttcatctcatattgaaaatgcggcttttatgtggatgcaggatggttaaaggaaaagcacctattgactaatatgatttgagaaaaagtaatgtcattacatggcaagttaaagcaacaagaagctgaaggatttaaagctggagaatttaatgccagcaaaggatggtttgataattttttaaagaggcttggcttaaaaaaatgttcagctaacagaagtattaataacttctgccaaccaagaggcagcagacgagtttccagatgcacaatcattgaggagaaagagtgtctgcctaaacacggttttaatgcagacgaaagtgctggaaaaaatgccagcaaaagatatttattagtaaggaaaaggatcaagcactaggatttaagtccagaagagataggctaactcaattgtattgagcagaggcagtcaggactgccctcatctacaaagctgctaacccctgagccttgaaaggaaaagataaacaccagctgccaatcttttgattgcacaacataaaggcctggacactgggaacacttttccagattgttctattgatactttgtccctgaagacaggaagtaccttgccagtaagggactgtcgccttttaaagttcttttgatattgaccaacgcccctggctacccagagccccaggagttcaaggcgttgaagtagtctagttgcctcaaacacartggctctaatttagacctgtaaggctcattacacacagtaccctttggaaaggatggtcgttactatggaagggaccactgatagaacattattatgaaagtctggaagaattaccaatgaaggtgccttccttgtgatagaaatatcgtgaaagccagtaaatcccaaataacaaattcttgctggagacaactgggtccagatattgtgaatgacttcacaaaattgacaacaaagccagttaaggaaatcattaaagagattgtggatatggccaaaaaagtgggggatgaaggacttcaagatatcagtctcagagaaattcaggagctcatagataccacagcttaggaattaatagaaaataacttgatggagatgagtatttccgaaccagtgcctgatcatgaggaagaagacagagacgaagcagtgccagaaaaccaaaattacaccatctgacagaagggttctgattattcaagactatttttgacttcttttataatatggacccttctgtgatatgtgtactgtaattaaatcgaacagtggaagaagggttggtattgtatggaaatatttttagagaaaaaaaacagaaaaagtcagacattgtgatgtatttctgtaaagtgacacagtggtgcctgtctctcctgcctccctttccaccttctccacttcttctgcctctgccacccctgagacagcaagaccaacccctcctcttcttcctcatgaagatgatgacgatgaagacctttatgatggtccacttccacttaatgattattaaatatattttctgccaggcatggtggcttaggcctataatcccagcactttgggaggctgaggcaggaggatcacttgaggtcaggagtttgagaccagcctggtcaacactgtgaaactccgtctctactaaaaatacaaaaattagccgggcttggtggtgcacacctgtaatcccagcttcacaggaggctgaggcaggggaattggcttgaacctgggaggtggaggttgcagtgagccaagattgcaccactgcactccagcctgggtgacagaacaagactccatctcaaaaaaaaaagtaaagtaaaaaatatattctttgccttatgattttcttaataatattttcatttctctaggtttactttattataagaattcagtgtggaatacatataacacacaaaataggtgttaactgtttcatgatagtggctaggcttccagtcaacagtaggctttggtagttaagtttttggtgagtcaaaagttatactcagatttcgactgtgtggggggtttgcatccctgcattgttctagggtcacctgtttaatagcactggggtgataatgcacatgtgtccttgttagagaaagagctcatgggcctccttgtggtgttgagtactgctgatccagctattccatgctacttttctttccctagttttgtgaaaccctgtttccttgattttatttatattctttagtcagttctcaaaatcctttgaaagtggtttggaggaagggaagaggaacctgcaatctcagcagttacccaggtttgagttctgatttccatgggtgatccgcattcagattggatgaaacctgtggcttcaattgtacctaagtgtggacggcacccaattacaagtagttagcctcgaactcttttttgtaccatggactcccatctccagttgtgtcccaggaactggctgagagcatgtgatagttttccctgtaactgaatgyatcatcttttgtttttgtttgtccttgtgcctgtcctctgcccaaccacccaaatgacaaacctagacacctaaaatctgtcattttccttcataatggcacccatccaccacataccaagtccttttaaataagtctccattctgcatttgaataattatacatcctgattgtcttttcaccacctttccattagccttggccctcatgacttcttcattattagactaatgagctacgagtgtttaccctcctagtccttctccataccccttgaaacctcgtgcagaataaatgcaagttaaactgctgtgtgttaatgacaccccgcagttttcaggataaagtctatatggcttaacttagttgtctttcatcttcccctcttgattacctcagtctcttgaaactttctcaaatattagtaacatttcttaaaaacttgctacttacaggaaacatcctaagcaatttgtcataatcaaatgaaatttatggggaaaaaacaaaacaaaacaaaacaaaacaaaacctatcactactgagcccagaggagtgaagaagttacctagggccacgcagctggtgagttgtttgaggctgactcatcttgagagctcattcatgattagcaaccttgtggtrgtagaatgagtggaattcctggcaaaccgcaggataaagtgtctccatctccattattctgggtcacttgtgtggacgttgtcttgggaagcaaatgaaggcaagtagagggtttggctttccttagaatagattttctttaaaacttaaaatttttaaactctttgtgcttgactaagtccattagatggcactagtatttaccttccagaagattggcattaaatttcagtattaaagcaatttgtggattgggggaaatatttaacttgcaagttatttcttttacctgtcaaatatgggagtgaaaagatgggcacacaatatttattctgtgttcagwtttttaaaaacattgctaaacaggttatactaatgaagagttgataaaaagaattttattatttagttactttttgaataaacctgccagttgattaaaatgagcctaatttaatcagtattgtattgcatactgaagataatttaggctaatgtcaaggacaccgttatctctcctttgtagaaggtgttgaaataatgagagtagcaaaaaaggagtcagaaaatgaagtttttcatctktgcccctgggtgggtatttaaaaatcacacccttccttcttgcatgcaaattaaactgaaagtcattttgtactgtaatattaaccttacattttacaaaataaatttattgaactttgatcttttgctaatattggtttgtggttgtcagaatgaatttgaggttttcattgtgtgtcattttcacctggactttcattcagaacttgaagtgaacagaagtggtgggtttgatatatcttaatttgaaaataaatcactgttaagcagcaactcctagttctactttcttctttttttctgaatcacttttttcttctctatctaccctccccactccagcccatgtcttaatagaatcatctgaattcctttcttcctttaaagtagttaaacggccctcagtttttcttgtgatgcttttagatggaagctaagtcattgctgaggttcttgttcaaattgtgaagtcagcaggtaaagggattatgaactcccaagtgagtcccctatacaaagggcagrttgccttggaaacaaggctagttcttagagttggaaataccatcttgtctttaaatgccagggctggtgatgtgctgacccctgctgcatcatctctagacctaacattgtgtggagaagttttccatgactttgtgcaaattgcttaactgcttcccagttctgattgattggccaaagccacagccaagttttcttttctagtgcttctcattttaaatataatttgcaaaatttaggactaaggaagtgatccttcaagtttctattttagaatgaaaagttttccactactgattgccaaaaaataaagtataragtttaccagatggcaagacattttagtgatgagtcattttttacaagttcaacaatggaatgagtgatgcgttaaggaagcccaacgagggaatgtctcggttctgtgagatggtattacttgatggtagagacggaattacccttgtttctgacgacactggatatgaactgtagcagggagctcaacggtacaagytggtaggaggaggcagttgtagcttaagtgggactcctactttccctgcatctaaacattcgtaacttgctggtggcacagcaggaggagggtttgagggtggtgtgtgggtatggagacaagggctccccacccgtggaaccaagccctggtttactatatccagctagctgaagaggtaaaaagactagaaagaaagggccttcctaactaaagatctcagctctgaaagactagaaaggaagggccttcccactaaggatctcagctctgtttttgtggactcaccagtggatgcagacattcagaggagcaggagagcagggcatgctcctgcctggtcgtgactgtcctgctatgtttctgggttgtgcattcacattggcagcttttcatgccctgggactattacagcgtagggactgggggagatttcaggatgtgacttatgcctgggagtgaagggagtggtgtttagtggagattaggaagaagatggaaagtatttcacccccagttgcttgctcactaacgtttaacattrtgattggtgctgtgggttttggtggtggttgtcttttaattacagtttagagaggctgtgtgtgtgtctgtgtatgagagaaagagagattttggtttatctcgttaagacctatctatttcctacatggtgttggattttttttttttttttttttttttttgatacggagtctctctctgccaccaggctgaagtgcagtggtgcgatcttggctcaccgcaacctccatctcccacgttcaagcgattccccttgcctcagcctcccgagtagctgagactgcaggtgtgtgccaccacgcccagctaatttttgtatttttagtagagacgaggtttcaccatgttggccaggatggtctccatctcttgacctcatgatctacctacctctacctcccaaagtgctggaattacaggcatgacccaccatgcctggtggacttttgattaataaaaatattttggccgggcacagaggctcacgcctcttagaaaaaaaaaatcttttttttttcttttaagcaaaatccctactgcagactrtgttgttaatttaaagagttactattgagggattctcttatttatcatttgttaatgcaggcatttctggatacacgtaaacatatgaattgtcaagctaaattgttcacagattagaacactatgctgttgacccctgtttccacgttactccctcttagatatgttggaaggttggcagagtggcaaggctggaacatatacccataggtgaggtactgctctaatatcacaaaccatggggctagagcctgagacgggtttgaggtcaagtttcctggtactgtgtacgagaaagtctatccacactttgccattcttggcttagccagtaggaacattcgctagtctttaatgtgctcatggtattttagtgttcttttctaagttttaggtcttttttatcagacagtatatacccttcttaatatgctgatgaagcgtggaattaatctcrcatgcataacatttaaagttttccagtggcaagcttaagattcttgttctgtagcgagtttttattggtatagtttgtattactatgattacaaaacatcattggttcaaatatatccttttgcttactcgtccagttaaacactagctctatttaaatgagtttttaatgaaccatgctagcaagtaaggctcagagaatgattaaggatttagtattgtctctgtgtcattaaagtaaattcagtcatcagaaagcktacaaattgatttttagttccctttttgttgtgtctacgtaataattagttactacatcatcgcatttgcttctgagattattcatcttgcccatttgccagtcttaccatgttctctttgagggaacactgcatgtgttcatgataaaatcacaactcgtgccayttcctccagtttggagtcaacctatctgtatgtgattagcccatttctgaattattttgttctgtcttactgtgctatcctactttttattaatacttaagcagtagtgttatgtagttgtaacctcatgggtggataccartgtaacagtggcactcatgatagagagtagagcaagaggggtttatattatatttggcaggtgggtcagttagctgatggctatacgaatttgcatattttcattgtggtttgtggttgacatactcaaggctattagttgaacataagtcttaaactgggaatctaattagtctgaaggctcagtgggtgatagactatgtcaccctgagggacaacagaattaaatttcagctctgaaatgtaagcatcagggctagggagtatcataggtgaatatctttcactgtggtttccagatgcagtggaatatctctattaggcatgagtgttcaagaaatactttcttcttaaaggatggcattagctcttgtcggacaggtctccctttggcaattgacagatagaagcttatgatgatggtggtctcctgtgttgttcaggaagcagcgggaatgttctgccctctcctgcatgatattttgctggaaatggctttattaaagattgatctcatttagctccctttcttatgttggataatacactgtgataatctacaaaagcatgttagtgtttggttagtttttcttttatgtaagtgccacaggttatcacgtgtgctttatgggagacaagtgtaaatgaaatcttaaaaaaaaataagagatagaaaaaggggaattcagaaactcaaatacttgatctaatttataatttttttggacatccttgagtgaaagggcagaagaatttaaatgtattggtaggtatgatcctaattatagaaatctataatttataaactatggagacgaaaagtgatttttgaattagtgatagtttagaattatacatcatggaacagcctgacttcaaacttaaaaaatgcatgtatctccaactcctttagttttattgttaagtttttgaaatttatttcattatgctctagttctcccatatctgttgaattttctttctattctcttctgttacattcttctttataggcacatctgcccatgacatctccctgtcatctctcaaacacgcactttctgtgttgtgcttcttgttgactaagccgctggatctggcttgactcatggaggctgctcatgtttcttagatgaagagagggtcatggaggcatcttcaagtttattcttgtttctagtattctccaacatgttttgtactttatccagggccaaaatatgatgcctttttaaaagaattataagtctttatttcataggaaaacaattgcatatattgacattgagtgtccaatgacacccatcatrattgactttccctggatatgtctagcttatacatgaagaaagcaatggaaagtgagagattgctcacagggtgtcacattaaaatggcttctcagggtgtgtggagtttgaacctagaggtctttgagatttcacttagacttggcttaaatcagctttcattttcctgtatgagggtagaatctgcaagttctttgatccttttaagccctctgtttaagactgagtgatggcaccagcaggatgaattgtctgtgatgatcttcattaccctcagatatgttcagaaaaattttaagtggtgtcatcaaaattgcattaatttggtaaaggcaggttattacgtttgattaatcaaaaacgaacagaatcctattcagaggtctgcagataatcttagtttgtagcctgccagtgccctgtgctgtggatatgttagatgctccagagcaggaagatttggagaaaataggatctttgacttgatttcccatctcaaatttattctgtatttatttatatgctagtcagattcatctctctgaggctcggctttgcttcctgttaagtgaaataataaaaacgactttgtgtttctgtggggccctctagaggaggatgtagagcgtctgtggaaggtcttcattttgtgccatatctatgttgaacatgcattttctagcatgctgtcttctttccgtgttctttttcccattactattcctgtgtagatccaagacacagcgattgagctttgcatctgtcttctttactcttgaaactattctcatatttacaaaagtagaacgtatttatcatccatcacaatataatttaataaaagctcatagtaaacatacttattgtgttctggaagttgtataccttatctctttatttgtcctacatctggcagagcaggcataagtggctgaaaacaatgcaaattcattacctggcaattctgcttggtagaaggctgacatgggtcagaatgccataaaatcagtgtgttaaccgtgctcctttctcgaggctctaggggagaatctatrtccttgccttctaaatgctgctcactttccttggctcatgactccctttgtttgtcttcaaggtgggcagtgtagtatttctctggccatcatcacgtttctctctggccgcagccaggcgtggctctccatttttccagacttatgtaattagatggggctctacctggataatgaaggataatctttccattttaaggttcttaacctccatcctgtctgcaaagtccctttttcatagaaggtaacattcactggttccaggagtttggacatggataactttggggagaccattattctgtctacccacaaccaccatcctcttttccaaatgaggagagtaaggtctggaggtgttagagaggccactggatttaccaacagctacccaaaaaataaggtcagagctggctttgaatgtagctttttctgattctccattgctgttagccactttgctacatgcagttgtgggctttcaggtcttaattttacctattaaagggacttccctagatccaagggttttataagcatttctgtgtgatgtttctataagaggttttctgttggggggttctgatgtttcatagttaaagtgacttgtcctgaggtaggggaaagtgggtgacaatgtttagagtttatttctacttgggctattgtaggtgttatccaaattctgcctgtcttttctcatggagacttgatagatgaatggaacagaagagagattaataattattgcaaggaaaaaaatgaacattcaaaatgatctactttgtggacagcagtgaagattccatctgttaaattagaatttgagtaacatttcacaaatttaaaagacttttcctttactttttgaagggcatgatggagatttttaatacgcagttttttgtgaaggttccccccacctttttttttttttttttttgctgtgttactatatgcattcttatagagtagattttctaaaattatatatctttcccagtttaacacaaaattatttcatattgggacctggcacttaaattttggtttaaaagaaagctgtgcaattgtatgttattggcatattgcaaatcaccaactgtggttctataatgttttctaaaaatgctggagataattattgaaactaatatatatgtataagctcttccatcatgtggcatttaaagacttattctttgtaattttcaatctccattttcagtttgcagaaaggactcgattcttgagagaacacatcattgtgaaaagttaataacaaaacatgaatttcatttgcttccaattaagcaccaaaatgtcaaaacttaatatcttcaaaatgcatattaagccacacaccttatgaaaagtatgatgatattaaaatcaagtatagcaatccaaaatcttcatgcagagcttgaaatgagtattttagttttttgaggctacaaaggtaccttgacttttagttttattgctcaaactgaaactaaaattgcatgttactagaaagatgggctgggttgtcaaactagggaccatgggccaaatttggcctgtttattttataaataaagttttattcaaatgtagtcacagtcatttgtttttgtattgtctatgggtgctctttcatactataattagtgagtagagtagttatgaaagagacggtatgggccacagctccaaaaatatttactgtcttattcttttcgagaaagtttgcccattgacccctaatctagtggaatgtctgtgtctctaatacaggcagacacttgcaagtcactgtcagataaactgattttactatatatggatgttttggtgtatacgtatgcatacctttcccttttttttgtaactattaaggacttcttttctgatttatgttgttcattataaggttgagtggcccaattattcatcctactgtgatttcttcataccaattaccgtggtatggtatgaaccctggtactggttcttccagattgtttaatcagctgattctatctatacgtcagcaggtttctgagcttcctgtctctttgtgactgtacaatggttttctttgttgtgtcgatgataaatggattgatgatatataaatgttcatggaaatagcatttgttccaaacgacaaagccatttataaaatgaggactgtaattatgagtcctactcatattctgtacattcgcgtttctgtttttgacctgagacaagtgttggccttgaaaaagcttggattggaggcaggagaggggtttattttggttccagtcatggttcttttcttggaaggctaagctgagttgctaggtgtgggattgaagggtgaagctccaaggtggcagccagtgtggatccttagaagttttttactctttgggatttattttctatttttatgttatgttatgttatgttatgttatgttatgttatgttatgttatgttatgttatgttatttattttgagatggagtctcgctctgtttcccaggctggagtgcagtggcaggatcttggctcactgcaccctccgccttctgggttcaagcagttctcctgcctcagtctcccgagtagctgggattacagaagcgtgccaccacacctggctaattttttatgtttttggtagagatgggtttcatcatgttggccaggctggtcttgaactcctgaactcaaatgatccgcccgcctaggcctcccaaagtgctgggattacaggcgtgagccaccgcgcctggcctacgctttgggatttataagaagtatattagcattttaagaactgtattagttataagaagacatagagtacttttttatttttatagctttttaaaaatattataacatttaaaatttttaatttgaaataattttatacttcagaaaacttggaataatagttacagagtatttccatatacacttcatctatccctaatgttaacattttacataatcatagaacaattatcaaaagaaagaaactcacactgagtcagtactgtcaactaatcagatctcattagaattctgcctattttttcactaatgccctttttctatcctcccactccatgtagttctcattcttcctcagactcctccaatttgcacaatttcctcgttctccttgttctttcttttactttcatgacccttgatacttttggagagccttatttatgtttcagaatatccctcaatttgggtttgtctgatgtttcctcacgattagatggacgttatacatttttggcaagaataccacaaaagtaatgttatatacttcccagtgcattttatcagatggtacttgatattgctgcatcttactatgaatgacgttaacctgggtacagcagtggctgccaagtttctccacttcaacaatattactgttttgctttttagtcaaaatgactcttctggggagacattttgagctatgcaaatatcctgttattatcatattcacacccattaatgttagtatccattagtagattttacctgaacgatttttatggtggaggttgcctaatgatgatttctgttgccatcattccttctatttattatttggaatgctacagcagggaacagctgtttattctctaccatttatttgttcaattatttatatcattatggactcatggattttagtttattctttggataatgatccaatgccagtatgatttctttagtttgtaagttgtctccgctttgtccattgggagccccttcaggttgacacctgcttccatttgatgtgccttcatcatttttgagtacccctttttgacatcacaaggcattccaggcttaccatgtgtttccctgaccacagccctgaaatcaaccatttttcaaggagcccttgttcattaactggagaatggtattagaaaccacgatctgggtactaggcatgctcagtggcactggggatgccattgtttctaggatctctgtgtggacagagctgggaactctttatactcacacattcattaacatttattgatatacttacccatttgtcggtgtatttacttawctatgtacttataaaaactgtgagtttggccgggagcagtggctcacgcctgtaatcccagcactttgggaggctgaggcgggcagaacagttgaggtcagaagtttgagactggcctggccaatatgatgaaaccctgtctctaccaaaaatacaaaaattatctgggtgtggtggcatacgcctgtaatccccgctacttgggaggctgaggcaggagaatcacttgaacccaggaagtggaggttgcagtgagccgaaatcgtgccattgcattccagcctgggcgtctcagtgagtctccatctcaaaacaaaacaaaacaaacaaacaaacaaaaactgagctcatactgatgtcctggattccattctgagcaccagtttattytagctttttcttctctgtaacttctgtttctgactgtgaaaacatcygcttttattatcaaacatatttgcactcttttgttcattcttggtgtgtgtgtgtttgtgtgtgtgtggggggcgtgtagtagagtaagaattgctaaagagaaacaaatttactaactggaatatttgtatgacaggtttgtctttagcatgtatcttatgcacaaatgagaagatacatgtttagtttttaatatcccctttttatgtgaatagtagttcataccatgtgtgtatacacacacacagatatatatgtatactcatatatatacacacttttgcatttttcttttccatttaaatatcctatatttttaagaagatttatatctgtccctgacttagcatgctgtgatagcaaacaattttattattttttcacccatagacttttgaatgtgaaatgtacgacttagaattatacaagtaaagcatcaaaatttagggaaacactgtttctttgaggtttttcttcgtaaaacttaccattctagggtcatttrtatcagtatttttgcactgtagaattatgtcaaaatagtacaaaattttggtagttaattaagtgcctttatttataagtgcacatttacctttcatttctagctggtagcagtgtttgatgagcaggatccacatcacggaggtgatggcaccagtgccagttccacgggtacccagagcccagagatatttggtagtgascttggcaccaacaatgtctcagcctttcagccttaccaagcaacaagtgaaattgaggtcacaccttcagtccttcgagcaagtaagtgaaagctctttcttctcttccatttcatcttaatttacaggaataccaacttttgttattcatccatgaccctgtaaatggaattaattatctgttttattcaaaaattaagtttaggacccaggcaaatgttctttgcaagagaagtaggcagttctttacattgtaatagattaggctttctttactttcgactagtagactttccgtgactcgctaactgtaaataaggacaatagttcaagttaaattatttggattttcctttccatatgtttatctgaatgctagaacaagtagaaatgaccaaagagctttgcactgaaacaaaacgtagcatcattcattacagtcaactctgttacaaccgtcatttatattatttgaactttatctgaagagctggggaagaagagaccgccgtgtcaaagttatcttcagggatttgggagagcagtgattagaatacctccttagggaaggggaatatggacatagtgagtcctatatgaggaatcctaggaccctgggtattccagatctgggatacttgcctgaagagttctgttagccattcttggaaggtactcataaaagtcaggtatttttgctacaaatatttagtgtttatagttgtataatcttgtaattgagcagttgttaagagaagatcaatttcaataaatgtgtaaggttaaaagattttttggctgggcggggtggcttatgcctataatcccagcactttgggaggctgaggtgggcggatcacctgaggtcaggagtttgagatcagcctggccgacatggtgaaaccccatctctactaaaaatacaaaaattagccaggcgtggtggcggttgcctgtaatcccagctacttgggaggctgaaacaggagaattgcttgaacgattggaggttggagatggaggttgcagtgaaccgagattgtgccactgcactccagcctgggcaacagagtgagagaaaaaaaaaaggattatttattttttaggtacatctatttggaaacacttcagtttttttcaggtagaaaatttgggtcttacgtgtctttactgattggtagtcttcagtagatatttataaacagatgggtaataatatgtgttaataaaatatatatataattaagatacagaatataggtagataatatttagaatatataatttattcttctaaaaatgcatcctaattccctttttttgcattgatagcaatctgtagtaatttggcaatttgcttctagatgtttacaaactacttctgcttctcttgtcccttgaaggtgtatataaagagaacaaggaaagaagagcagtttaacagttagagatctgttagcccatcagaacccacaggacaatgcgccatacagagtgtagagaatttagaaggtgtagttcaagatgggatacgtaagtgatgctctagaggattgcgtgcagctacagaccagtgctaaccacttcctacaattgctttctatcatccagacaagatcggactcagatacaatgacagatgtttccaaggatacttggggtggaacagaacctataagttgttttagttgaatattttttatatgcaagagatttagctttatttatgcacatatgcaagaaactaattttgtgaaaataattttgttgactactaggatatactgtttaaaaattcttacattagatttgctttgggcagtgtttttcaaaaggtgaggcatgtaccatacagcgtatacaaaatgatgtgcaggtggtacactagttaccctggttgattttttattagttcattaagcctacgacttagtggatatctgcttggaatgatcctgtgtatacaatgtagactgcctaaatttgactcatggaaaatttaaatagtagttcaggtattcagataccagaagtttggaaaatagtgtctttatttgagtaataacactgtaatgtgtatacttaaatacagaactttctgttgtgttaccgttgtagtgttgtacttgtatcttttctaaagcaatttgtagctttaatatagccacaccataaaaaatattagaagaaaggttaatttctttatgttgrtttatgaatttgattaacatactttccgtcaatttttaccttttgactcctctggactcaacaaaatttctaacacataaccatccacatttgactggccttatgtgttaaaatttaaatggtgttttaaaccccaaatatctctttttatcttgtttttattgagaaaaagaagttacatttgaagcatatrtgttgtcttgcagccaccagtgggagaatatgcaaatcttattttcttgttctcattttggtatgctaaggtttagattttcagatcttggcaggcattgggttaagcatctactatacacaggtccataactatgtgaacgtaatgcatcacacatgagtcacctgtcaaggtgatttttgccaccgcattaatgacgttcattcagacatagaagatgaatttgtccatactggccatgccttgtgctaggtggtgagtcctgggttgagttaataaggcctggcgcttgctatcaaggagctatagttagtagtaaatggtagtctaactatttacagatatgaaaagaaagaagccaacaatatgtagagatttgcttaattgaagataaataaatttctaatttttgccttaaagaaggagtggtcactttcctgtgttttccaatgaatgaattcactcatcccctttattccataaagaattggtggaagttgagaaaaatatatagagtatgtatttttttccatagaaaaatggatacgaagtttgggtattaagataaagcctagatggttttcatagatggaattctcatcttgaggtctttttatgtttccctagaagctgccattaatttagccctgagcttttttttgtagaaaatacagagagaactctgatttagttaatcattgctcctcaacctcagaagtgttttctccccaaggaacatttatcagtgtctgatgatatttttggttgtgacaactggtggagttgggcattgagtagaggtcaaggacactggtacataccttacaagcacaggacaatccgacatcagagaactctgcagcccagatgtcagtagtgccacggttagaaaccctgaattaaatacatcattgtttgtatagtcaaaatagcagttaacttaaaacttragaaacattttgttgattccagtatattgaacagtatcctgaataacactcttaaactagaagacaaacatgtgattactagttaataaaaatgtaagaaatgagaaagttaagtaagataatccaggctgggtgcggtggctcacacctgtaatcccagcactttggaaggccaaggtgggcgaatcatgatgtcaggagttcgagaccagcctggccaacatggtgaaaccctgtctctaccaaaaatacaaaaaaattacctgggcgtggtggcacacgcctgtagtcccagctactcggaaggctgaggcatggagaatctcttgaacccgggaggtggaggttgcagtgagccgagatcatgcccttgcactccagcctgggcggcagaatgagactctggctccaaacaaaccaactaaccaacctatggagaagggagagaataggatggaggaagtaaaatagaaactagatgcatactatttccttctgtatatttgaggttggaactatattatcttttacacaattataaaatgatcaatttttaatttttacagtaaacatttcaaatgaatattaatattcatacacttaataaattttaattttaaagacaaaaaatgagtatgaaatatctgaccataaatatatttttttggtagcctaaacataacaagagtaactatttcaattaactttaaatcaaaggaatttgtacaaagggagatgtatcctaaggaaaaaaagaactgcctaatgacaaggacccggaaactgtttgtcgttggtattgttaatcttagatttttgggtgggtattacaggatgaaagagatgggaaattataatattctaattttgtcattcctggtgtcattgagtacccagtattcttagtatagaagaaaaagtgtacagatataagttaaaggagaatgaacaaaaaatggatagtcctcagtttagacatgtcatagttaattcctgatatgttttagtttttaaaaaaggaacgtggagggaagaaaaactcctgtgtatattcacagaaaaggtctagaatcaatgaccaacccagtaactcagcatttctcaatccagactatgctctggaaatagcatttttcatttgaggggatcagagcttcttagagaaatgcctgaatgcaagcctgtacaggaaatgtatgggatcatcctggatcatcctgtcatatcagaaaatagggcagttatgaaagattactagggtgggccagagggcctaggagacaacacgatgctcctgctggccaaagacgggacagtgggagcatcaatacagatagcaacagcaatacatgcatgagtgtataatgataataaagaagccagcaagcaaggagaaggctaccagtgagccatcttattatttggaaaccttataaaggaaagcaggaataagtcatctattctgcgtttccttgtagtgtggtttcacgggatatccaaatacttgctttttatgtaagtatttcagctaataaatgaagacataatggtagcattggaatattactattctgcaacttctgatgacataatggatctaggtactgatcattgctaggctcttaatgtgtccccccaaatttacatgttggaaatgtaatccctagtacaacagtgttgggaggtgtggcctaatgggaggtgttcaggtcataaagttgcttattatttggaaaactgttcaaagaaagataaaattaacagcccgggctggtaatttataaaggaccttgtctctattaaaaatcaaaatattaggtgggcatggtggtgtgtgactgcactcgctgtggctcgggaggctgaggcaggaggatttcttgagcctgggagatcaaggttacagtgaactgtgattgtccactgcacaccagactgagtgacagagggagagtctgtcacaaagaaaaaaagaaatctattctgtgtatcctttgtatgagtggtatcactgtataaccaaatagtagatgaagaggaaatcactttgtatatatgtattaaaaattacttcttagtataaaaagaagagtttagcataaaaatagcttagtataaaaagagcttgaagtactggggttactctgtcgctttgtcatgtgaggatgctgcattcattctctttcccttccaccttcctacatgtgaggatgcagtaagaaggtcctctccagatgccagccccttgatcttggacctcttgggctccgggactgtgagagagtacatttctgttctttataaattaccagtgtcaggtactctgttagagcaggacaaaatgaactaagacagtcaccattaaaaaataataatcaaggagagacaaccaaacattgtatgcctcctgatgaaaaaaacacaacatctcctataaggtagtcttgacaaaagaaattaatcatgaatctgatcagacttctaaatccaagtgcctatttacaggaaatacagaaccctgagaagcatgtgaacacgataggggtgcaatcagcctagtcaagatggtgggaaactgtgtaagacaaatggcccacgttcttcaataaaatcaactgcaggggcagaaagagatggagagggaatttataagttattagaaacttttaagagatgtaacatccaatcataatgtctggatcttatttaaatcctgatttaaatgaggcttaatacaaagaatgacatttgtatgctgatgaataaaacacaaattgggcatttaatagtaaggaattatttagatgcaataaggttattgaaattatttttaaaagaacctttaccttttagtagtatgtaatgagttatttatgattaatacaatatctctagaattttcttcagaatagtacaggctaggggatgggttacctaaagattcagtatactattctgtctacttctatatgttggttcaaaattatccttaataaaggtactttaaaaaaaaataaaggaaacacacactcaaggcacttcttagtagtttgaaggtttatttaattacttttctctttgaacttttttcccccactccatatagcaccgaattttaacctaatcttttttaggcttgaatatttttattggtcatcttatttctttgcaacaaacaaagtacattaaaattttaaatatagtactgtgtgattattaatatataatagatcaaaatagcacaaatatacaaatatgtaacgttttgctttttaatgtggaaataagtgaagaccatccaaatgagaacaggtgaaggctatttattcagagcttgctgtagttagggggcagctatcatggcttgcctttgacggaggctcccaggcaggctgaggagtgggaatgcttttgcatggagaaatgggaaggcttgagtgtgctctgattggaaactgctggcatgaggtagctgcaggtgggctacctagaagaggggcatatatggtgtgattgcttagaatttcatatttggctttctctggttgttcctacgttggaaggagagtcagaacttagggagtaaatggagttttgttacatcagtattactcaattcttctaattccctccaagttaaatgctaaacaccaattagtgatcctttgtcagaaattatttttatagatatatcaatgagctgaaaactggcttatgatatccttcttttttgttgaaaggagggatctagaaactagttgagtggcaaaagtgtttgttatccagagggatttatgttctcagccttgwggctgctgtattaaactgtgctttgtcatcctggaagtttttatgcacagttgtacatcaattgtaagattcaggacaggtgatgctttttttttgttgttttgtcattttttcgatgcgtgtgtttgttgtttgttttttaattttgcaaagcagaagagctattcaggacactatcatgactttcctggactctgggcrctttggccatcatgggccgccctcaccatagtaatatcagtcataaaattatattttatttaactttaaatatttcagtattgtactttttccattttatgcatcattgaattgattttcatggttcctaagagtatcattttcttctgatatgagaaaaaagtgaaaacattttctttgactctaaaaatttgtttttctgttttgattttaaaggaaaataaaacactatcctgggcttctaaacttattgtggccctggacactgcctcatggacatactggctttggggctgttgaccatggagaattggatgggaagaaaccacattacaccttgacccccttgttttcaggctcgtagaacctttttagggaatgatgcatattgaacacgaagagcttgacatgggataccttaaaatgtatctctcggaaggtctttgcatgctcccaggtagatgcatgttctgctctgaaggaaactggttactagatattctacataactgttggggtttttttccccacccagattttgataagtttgagtgtatattatactttatgggagtatattctacttatgctttcaacatgagcttgttatgcagatactcctttgtaatatagagtgtttacatttcagaaagagtacaggaaagagagtcacaccatcttggacactgggcaaggttagtaggtaattacactggtcgcctctttgagtacctgcctcaggatggttttgtatagtaatgagataatgttcacagttctaatgcagcctgtgacacaggagaagcactagactaacagatagttgtggaatggtgtgcgcgatcatgtctcctgagtgcagatccacttcctggggatgtgtaaagaggttgagacgttactcagcccaagtaactaggacatgtattctggaatgggacactactggccccttaggtagatggagtggaacttttacagagtcaaattggaaccatgtctgtgatatacatttaactgtctttattttcaatattarcaaatcaggcttagatctgaagctttcagggtcacacagttcaggtgcaaatcattgagtccaaggctggtgatattttgtgtatgactttttcactctatgattttttttttccttcagttcccaaggactttttgtagaagtcagatatttgagggtagcccaggtttaggtcatggctagattccttttacctcacaattcaaatttttaaatatctcctctggaagatctagactgaagaatgaagtttcctttgaaaatgatgtaagcccgaggaatggtgaaatttctggaaatggtgttgctataaaaatttggggaaacaaagtatctgatttatttcatttctttttttgctgccttttaaatcttttgtyatttttaactttttattagctatgttaattttagttaatttttatccattacttgggaaatttgtctgaaatgatggtatttaattaactgataagattttactatcttcctaacatttagaccttaaagaaatatcaataattgttatagaaagcttgtacctaagttagtgccccctcccacttcttgatttcttaattttttttcttagcaagcatatacagattgattttgtctttctagaatatccaacacctttggtatagagatctgtccttctaacatttgctggtatcagagtactattttctggatctgatgtaagtacatattgcaaatagaaataatattcctattgtatttccttttaacttgtgaagtggagcatggcatacaaatggtattctcagtatttcaaataattaccttcttactgkgcaagttctattcagcatataaaacccatccagttttgttgtagatgcaatctgattattacatgttgacaaggtcatatatctattaattggattggagatgggatacaaaattgctgtaattattgtaattttctagctaattgcagggttggtggtgaatattttacttctgcaaaatgaaaaacagtattccatcagaagttgttttatggggtttcagacattttgttttatatctttggtgctttttgcccacaaagtatctccttttttgtttttttttttttgtttttttaattgatctgaatgtcacagtgctcattggcagggatcggcaaaatcaggcacaggcagagagctgagtagtactctcagctacctctttgttcccgttgccacgttacctctattgtttatttataaattggagtactcttttttctgacctgtaacaaaggttggaggggtcagagccaattggaagaggatcctctgccctcttgtcccctgcaccccactcagaaatactctcttaagatgagcatttaagaaattaagtttatatggtttatgtgttcttttttgcattaaaaaattaagtaaattattggtcatcttagtatttgtaatacagggcttactttgcatattctcccgtagttttggttagaaaactgggagctgtattggcatttaaaaataatggtgtatatgcaagatgtgtttggagggttgcagatcagggacactgtgctactgtggggtgttggaagctcactgcagaagatggtaaaagcagactgatgtgtattccctgctgaaagataaactggaggcgcaggtgaaaattgccaaacctaatgagcaatttggcggataagacaggctgtcaggcggcggcagtgcagcagcaggagcactgtgaatcaacttgtgtgttccagagaactatatttaaataacaccaataaaatcttctttttcactgatatttgcaatcacaatgaaatttactttatccttcagatttccaattaaatggccattaacatggtgatttttgttgtaaaattattttttaatttgcctgttgacatttttcatccataaaacacgaacaagatatattttccatacctagagacataagtaatattaggttttctaacacattaataacatgtaagtgatcacctcggtggactgaaacatttcatctgtggacttgacagtggagcagacttagataacattatactctcttcagtgtatcatgtcatttatatctgcttgcgttgcccgggaattctttgctcccattgggctcatgaaaattgagacatgtgcatgacttctccccattgaggycatcaatatattgtataggagagacttagaaaagattttcataaatstgttgggtgcaacagctccttaggaaacttcccagttcaccttcctgatgtttaccatttggaaattgaggcttgatgtaaaataataacatattctgtactcatggcataactgaagcccaggtctccaaattcaggacaagcagaggtattgctgaaaatgtatgagtacttattacccctcaagatctgtggcatttccaaactcctgactttggtggggcccaagcatctttgcagttcctatctgttatgtcatcagtatttcttttttcttttctcttttttttcctttttgatggagtctccctctgttgcccaggctggagtgcagtggtgccatctcggctcaccgygacttccacctcctgggttcaagtgattctcctgcctcagcctctccagtagctgggattacaggcacctgccacaattcccggctgatttttgtatttttagtagcaatgggctttcatgatgttggctaggctggcctcgaactcctgacctcaagcctgcctcagcttcccaaagtgctgggattataagcgtgagctaccacatgcagcctggcatcagtatttctaagttgtctttaagcagaataaacatttggcccatatatttaattgcatctctgtgatgcctgaaattaaaaatcattacacatatgtaatataatattttacactttataatagtaactggtgcagtccattggccagggaagtattattttttagagatatcctgccccatgtcatcagatgtagacattggcctggcattcatctggaaaggcttgcctgttgggggtccacagggctgcctgtagggtgtccacagagccttgacatgtggcccgttaggatggcgtgagtcacagatttcaccagaatttgcctttgaaattagacccaaaccatgtgctactggaccccctgtgcacaaagctctctgtatcattcaaaacctgatgaaatcttagggaagaacaggtttacacattcattttttcccacacaaaagatttccccactgcccaattcttccctcttcacttccttttacccttgactattatatttgacttgactctgaggtcttgcctggtactgttacctttgcatgagaataagccttatttgcctaattatgttacctgtttatcggaagcagaaatagttacttacacttgaaaatttgtaatgggaatgtagctgtgaatatgttaagaaagcctgtttaaatcaaagcaagaaatcccatttccaaatggtagtaagacgtgtgttacatggagaaaataattgcctgaaagtgtttgttgyatttgccaagattagattgtacactggtcaataaacaagagttctttttttttgtttttatctttcaatccaaccaggtacttgggttcgtttttctgttggtgcatgtcacacagagacccatattgtggattattttgtcagcatgaaagcctggcagatacaattctttcccctcttctcgctgcacttgatatagatctctcctttacttcttgataatacgtttgcttatttatttgttcgttgcttttagtgtcagcagtggctttgtgtcctcagttctgtttgctcctgcctggctcctctacccagctggagaggtgcctcatatctcagaatttctgagtcactcccaatcagtgactcctttctttttcagtgactaagagaaagctgcccacaagccagcaaggtgctgataagtgtgcctctgagattctcacctctaacttttccatggaatggacagctggtagtctctctctgggctacattttaaaggaaaaaaagaagtctaaatcagtttattaattcatggtgttattttgtgtttactcaatttatttatattgattggtaaattagtaatttacaaactattatttgtcaatttattgcctacatatcaacaaatacttttcttttttttttttttttaatcttggggacaagcacattggctcagcctgtaatctcagcactgtgggaggcagacgtgggaggaccacttgaggccaggagttcaagaccagcatgggcaccatagtaagatccagtctctacaaaaagagtaaaaaatacaaatagctgtacctggtggctcacagctactcaggaggccaaggcaagtggctcgtttgaaccaaggagttcgggctgcagtgagctgtgatcataccactgcattgtagcctaggtggcagagtgagaccccatctcttaaaaaaaaaaatctgggggctccagtgtgtatactgcatggcttgtgaatgtggaagtgcagtgagcatggttttgctcaagaatgggttgatgatagcactttcccagagtaaagctcgtttttataaaatcttcatgtctcagaactgatccctgctttaactacttttctcactggcatttgaaagcagttaaccagatatgaaatgaatgattttcataactctataaaaggagcattatgacatcatctactatttctcctttcttgttctcataaatccaaaccatcaacctgtttattcttgtgtactggcacactgtgtattcccagcatagaatgcctttctacctatgttctctctaaaacttgtggaaagttttctgcaccttaaattttctaccctagggattaaacagccgctataagtcactttcccactcctcctcacagaggaaaggatgaatatgtaatagccatcacagcagcctgttgtctatcctgcggtgtgtttctaccatatcacacaaagcctytttttcttgtctttttagtagtactttggtagtaatttttttaaaaagtatgtaatgtctgtatatacaaatacatatatacgtaggcacacacagagctgatatttagtgaggttatatatggaaggattataggaatagcatgtaatttaagaataaattatcttttaaagatagatcccatgtttaagatgagaaaatacagttagatcagttagggatgcctctgcccaaccataatatggaaaaagtgtaagcaaagggcattttagtgaactgctagggtactcaacctatcatcacatttaattaaaatgtcattttgagccatggccgactcattcgttaatttgttatttaaaacagcttgagaagtattyattttaaatacagaatttgtgttaatgaattggaaaagaatattgtattgcttggcagagatgttayagcctaatgatttgtggcttagaacaaggaaaaccagctggtgatcagtttgtctaagtagtacatgagtatctactaatatttgataatagccaattttttttaataaccagaataagggagttgggaatgggaggcagaaacaaggacactgaggcataaaactgcatttaattctgagtatgggtctgtgatccatggttcagttggatcccttatgaggagagggaggaaagccagctgggcagagatatgcatgggcctgtgtctgtgcttctgccagaaaagaagtcaccagctctgccttcctcacttctcccccttgtctaagatctgtccttctcttttcttcaaaagtgggaaattagtttaatcaaagttgttgttttttgtttttgttttttttgagatgggatcctgctatgttgcccatactcaagtaatcctctctctgagcctccccagtagctgggactataggtagtcaccaccacacctagccaagtctaatgtatagtttattttttccaattttggaaagcagggtatatgtagttctgagtgtctgtgtgtgtgtgtctatatatcgctacacacacaattagtactagtctattcttgctataacaaatcatcatcatgttagggcttaagagtttattacagtcctgcatgtcagagtctggtgtggatctcactgggctgaaatccagggttggcagtgctgccttcctgcgggaggctctaggtgagaatctgttttcttgccttctccagattctggagtccacttgccttccttcgtgtatggcccttcctccatctctagcattatcaaccttgtaccttgtggacccttcttctatggttacatctctctctgactcttccgttctgaccttctcttccacgtttaagactcatgtgactacatagtcttgaattgagtgagactcaggatcatccaaatgagcccactgtctaagtccattcaggctgcttcaacagaataccttagactgggtggctgataaacaaccaaacctcatttctcatgtcctacaggctgcgagtgcaagatcaaggtgccagcagttttggtgtctagtgaaggcttgccttctcatagatctttacttctcaatatgtctttacatggtgggaggagcaaacaagctctattgggtcattttaataagggcactaatccaagtcatgaggacacagcttcccacaaggccccacatcctataccatcaccttggggattaggatttccactcttgagttttggtagacacaacattcattccataccactagggtaatgtcctgatgccaaggtctttaccttaatcacatgtatgatgtaaggtaacatggcaggttctagggattaagatgtagacatctttttttttttggcggggaggagggtgggagggcattattttgcctaccacattttacatgcatttaaatatttacggtagtgtgaaaataacgcactttacaaatacatcgtcttccatgataatatgaaatgagcatctgacctagtgatattaatgggctgatcattttgatttcagtattttgggaaggaaagtaatgaacagtaatgatctagtgagtgtattcacccattcttacattgctataaagaaatacctgggactggggtaactttcattggctcactgttctgcaggctttctaggaagcatgccattggcatctgcttggcatctagggaagcctctggaagcttataatcatggtgaaagttgaagggggaggaggcacgtcacatgacgaaagcaggagcaagtcgggcagaggggggtgccacacacacacttttaaatgatcagatatcctgagaactcattgtcatgaagacagcaccaaaccatgaaggaatcgtccccaggattcagacacctcccaccaggccccacctccagcattggggattacagttcaacatgaaatttgggcagggggcaagtatccaagccatatcagtgagtatttctttgagaccattttttatttaggtgagccatatggggcaatatttgtacaaataaaactctagccattatataattgtggttgcttgataaaaaacaaaaatctgtggtaacaaattagttatttttaactcttttgcacaattaaaagtaatatagtaattttttagtgctgtagatgggaaattttgatgagaaaarttatgtacaggttgtgaatattgtgcatgttaggaagtttcattctttcactggtactctctcttgttcaagctctcctctttccttctgtatgacttattttacttttaggcattaaattattgttacacaagttacgttactgtattcattttatgttattataatttatgttattttatgtaacttttgttattggaacataacagactggagtgcagtggtgtgatcttggctcactgcagcctccatgccctgggttcaagctgttctcccacctcagcctcctgagtaagctaggattacaggcatgagccaccacacccagctaatttttgtatttttgtagagatgaggtttcaccatgttggccaggctggtctcaaactcctgaccccaggtgatctgcctgccttgacctcccaaagtgctgggattacaggtgtgagccaccgtgcctggcctattttagacaattttaataattctgttttggacagaaactttaaaaatggtggaagattggttctaatgagtcttcatgagcacattgacctaaaggccatttttgttttacaacttactttcttctttcgattttgaaaaagtgcattcttgggcatttactaatcttttagataattaaaattttcttaagcatagcacccttttctagttttatgtgtgtcctacattctgctttattttgtagcttcttccagacctctgtagcacataaggttttataaagtcagaatcacatcttcatcatccctgtgtgtgtgtagcacgggtttgatgctttgcattcagcaagtatgtagtcagccctctgtgcctgtgtgttctacatccatggcttcagccaacatggattgaaaatgtttgaaaaaaattgcatctgtactgaacatgtacagactttttttcttgtggatgttccctaaatgatacagtataacaactatttacatagcagttacattgtattaggtattataaataacgtagagatgatttaatgtgtcctggatggtgtgtgtaggttatatgcaaatactatgctatgtcatatccaggactggagcattctcaggcatctgggaccaatctcccacagacactgagagatggctggactctcctttcttctcagccctgtcaaactagcagtgacatcaaaaggaagggccgcatggtcttgggcagagttggcttagagaaatagagtatgcttaattcatttcaggttctagataatgcagcatgataaaagactattcatatgttataaatataaaatttcaacagatccatgtttaaatgtgtacttcatatcttagcagattcctttaatgggatttttttttttttacactgaggaaatatttcacactattttccgctggatgcaatttaaaaaatctgtttcaatttgtatacattctccaaggttgtaattttatatggaaacctcgcaaataactttttgtgtctatatcctcacctggtatatgcttgctgagtgtccagagcaatagtctatcatcgtagaaaatggagatacccttgattagaaaacatagctactgaaagcacatctgaaacaataactatttggtttttaatttatcatccatcttcacatactctttttattgtcaaagtattctagactgctgcattttgttaaaatctaagaacaaagctttattgcttaagaggatgatttggctataattttgtagttatattattccttatcaacttaaaaaaaaaagaacatgtacttagagaaaaaaatcttgagctaaacaaattgagtaaccattgggggcatacttttattctcaggaacttggctgctgtatgtcttcctctggactcatctacagtaaatgatgtttcaccatctattggtaatsaaaatggtgatatgtgtgttatactttcttatgcaagagtcagggctattacttcagtgctattctaagtgtctaaaaaaggtaggagtgtgtgtatgtgttgcagtgattcattacctttatttttctatgttcacacgtaagtgattatccttatttattggctggaaattgagtattaatgtaggctttttaatttttgtttattttttatttctttttgaggcagagtcttgctcttttgctcaggctggagtgcagtggtgcaatcttagcttactgtaacctccgcctcctgggttcaagagattattgtgtctcagcttctcaggtagctgggattacaggtgtgcaccaccacacttggctaatttttgtatttttagtagagacagggttttgccgtgttggccaggctggtgtcgaactcctggcctcatgcaatcctcctgccttggcctcccaaagtgctgaaattacaggtgtgagcaacactgtgcccaggggatagtggcctttttacttcaagtattcatagcaggaataaagcgtgacataartggcatgtatgaaatgagaatgatgtgtataaaactcatgggacagtgactaatatgtcttaaataaatgaaatgttatattccgtggattattttctagatttattttcctaaacactgtctttgaaatgaatacctacataccacacttatgcatctccctcagacttttaaaagaattattaatcaaatgaagctgagaaatactgaagtgtctctttctacatctgactgcttcttataatttgctgtcagttcctatgggtttcaagcttrattctatgctactcgtatttgaaatttttgttttttttctgcctacttacctacaatcttattggtaaatataatctttttgaacatcttatagtaatatatcttatggaaatcaaaataatataagaagttctttgaggaggtaggagaggggggaargcacttctttacatttctttgtcacggtttttgtatattacttcrgtgccccttgaattattttccaagatctaagtatgtgtgggtaaaatgcaactgttttacatgtgtaactttattataattaattgtgtttcatcttttttaaagatggaaaaaatcacactgcaatagtatttgttacttcttttcatagtcaaagcacatctaagtaaattgagttgaggccacatcttgaccygctgatcatcttgttaaatttcatgttgcttcctagctcatttaacttgtgaggaacagcattttaggaggcttgatttagcaattcttttcagtaaaaccatacctcttctcaatgaatgttgtataaagtcagcacaacctgttccaaagagatttattacactgtagtgcagaaaatattgtagaaattattatggtgaacgtgtgacttcaggcagcttttctttaaaaaaatataaccttaattgtggggaaaagctctcactgtcatccttcagtatcgcttgggggttggttccaggaactcctgcagataccaaaatctgaagatgctcagtttcttatttaaaattgtgtaatagtttgcatataacctgcacacatcctcttgtacactttaaataatctctagattacttataaggcctaacacaatgtaaacgctatataaatagttgttatactatattgtttttatttgcattatttttaatttttgcattatttgttatttttattttctttttcaagtattttcaatctgttgagattcagtccgtggattcagtttgaatccatgaatgtggaaccaacagataggaagaccagtggtatttagtgttactacattggatatttttcactagtcttctgcattgctggatcacattatttcattttttattacagaaaattttaaacatacagctcaactatcagctctaacaattattaatttatggctagtcttgctgcatctatactcctacgaactcatccaaacaggattattttgaaacatatttcagacctcatgtcacttcttctgaaaacattttagtatacattttaaaaatagtatactattttkaaacgttaaaaatagtactgtttaataacaaaaatacttaagctatatgtaatagtgttattaaaatatctgaatgttttgtaaatgttgctttatatttggctggtttagaatccacacgaaatccacaccktacatttgattgatatatctcttcggattcttttagtctataggttgttcctcctgcctgacccctgtgcatgtgtttcagtttcttcgttgaaattgggcttgctttctcctgcagcttcctcctgtcttgacttcrctgaatccatccctgtggtatctaccatgttctataacctcggtgtttcttataaactgataggtggatgtagagtcttaatataactccgatttcaatttgtaataatattatctccaggcattgttgtatggttccatcagcagatggggacagtgtggttgttcatcattttgtgagcagcccctggtaattattacctggatcttttatctgtctacctgttattactgtaattcctttatttagtaggggaatatttctataaacagaaacttttccttctcagctattcttgccagttactctgaggtatacagttcatatggaaagtgtaggccaaatgcttaatttcatctgtttctttatcagttttgtttttgtttcttttttttttttcttcttcttcccttttgagacatggttttactctgtcacctaggctggacacccagtgcagtgatgcaatcttggctcgctgccaagacctcctgggctcaagcatcctcccatcttaacctcccaagtagctgggactacaggcgcacaccaccatgcccagctaatatttgtatttttgcagagacagggttttgccatattgcccaggctggtctcaaactcctgagctcaagtgatccacccaccttagcttcccaaagtgctggtattacaggcatgagccaccatggctagcctcttcctttattggtttcagaaaaaataagttggttttctggggccacatcctcacggttcatgtttactgttttttttttttttctttttaaaagatatcattaagaactcacaaacatcaacatagttattactgcagccggttgcattattcttcttactgatgtttcagttgccccacatttgaataaccagacccctctaagctgactcctgagagctgttggtagcagcatcctcactttctgctgtgacagtgtgtttcatgctcttctaatatattttctgccccatacctggaatcagtcatttctcaaagtagccttgcccctattaatgggaaagggtattcagagaccactatttggaattattgcttttattttgcaaatgcttaaagtaagttaacatcaggagcacgctggctctaaattcagttttcacagctatgtctgaaaatgtagtgagtctacccttgattatccgagtgattaatctttccaagggtaccaataaatgtgggttctccttgccaattcagattttcctttatttggactctgatgaacttcttacagaactgtagcctgacgtttctgtgggcactgtgactgtgtgttggatgaggtcttacttggcaggtgtcagaagcaatgatgggcagatctgcttgtctgcagtaggatgccagaacacagtgaccactgtgcttgtgttgagttgtgggtttttgtttgttttttttttgctttttttgtttatgggtacagatagttaggaagcaatggtatctcaatgagtttaacattttcttttgccccctgygaaattgagtgccaggaaattgggctcaaccattgtgttgtcttcagtaggcaaattgggttggggggctggaaattggtcacagtcatggtgctaagttttgaagaggtttttcctagtgtggaatgtctgagcatgagcttggtcttccctgacagtggaattggctccagctttgcagaccttatcaatcctgttaccagtgcatcctacatttcatctcccaaagctggcttcatcagtgatctgtgaagtgtgatgcagaaccattgaggcatggaaaacaaatggggacctttgatcaacatggggattaggggaacaacaattattaaaaaaatatcaggacttaacatatctgtattttattatctcacattgtaaaatttcctattccttgtatatgtttaataatgtttgtattagtggaattgagcatttaaatgatcattaaataaaagtcctatacagctgcatgctcagaaagattttcctaacagggctatgttatcaagaaagtttggaggcactggacctgctttctggtcactttttctgcatcttttcttgggcagtcttttgatccattctccagtttagtcaagtgatcgtttagtaattcacatctctcttccttctacctccatgcttaaaaaccttcagcagcttcccagtacggttaagaatactggtatgttttgttcaagtgtataagaattgttttgtgtctttgcagccttgtctcttctacctcatgactagcacgctgggcctctgaatttcttgsatgagtcttcttcctgcttaactctaggcactctcttttccctttgtctggtaaaacttctctttggtgctctcctgtctagccttacttatgccataggcatctggtcaagtaacagtttcttcagtaggtgtttccggattccatagagttgctacataatcctgtagtgctgtgtatttttggtgactacgggagagtagggaatttgtgtgggttctctagatccactgctgtgttgggaaatgtttaatagccggctctctgaaaaccgcagaaacctggctttgtcacattttcccatttccatggtgyaaatatgagtattatggccagattcaggctaccaaattgatgtcactgaatgttgagttgggatgagatgcatggtagcaaactgtaatatggtatttccatgataatagatggagaaggtgcatcatgtgtgtagatactaataaaatatagtaaaataattcgaacrtgaagatttttgagtattatctttgttttaatatagtttagttggaagtttatgtactataattttcttttcttttttttcttttttttttgagacagagtttcgcttttgtcgcccaggttagagtgcaatggcactatcttggatcactgcagtctccgcctcccaggttcaagtgattctactgcttcagcctcccgagtagctggaattacaggtgcctgtcaccacasccagctaatttttgtatttttaatagagatggggttttaccatgttagccaggctggtctggaactcctgacctcaggtgatccgcctgccgtggcctcccaaaatgctgagattacaggcatgagccaccatgcctggcctgtattataatttttaataattttatttaaccatcaactctcagaaattcctgaaaatttaataattctctctcatgcaatggtaggagccaggagtagagatcccctgtgccacacgcagacaggtcacatttttttgaattgattgaagacattggaataaggtaatgtatgcatgtgcttccatttttgggcatttactttgctttgcattatcaacttattcttttataacttgcatgtcttgcattgtactagcttttatatgaggagaagtatgtatcacagagggaaatatgcacaaatgcagccagatactcaacaccactccagtagtgcaactgattgactaaggcattaacattgatctaatgaagttcagtggcaggtggttggctcagaaaaatgaattataatacattaatcttgctttgtggatatacaaggtagacagaaaaaatggtaaacactttcgttcttggaattcccattttgctattcattccctcattttccaatcattgagaggtgaattatcagaaaaacgctttagcgatatttgcctgcagctactatattggtagttttgactgaattacttaatcgattcgacctaagtttctaaattgactaagtgtttgactgaaaagattctttggaagaaaatacagatgatttcacaagattatagtgacatatcgtgtgaaagtgtagattaagggtacccaacacatttctgttaatccaagtaaatgtttctgatcaggatataagagtaaatgccatcagggttacaaaagctggtgtaaaatttagacattttaatagccatgtggtaggacatttcaaatattattttctaaaggttaactgtcaatatttaggtcctataaagaaaaagttttaaaatgctttagaatatagtatttattttgtaagcaatctttctagacagaacagcccttctatattttatttccaaaaatcaaaagctgttagggacagaagtttttaagatagaaggtaagccctttttgttatagatgaggaaactagagccatgcgtgaatgtggacagccttgttctgtttgaatcggtgttttgaagtgtgtggtttaccctgtgaattaagacctgagcaggtgcgagcctgtctttgcagcagatgatcttcagccacatgcttcgtcctgtgctagcccgtcatcctggatgactcttctttttatgttgattcartgtatggtaatgtttgcagagaaaactaacgaggcatattagaaatccgtactaatgtagatacattttgtaaaatcaaataagattgatcaccatccctacttaattcagagcaaaggaagggaatctaatttttctctttttccacacctcgtttgctgtaatgaaaatggcattctgctttgaatcatttccaaggaaatgattttcaatattgttgtctgtgacattttgacaattaaaatgcatttcttaagcctactggaaatgctgcgatgctttttcttgttttcattttttttccccccagtggttctatctgtgcttgttgcctaggaaaccacgactgggttgaattctgtttgcctggttgtctgacagactggcaaagttatggataaagttcttggctttagagttgtaaaagtgctacttaaataacagaaacattttatcaatattaaagtgctttatctcctcaattaaaaagcagccaagcatttgtttggttttcttaaaatgctaaatagagaattattgttttccttgattattattgaaacttcctgttttgtatacaaatttgcaataggatttgaattgtcacagtgagctagttctaaatatagcactttaataaaaaaatgcttctgtaaatttgtttacttccttggggagtcatgtgcatgtgttatcattcccaagagggacaaacataaacatatttcatgaaaaaattcaaagaggtgttagaaaatgcagattattttgccctatgtttgataagtagaaaaacaattatttctatataactttttcaaattaaagttagaaagaagtagtggaaatccctcagatcttttctgagttgatagaactgagagtatatagttaatggttatttaattatactttagctaaattcagtgtccttgcttaatactaaaaaattaattacattgcttaatactaaaaaaatttcagagagatgtgtttttggatgatcctgtgaccactgactccatgaagctgtagagcccttgaaatgaggcaagggtaactgaggagctgaatctaaatagccggtgtggctagtgactccatcgtctggggacttgatggaaatgcagagtctcaggccccatccagacctattcattcagaatctgtatttttcatgaggtcccttagggctgatatgcaatgctgtctcttctagagcaataattctcttctagagctgtcttggctgcatgttacaatgacctgaagagcttgtgaaagtaattcctgggcttcttcctagaccaaattttcagtatttctgatggggatcctggaaccagcattttacagagtattcccacgtcattttaatgactggtgaagtgttagaaccacatatataactcaaagagtatacaaacaagtgtgacgtttggatggggaggtcttaagtactgccctggattttccactttttgttgaggttagtataggaacagtatatgtaagaaagagttagtctgtactgagtgctaagtatattatcttaaattgactaaacatttgactgggaagactcttttggtgaaaatacacaagactatattgacaggctgggcgtggtggctcatgcctgtaatcccagcactttcgggaggcaaagatgttagtgacatactttgtgaatgtatagattaagggcacccaacgcatttctgttaatcccagtaaatgttctgacatagatatgaagcacgagcattttgttttgtgtacacacaccctctccctctgtctctctctctctctctctgtaatgtgcccttccttcaatgtaccactccccatttcttctyacaaatcccctaataataaaataaattgtgatgaattttctgtttgctcgtcttagctaaagggaacttatttcattcttaaaatgtttttcatggtctttctttttccctgtgaagaatgattacaagatccaagcatgagatragtcattgtctaatgaatagtgtcttttcttccagctctgacttgcagtgtggttgagttcagctaatgtgcatttactgcactcctaccgtgtgatggcagtgatggtagatgtaggtgagaaaggtgcaaataaaccagagagtctttctttcagttcttggtgttcctggatttcatgcatactggataggagcatgttttctgtggcttgacgactgaggcttggatttttatctccactaattattgttagattaacttttgccaggatatcttatctctgtaacaccaagtcttcatacctgtaaaataggaatacctataaaatgggaataataatagaacctattttatagccttattctgaggatttgatcagtcatgacattaaggttcttagcatatacataacccatagtgaatgctcaacaaatgttagtgattacagacttaattggctcattataaatgatcaaggcatgtttacttttacattactctttccttaaggaggagaatgaatggtttagattagctatgaaagatctctgcactttgaaggtaatataaacagacacgcagccatatgtttcagagccatgaagtcttattgctgccttggagcaaccagttggtgccaaatggctttattaatcgccagtgtgtacagggttgtgtggtaaggaattaatttgaaactggaacagttaagacagagaagtggataatgagccatttgaatgtttttaaagtgcttccgtcatactccccctgtagaaaataaagcttttcaacttccggcagcatccgatcctttacttcatttttgttcctagcactgatctcttcgtggcgtagtctgtgttcacatgtgtatgctttgtcctgtcctcaccagaatggaacatcctggagggattattggccttccagttcaaacgattcttctgcctcctgcctcagcctccctagtagctgagactacaggcatgcaccaccacgcccaactaatttttgtatttttagtagagacagggtttcaccatcttggccaggctggtctagaactcctgacatcacatgatcttcccacttcagcctcccaaagttctgagattacaggcttgaaccattgcgcccagctgtagatatttgtctttggaagaaagactttgtaaacctccttagaaagcttttagtggggcgggcaagcggcggggccatgcrcatggcatgctgggctgtgggcgctggctgctgggaacccggcagaacatggccgtgcatgtgtgctgaagggagaggtggccacagagatagcgtgttcctcatgatcaagtgccactgcatcaccatcttcacagatgccagggtgtctagcatggtgtttgagttgaagtgcatcgtcgagggcatcctcagcagctgtacagggatgaccagctcttggatgttggcaagacgctgggagagtgtagcttcaccagccaaagtgcatggccacagccccggccacagcggtgctgggcttccaggcggacgacggccttgaggccctgcacatcccatggttaggaagccccaggacacaggaagcagtgctcacgagcaagccgtgcacagagggcactctgcgtgtccgtgagaggcccacttcccccagtaaaagagatttagatgtcgggggcaaaaaaaaaagggttttagtaccatgaagattcatttgcatcccagtgcctgtggtcccagctgctcaggaggcaggggtgggaggatcccttctgcctgggaggttgaggctgcagtgagcccagattgcatcactgcactccagcctgggtgacagagcgagactctgtctcaaaaaataaataaataaaaataaataaataaaataaaaataaaaaattcatgtgcaagatgaaaagcccagctctgataaaaatgaagtatggagattacagtggaagtttaacacctcatagttgtagagaggcttgctgctgtgaagtaattgttgatggtcaacatacactgggataattatgaaatcttgtaaagtgcaggagcttcaaacgcacatcctgaggtgacagaaaactggcaaatgaaattggcaaattgctagtccccaggtaagagaaaaagattacgcttttatatagtattgtggagtaaaggttataataataaagaaatgggggaataatgcttgacagttactgctgtatttgaatccttaataaaataatagaagacaaatgtcaaaggagagggcattgagcatttagagaatatctgcaatgcaatcaatagtcaatgtcaatttttgaaagacaaattacttgttagatgaagttataattttaaaatttaattacatgattgttgaactaaattggtaaaatgaaagtgatatgaggaatttggtgcagatatacctataaaattatatgtgaagaattaatttagattgactcccactcagatattctcataagggagtcagcactgcatgaaggaccatagtgcaaaattaatagttaaaaaaaaaaaaaagtaaaacctggatgggatttctagccagggagtttatcaccaatatttgaagcggcaattctttgtccttttcctggtagaaaacccttttttttgttctctggggccttccaacatctgtaattgtttctttgctacagagattgccctttcaatacttgagacaatcaatgtgaaaaggacagagatagatggaagtcctgtatctcaagatggaartcattcattttcttaatttatttatacagtaacactttaacaaacattttctcggtgtcctttgctggattaaaaactgggggtagaatcacaaaatttaatgaggcagacagatgagaaagtaccagatctaagtgaagtcaagcatgatttcacttagtctgtagaaaccttttaaacttctcagagatggcaatgcctgcccggccgaccttagaaaagagagtgagtgagaagaggcccagaagagagaacttggaagcctctttggccttctgtagttgcagagtgttccagttgagtgtaagggtgcagagacattgttcagctcacagaggatacaaaaatggtcttgtgccccaagcagaccgaaaattctgagttatgacgtctgatttgtggtttacaaaaggtatcatgagtgctttgtagaggatgacttggagacggccaggcctggagagagagaataaatcaagctgagaaatgatgaggatccgtgactgccagtatgaagttcacatttttaaaaatcacagctgaattatatatgtgtacatatataatatatttattttatatatagcaattatatgtatatagtrtgacatagccctgctgctcagagtcacaaaagggtaatggtcactcagaccagcagcactgatgtcaccaggacaatgaaatgcagaatttcagatcctacccattccagacctactgaagctctttaacaagattcctaggtggtttctgtgcacatcaacctttgacagtctctgacttagaagacactgagttgcctcatccaaagctaccttgtttgctttgtcaccttctaatcacattgtttccaatcacatctggtacagccatactgaatttcttgtagtttctttaattctcttgaatttcagtgtctggcttttgcacatgcagttttctctgctcatgtattgtcttccttctgccccattcatctggccaggcaccaccaccattgccctgaaacaaaaccaaaacagactgtaaacaaaaaataaaattttaagacccctaaccaactgaatggacccattcttggccaagaacataccaatgtaaacctgaaaactagttcgggccatgatgggaaagggggattggatgtacctttttataccctcctccctttggaattcaggtattactgaccagcattaacattaaaacaggctggctcgtgcctctaatcccaacactttgggaggtcatggcaggaggatcacttgagcccaggattttgagaccagcctgggcaacatgacactgtatctacaaaaataagaaaattagccactcatcgtggcacgcacctgtagtcccagctgcttggtaagctgaggcaggaggatcgtgtgagcctgggagttcaaggatgcagtgatctacgatcrtgacactgctctccagcctgggtgacaaagtaaaaccctgtctcaaaaaaaaaaaaaaaaaaaaaaacccaaaacgtttaaacagccacattatagtctctttgtagcaataaaatatataacaaaatgacaggtagctggaccttaaagaaatcaaagtattttaccccaaaatatatttctgtgatgtattttgaaatggccccacaaatctctctcgcaaggagtctgacacctttttaagtctgattaaaaatcatttaccatctattctccctgaagcctgctacctggaggtttcatctgcatagtaagaaccttgggctccacaaccccttatattaacccagatactcctttctgtttattccagatctttagataataacttaactctttcaaccaattgacagtcaaaaagctctgaatctatgacccggaatcccttgcttcattgtcctacctttccaaactaaaccagtgtacaccttacatgtattgattgatgtctgcttataacttctgtcccctaaaatgtataaaatcaagctgtaacaaatcaccttgggcaattgttctcaggatctcctgaggctgtgttgggggcatatctttaaycttggcaaaaatgaactttttttttttttgagacagagtcttgctctgtctcccaggctggagtgcagtggcatgatcttggctcactgccgcctctgcctcccaggttcaagggattcttgtgcctcagcctcccgagtagctggcgttacaggtgggcaccaccacgcccggctaatttttgtatttctagtagagatggggttgcaccatgttggtcacactggtctcgaactcctgacctaaggtgatctgcctgccttggcctcccaaagtgttgggattacagatgtatgccactgtgcccggcctaaacttctaaattgattgagacttgtctcggatacttttaagggcctggcctctgtggatatgacagtgaaaggtgaggttgtctaggagtgggttgccaatgaggaggaaggtcctaaaacctaggagggcagcatggcaaacacaatgacacgatctggcagccacgaaaggagcttgtggaggagtggtcagaggctttccacaagaggtggcctgcaggagaatgcaaaaggttcataggtaaaatttagcagttatttttcacttgaagtctttgctaaagctcttaaagacagtgcctctcttagatgttcctgtagtgctgtgtacttatgaagcagcaggatcacgctgaagtgctggatcatgtctacattctccagggcactgaaaacttcacgagggcagagaccaggtctatgttgtatattatgagatcctagggacatggggctcaaaaatatgggttgataaagggaaagacatttatggcactcttggcaaaacaacaacaacaacaaacaacaacaacaaaaactatgttagttgagtactcgagaggagcaatgaaacagcacactcctgtcaaaagattgcctatgaagaaaataagcacaagagcagtatctggaatggaatctgacagagggagtggtatagttcctttaaagatttatgagagtcgttcatttagcaaatatttacctaaaattctcatgctttgtgaagtccgtatttgtgattttagctgtttgctaaaatttatttgtagctcctaaattaatactcggggcacctttgtgctcattcatgaacatgtgttggatggcaaacagtttgagtcacttgactaatatgtttccagttgaggctgaagaatgggaaactgccttcttgctctggttttcatattttaaaaaagtgtccttttcatgggctatttggtgccatgtttttcgtgctttttgctggtgattttgctgttaaaatggcgcccaagcataataccaacatgmtgtctagcattcctaagcacagttagtctgtgatataccttccggagaaaatatattattaggtaagctttgttcaggtatgagttatagtcctgttagccgtgagtttaatcagcaatatatattaattaagatgtctttatacagatcacacctaaggcaaggctctgtattgaatggtgaacaacagggttgtggtcagaggctccacctaaccttgtatttctcctaggagcagtggttgagtatttgctaattcagtgtttacagttactttatataacataactattgtgcaaaactagaatcaactgtatttagttttccgggcactgttttgggcactgagggtgagacagtgaggaagaaagatacgttctatccccttgtgggtcttacattctatctggggctgttggccatatggaaatagaaaggtagcacatctcctactcagcacatatatgaggaaaagcaatattataaataacaatagcataagcttccccccttttttctgtttttttttctctctctttttttttttttttttggtgacagagtctcactctgtcgtccaggcttgagtgcagtggcatgaaatgggctcactgcagccatgacctcccaggctcaagcaattatcctgcctcatcttccagagtagctgggaccacagatgcgtgccactgtgcctagctaatgtttgtattttttgtagagacgaggtctcactatgttgcctaggcaggtctcaaactcctgggctcaagtgatccacctgcctcagcctcccaaagtgtcttttttctttctcatgttttgttcatttttgtttatcatctgcaagagaaacacatttttgtttgtttgttttctgagatggagtttcgctcttcttgcccaggctggggtgcagtggtgcgatcttggctcaccgaaacctctgcctcccagattcaagctattctcctgcctcaacctcctgagtagctgggattacaggcatgcaccaccacacctggctaattttttttttttgtatttttagtagagacagggtttctccatgttggtcaggatggtcttgaactcccgacctcaggtgatctgcccgccttggcctcccaaagtgctgggattacaggcgtgagccactgcaccttgcattttttttttttaattttaaggaaaatagctcactcttacctgttcacatgcccctctatcctccctctaacttgcttcttttttcttctctcagtttctttccaccttatattcccctggtctcagcttcaatctcctcattgctcattaaggtatgtttctgaaagtacaaaaagaatctagaaaaataattccataatattctctcagtgaaagtctctggtaccaggtatgtaaatacctttagttattttcatctgggcttctcatggtatttagtactcttctaactgtccctgttggacatttactaacatttgccttttacctgtcctgagccagtcgctggggagtagcaatctgttagaggatttgttcctttttgaatggtcagaggcctggggcaggggctcacacctgtaatcccagcgctttgggagaccgagacagcaggactgcttgaggccaggagtttgagaccagccttggtaatatagcgagacccattaatttaaaaaatagaaacattagccaggtcgggcatgatgactcatgcctgtaccagcactttggtaggctgaggcgggaggataacttgaggccaggagttcaagaccagcttagacaacgaagtgagaccctgtctctacagaacataaaaaaattagctgggcatggtggggggcacctgtgggtccagctacatgggaggctgaggcaggaggattccctgagctcaggagctcaaggatgcagtgagcaatgatggtgccactgcagtccactctgggaggcagagtaagatgctgcttcaaaaaaaaaaaaaaaaaaaagataaaaattagcagggcacagtggtgtgtgcctgtagctgagcatggtggggggcacctgtggtcccagctacataggaggctgtggcgggtggattgcttgagsccaggagttaaggctgcagtgagctatgattgtaccactctactcccatttgggagacagagcaagaccctgtctcaaataaatgaatgaatggtcagaatgggattcactttagagtgattttttttttctacttttctacagtaaatgactctcaacatcttggccccatatttattagttttgaaaatcactaggataatgatgtctagttagatgctaatcaaatatgtattggttgaagtagctggatggtagctctcccatagcaaaatarggacaccaaaatatatataaaagaggaaaagtcattgttgtgaactgctgctttccatttgctctctgggtggccagatcactccctgatgtgtctggcaggggctcaactaacttttcccctgaactgtactggcttagcaaaggacctggggataccacgtttttatgcacaggattcagtagccaatgcctgttttgataagtagctggtcatttacatcattgcctcargccaggtccttcactctcgcctgagaggcaggaagagagaagtcaaaggcttttcacctctgatgtccatttcttatgccccttaaccactctgttctaccctggggatgaaaggaaaggagtccctgaacacacactggggcctacatgagggtggagagagggagagggaaagggaggagggtgatgataaaaataaataaataaataaataaataaaacaactgttggatactatgcttattacttggttggtgaaatattctgtacaccaaacctgtgacacaaaacttacctgtattagaaacctgcaggggctgggcgtggtggctcacacctgtaaccccagcactttgggaggctgaggcgggtggatcacctgaggtcaggagtttgagaccagcctggtcaacatggtgaaaccccatctctattaaaattacaaaaattatgcagatgtggtggcaggcacctgtaatcccagctacttgggaggatgaggcaggagaagagcttgaacctgagaagcggaggttgcagtgagccgakatcgcgccactgcactccaggctggtgacagagcaagactccgtctcaaaaaagaaaaaaaaaaaaaaaaaaagaaaaagaaacctgcagatgtacccctgtagctaaaataaaagtttaaaataaaaataaaatattggaatacatctatttaaaaaacgaattgggaagtatttttgttcctgactgatatatcttagccaactttaaaacattttgttcctactttgttggggtgtgtgtctagagtggatgagttgtaaaaatgaatagagtcaatacttgtcctctagttgaataactggccgatgctgttaaaagtagaaacaggttgggcgaggtggttcatgctggtaatctcaaggctttaggaggctgagatgggagtttcactttgaggccaggagtttgtgaccagcctgggccacactgtgaaatcctgtttttacaaaaaataaaaaattaattaaccgggagtagtggtgtccacctatagtctcagttactggtgcagctgaggctggaggagcactaagcccaggagttccaggctgcagtgagctgtgatcttgcactgcactccagcctgggtgacagagcaagaccttgtctctaaaaagacaaaaaaggagaagcaaggtgcagtaggagaaagaggcagaggaattttactagtacgtctgagctggattgtttcctttgatcctccacacctatctgtgctctgctccatatgccaagaggccagcccctcacactgactgtccaggctctatgccgtctgccttgtgcctgcaaggactgcagcagcagggcattgacagaagtggaaagatggaaaaggcaggcttattcagccttcctggctgtggcttttgtgcagctgtggccctctggggaatgtcacagctccccttgcctcatgtgagcagagggcactataccctttgttgtcattccttaatcctgccatatattagaaacagtctttctgctaaactgtcctcaaagacccctctctgagtccgcaaaacacttggtgccaggacacaaatactagatctgatgggttggaggaggtgctgtcatttgaggaggacttgtagagtacaggacacactgaagtgggtggagaggagggcaaaggttcctgataatggaagttgcagcactggtgcgccatgcagttgtctactgtggtgcatgttcagggagctgtctgtgtggacaggctacagggcaccggcagtggctgtaggggctaaacattgggtgataagaagaatattatcggaaataatgttaggaaggtaccctaagtctcgattgcggcaggccttgacattgagaatttgcaactgggattttgtttaactctttgtgctttaaaaaaaatttaaaggctgggygccgtggctcacgcgccccaaagtaatcccaggactttgggaggccgaggtgggyggatcatgaggtcaggagatagagtccattctggctaacacagtgaaaccctgtctctactaaaaatacaaaaaattagccgggcgtggtggcaggcgcctgtagtcccagctactcgggaggctgaggcaggagaatggcgtgaacccgggaggtggagcttgcagtgagccaagattgtgccactgcactccagcctgggcgacaggrcgagactctgtctcaaaaaaaaaaaaaaaaaaattaaatttgagctaatcatagaatctgatgcaggtataagaaatgatacagagagattcatttcaatgataagattttgagaaaagttcctgttctgtcacaaccacaatattaacatttatataacattaatatacagcctttatataaaatgtatacaatcttattcagattttttcttgtactcaggtgagtgtttagaagatttttgatcagagtggttatattgtcagtttcagagtgagaattgtaatggtatagatttaatatgcctcagaaaaatgcttggcttttggatggaaacattaatatgtcattagaaaattgcatatattcacgcctgtaatcccagcactttgggaggcccaggtgggtggatcacctgaggtcgggagtttgagaccagcctgaccaacatggagaaaacctgtctctactaaatatacaaaattagctgggcgtggtggcacatgcctgtaatcccagctactcggaaggctgaggcaggataattacttaaacctgggaggcggaggttgcagtgagccgagatcgcaccattacactccagcctgggcaackagagtgaaactccgtctcgaaagaaaattgcatatgtttttttccccttgactttattttccctccttatgtgtgttggattcagtgcaaccattgaaaacatcctgttatccacagaaatgtatcttaaacttaccattaaatcacctgttgtttcaagtgcaacatataggcatcttgtacttttgatacgttttatttttgtctggatagcaatgtgatcagatctgaattgcacagagtcaattaccaagtactcccaatgcagctgggtcttcttggagtatagtgattgacctagcccttaaactatgtttgtggtgctcattgcacttatctgtaaaatgtaatatttcagtttatcactaagcatcttccaaccatagtatcctgtatttaytgcttatatagaaaaaaaatttaataacaaggtgataagattcatttttatatccttctctctgagtcatttgttgcttttcaaagcttatttcttgccctgccttccacaaatttcttccaaagattctaggaaataaatgaagtatggataaatacctttatgaaaaggagtaacacatatctgaaggttggttttgcaatcgtgatgacaggtttgtatccccacagcatgtgataataacttggttcttcccatggttagatgtctctttaggaaatgtatgattgccctgaagatgggagagagacagttttcattttgcatgaagagtaattttgctgtttgtatcataagttctaaaagcacacatgtaactgcatattatatttagattcgattaaataccttgatgatttatgcctgtcttcttggcagagttttattcattgccttaagtggttaaatagttgaaaaacgacttgaagaatgaaggaagagagacattgggcaagttgatgagaagaaagggtgggatatttaacagttaaaaatgtatatgtctgccctttggtatttgctctaattcataattagatcaccatttcttccacttatttaaaaggcaccttacctagagagagacatcaatatttacagtgcattagtgccatggagaatttcagatcttgtgatgaaggtttattgctgttttatcccctcttcaaagcagtgtacacatcaaacagtctccaccctcattctggacccagtgacatcgcaccagtcgctctgtgcttcatgcagcagcttaattattgaagatccttgtctttgaattttctttttaatatttcagaggatatactttgaaaatctatatattaaataaatcagaagattatgggattagaaagttttatcatattttaaaatgcatcagttttgctaaaatttgagataaggagtggccataatgtgaccaaattaccttaaatgagaagctcctattatttctaattactgtaatgaacacaaattacatcagattattaataatgctgaaataggccatgggccccagaaacgtagcaaatcataggtgagamgatcatgttttattcatccgaggccaaagcaaaattaccttctttatgcaatgttatattagtcaggacagttagaggtggggaaccttttaggtgaacttttagatgaatcaggcagttgtgtttcatgattcattttgttgataaggccacatatttatatgaatgtctttccttaaaataaggtgaaactcgtgaaaagatctcatgccatttgtgactactactgcaccattctctagaactctgtgttgcttgtcgtactttgacctgttgggagttaccctgagcatggctgctgagactgctttgcagtgcttttatgtttttttctagtacatttttcataaattattattctctcaggatgaggtttggtggatgatcactggttgggggtatatgaacatatgtgtactcgcacctttttggtattaaagggaacttctaaacccagcaatgcagcctctgaatttataaattagggatggaggcccagagaggtgactgatgtgccagtatcacaggtctaggccagtggttcttagcgtgtggtctctgggccctaagggatcactaagatcatttcaggaaggccataagtgcagtactgttttcagagtattatgaaacscgattttgtgttgttcaccgagttgacatctacatcagtggtgcccaggacctgaggggcaaaaatgtagagatcacttggcacaaatcaagacggtggcaccaaatgtattctttaccccacacactcgcagtgtttttaaaagccattttcacccactgtttttgatgaagaaacaaaattaattacttaaaatctgacactttaatatacaatttaacattttgtgtgatgatgtcggcataaaacacttctccaacatatggaagctcagtggttcctttttaaattttaattttattttatttttgttgaggtaaggtctcactgtgttgcccagcttggccttgaactcctgggctcaagtgatccttctgcttcagcctccttcagtagctagtgttacattcgtgagccaccacgcccagcttctcagtggttgtcttgagaaatacttttatgcgaaggcttgatttacatggtgaggttttctcatagaacagcgttttcatttgaaatacggacagaaaaactggttattcagacctgagtgtctggcagagagtttattaaaaatgagtgacacaagcctgtcrctgtaaggcaaaaaatgggcaatatttgttgctaaagataaaattcaaactttctaggtaaaattaggttttggaaaacttatgtcccactgtgagcatgactgcttcccagtacataaagatatttctgattaaattggcagagatattaacatgtgattttctgaaataaagaaatgtatcaacatttggaagattggcataactcagtaactaatattttccaaatgactaatgttatggaatttctcgtgggtagaagtttaattcaaaatgtgagacaaatagattttaatgtaacaaagaaagaaaacttcacattcacattgtagctgacctttgagaaaccaccactggtcgagttatggtgtggtatcacagaagaaaatctaaaattttctggaaaagctattaagatattattccctcttccagctacatatttgtgaagttctgtttttcctttatatactttttcatatggcagctgagaatgcagaagcagatatgagaatccagatgtcttctattaagcaaaatgttaaacattgctgctctttccactaaatgtgctttgttttataaaatacaattttcataaaattgagttgtgttaacatgtgatgagttttattattattaaagtgaattaatacatattttaaagttgttctcattttcactcctaaaatggtaaatatcactagctctaccctcccataaacaaaaactctttgaggtcatcaatttttagagtgtgaaagggccctgagatcagagtttgggaatcactgaatctagtttgtttccttgcaggcatgctttcctattttatatgtagtacttcctccatttaatgatagatttttttccttttcctatcttaacatttctgaaatttggatgtctcttacaatatatgtttatggctaatgtaacgtttcttcctcttcccaaaatgaaatcgttctatgaattaaaatcaggatatgatttctcagtgcataattctactaggaaaacaacaaaattcttctcttttaaaaaacaaaccaacatttgtatccacaggtagctaggaatggaacttaatagatttgatttcataatttgtgatttgtgattgagcactggctcaggagcctgaagtcttggctggaaaactgacttttcatgtcatctctctgagcctcagcttactcatctgtgacgtgggtcgcatgtttttccatgtgtctaatgtagtgccttatttaaataaaaaaatttcagatccctccgtttaagtggtgggttctagtacactgttactaaactttgtgcacgcgtgtgtatgtgtgtgtgaaaactccataaaaatgccttataattttcatgcaatcataaatccaagaagaaatcataaaccaatacacatccagatgtgtaacagagatccatcagatagaagcacatcattgtgagagatgaagaagtcttgctgagtctaaattgtaggctgtatgaacctatacctgccccggggtctatttatttggacctgggttatgctgcctttatgtactgtgatgactcaggtcttacagcacttccaaccataagaaaaccttgatttcaacatcattatgatgtcatttggccatcctttgatgagaaaatgctgttgagtgactgactgacagggccttgctctgttgcccaggctggagtgcagtagtataatcacggctcactgcagccttgaactcctgggctcaagtgatcttcccacctaaggctcctgagtagctgggactgatgcaggacatgtgagccccacagtggggcttagcccataaaggtccttgtgtttgcccaggraagaattcaagggcaagctggggctagaagaaaacagctttgttgaagcaacagtgtcgcagctctgtgactgcttctgcagagcaggggtgctctatgggcagagagtagcagcccagggcagttttgcaatcatatttatactcacttttaattacatgcagattaaggggaagtttatacagaaatttttaggaaaggagtagtaactgggacattaggttattaccacggaaacagtaggtaacacctaggtgttgccatggcagtagtaaactgacatgacagctggtgagtgtgtttgatggaaaactgcttctgtcccagccctgttttagccagtcctcagtttggtctggtgtccaagccctgcctctgcagtcaagtcctgcctcctacactaggactacaggaaagtgctaccacagttgtctatttttttwtttttattttttgtagagacaggatctcactgtgttgcccaagttggtcttgaactcctgacctcaagcaattctcccactttggcctcccaaggtgctgggattataggtgtgagccattgcacctggcctcgttgacttgttttattgggttttgttctttctcatcagcgtggtaatcaaatctaggactccttcctgaatttgacagtggacataaatgtaaacgtggcacctgaaattgcgtgggagtactcagtgacgaggtagtgcaaatagaagatccagactgtatttattttaatttattttataaatattgctgaaatgcaaacaaaaagtttaatgttggaagaactaacaagaagggctgcatgatagagcattcgctgtagcagccttcacattgcagtttatgcaaacaccaccctatccatgagctccatcacccaccataagagacatcccgcagggcctggagctccctctgttatcttcctcttctcaaatcccctttcccccagtccatattttatttcgagagctacaggtatatagagataaatgctaattatttttgtctgtctgttgcagactaacacattaacacaatgtttgtgtctaatcttaagaagatggtcttaattatttaatcaaaatcatgtatgcaatgtattctcctgaggaaaatttcaaacacaagtagggcaagcagttttattgtgtccaagctaattcagtccttgaatttattggggggttagaatatacttttctttgattattttactatagatattgggtactgcttttggtcctatgtttgtgctattttttaaaggcctcctcttctgagttaatagtgcctcttgtagacttacatacagatgggtgacagaagagggagagaaatggaggtgtacagaggtacctaacaactgaataactaaccctgtaattggacagcaacagaatctgtgtctaagtaataacattgtctaaaagtttttagagttttcctgcccacctctccccattttgttgcttttttccttacagtttttaatttgatgattctggaaattttgcttcctcttggtagagaactttccttatagtaagggcattgtaatattaatgcatatcaatttttagatgtgtatttttgcgaccttgttctaagagtgactatatagttcttattggtgtttatttttattttggggggtgtaaattaataagcagcaaaggttgtcatgaatgtttacagacactaawatccagaaattattaaaatcctcatgtttatgtttctctcagcacattaagatagccaccaaagtattaaatttggagttgactaaatttttgccctagtaacgttgctcagactgtgttgttattattgaatcctcatgatgtagaagtccatgttaaatttgttattactatgtttcatatgcttctgtttgctctgataagttctaatttgctttcacattggagactattggattgacagtggtttaaatacagctttcactgtatataaatagcctgtttggtatcctcaaggtttccatatctttaccattgaccagtgcaccagtgtttcaaaaatatccctcctagaacaaatgatgagtttactgcttcatggttaaagctatgtcattagaccggacgtggtggctcacgcctgtaatcccagcactttttggggccgaggcgggtggataacctgaggtcaggagttcaagaccagcctggctaacatggtgaaaccccgtctctactaaaaacacaaaaactagcttatcatggtggtgcacacttgtagtagcctgtagctactcgggaggctgaggcaggtgaatcacttgaacccaggaggcggagtttgctgtgagccgagattgtgccactgcattccagcctgggtgacagagccagactctgtctcaaccagtcaatcagtcagtaaaactgtattgttagaggctttaaaacaaatacttacatcctagtttttaaaaacagagtattctaaacataatttaaattttgtcttatgtttttgagtgatttcactcagttgctgagtggaacttttagttctgattgcagctattgcagactcttttcttcttcactttgcatttttaattctgtttcttctctgctgtgacagtgatcctatttgccaggctgttctcattgttactgataatgatacaaatgttcacctgagtgtattattgatactgttatagcaattgcaagcaagctcttctatgcaaatacatttgctaaaatactacctttcgtgtaattgtatatgtgagtatatgacagaaactacctgcagattaacatattactttgagtattttctgtcttaagtataaataatatatttgggcactacactttctgacaatactttattgaacaaaagaaacattttattcaacaaaatttttcagtagagcagccaaatgtctagattctatagatttttaaaaattgatacataattttatgtatttacggagaatatgtgatgttttgatacatgcataccatgtgttatggtcaaatctaggtaattaggatattcacacctcaattatttatctttttttgtattggaaacatttcaaatcctctcttctagctactttgaaatatacaataaattatttgttaactatatagattctgtgtttttattacagtagatatgattaaaaggtaggtgaaatttgtttacttgcttagattcattattttttaaatgatatatgtgatgattatttagaaatattggggtaatgatcacagtaatggttattatattactctctactgagtacacactatatgtctagcactgtttaacccctttatattatttagtccttacattaccctgatgaaagaggtactgttttattttcatttgagttggaaaggactagaggcagagaacagttaggcaacctggccagggccacatagataacaaggagtgaagtccaagtacaaacctgggccattttgctcggagccgacacttgaccgcatctctttcaccgtgtagtattttaaaggacctaaaggaatttgtgtttagaatactgacccacttgtccccttttacaaaagtgtaattctgttccttaatctttaggatttccctacgttctcctaacatgtagtttaccaacattagtatcttatttttcagcatagtgcttttgtgtttacagatatgcctcttcatgttcgacgcagtagtgacccagctctaattggcctctccacttctgtcagtgatagtaatttttcctctgaagagccttcaaggaaaaatcccacacgctggtcaacaacagctggcttcctcaagcagaacactgctgggagtcctaaaacctgcgacaggaaggtaaccacctctgcttgtttgctgctgtctcttgcccctcctgacttcttggtgtccgtgatgagtgtcgtgtcttgggtaaaccattggattcyagggcatcttcatgatggccttttgtgagcgtggtaccaactttcatatcaaagttcagatagtctcctattttatatcacacttggattttctratgaaaatcagtgccgtgtatggtgtgcacttattaatatatccattttttgaatagattccatttcatatcgttaaaaatgaaaacattcaacacattatgtgccatataaagtccctttcttgctgtgtctcctggtctcctctcccatttctcctcacaggcaacctctttatttgctttttctatgttcttacagggatatttgacacatttataagcaaatatttatattggttcatgaggtacattaaggaacttagaacattatgaacttttaaggatgaaagtggacttcatggtaatttagtttgattacacagttgatcgttttatcctaagtctccttgtaaatggaagtgtgttgtctagtcttcataatactttcttccctgacctaatttattttagtccttgacctaatttatttaatctgaataaagaaactttattttagcttgttttgtctgttttaaaaaatttgttggctgggcgtggtggctcccacctataatctcagcactttgggagtccaaggcaggtggaactcctggccaggaggtcaaggcccgcctggccaacatagcaaaaccccatctccactaaaaatacaaaaattagccaggtgtgctggcatgcacctgtaattctaactactcaggatgctgaggcacaataatcgcttgaacccaggaggcggaggttgcagtgagccgagatcacgccgctgcactctagcctgggcgacagagtgagactccatctcaacaactaaaaaaatgttgatgctctttgtcagaacccttattgttcctttttgtcacgcttctcacctcttatttaatgtgctttttgctgaatctgtcattttcacttttgaatctgtagatgctcaataaacttctgttgaaagaattaataaacattttttcagtgcagccagtaagttagcacagtatatattgagaaatgtcaaaataatactaatcacataagatgaaaaagatgtagcttgatatttgcttgatttattctttgcataggtataaaaatacctgttttaaatatttctttcaactttggtttgcatttcagcacactcctctctgtagtaattctagtgacaaaaaaagtacatggaaaacataggtttaaactgagaagaatctagttgaaaaaaagagtatatttagtttctggtttttttttgaattatgaacttaactgttaggcttagtctcctgaaatactttgtttttatagatgtgttgaggagccatattggaagatcttctcattaagattagcttgtaagttttgaggactttatcttgcagtagactatccaaagaagcagaatccagtttatcagtgggtctcatggcagttaatctttttttagaacagacctaatttaatttacatggatattcacaaatgtgtaaacaagtcaagctggcagtttaaaaaaatttttttaacttggttttcaactgtttgaaacatacggaagtttcttttcaagtcattcaacatcttggatgtgtgagtccgtttcagttgcagcaaacagaacgtgtttttatcataaaacatttttgaacaaaaggaatttatcacttagaatgtttttctcacaaaatcactggaagggtttgcagagcaggtcctaggtggtcctggagaacctttaaaactatgcagtaacaaacatgtggcttgcctgtggagctaccctctctgctttcgtggtgaaggaggtgctgcagtccaggggcctgaactcctcccaccggagcctgcctactacacactatacaccaccctgcctccaggtgtactcaacttgcttctgtcacttgtgaagctggagacccaccctagaaatgctgccagtcatcacagcccaggaaaattctgtttcaaaccactattaaaatctcatgctactgaatctgagtaggtggagttcagtttgtatctagacccttctctgcagaagagcctgggaagtagaacattagccttaaaacctctgcagcacaggaacacgttaggagagcactgagactctcactgccaattaaccacatccacctagctgacrcagtttcatttttaaatatttatttatttatttatttatttagagatggggtcttgctttgtcacccaggctggagtgcagtggtgcaatctcagctcactacaacttctacmtcccaggttcaagcattctcctgcctcagcctcccaagtagctgggtctactggcactagccatcacacctggctggttgtttaatttttttagaaacggggtcttgctrtgttgcccaggccagtctcaaacttttggacttgggtgttcctcccatctcagcgtcccaaaggctggaattacagacatgagccaccatgcccagcctgttgttttaaatgacatgctactatcattgtagaaaatttggcgaacttatagaacaaaataaaattattcataactccagaacccagcaacaaccagtatttacacacacacacacacacacacacacacacacaagttggagtcatgctatgttcatatatttgcatcctgattatttcaacattatttttcgtacaatagggattttccctggtgtgaattttattatcaatattttaatgagtgtaaaacatttcattgtagattgtattctgttttctctcaattttggacatccatgctctttctctttttttcacattttaagtatcagtgttgtgagacatccttaaatataatatttatcttaaaaattgttaaatattcagcaatctttttacttccatggagcagtatttaatgtaaccagatgcccatactttcccataggaaaagccttgatctacatacatatttttagatgaagtgatattcgcatatgatatacttaaatagtaatgtgtaatgaattagtattttgaattttcgttggctttactcttcaaatactaatcttgctgtctgcgttttatgctgtttgtattttagtctgagagctcatatataaatatgattagatggcattttattttcagttataaaaagcctcctcatcttttcaatattcagaaggaaggaaagcatacttgctgcttaggtacaaagcattcaatttatttatttctgttaagcccaggagagcttacctatggtctcatgctttaagatgttataaattcttatgagtctgtagtggttcaggttttctgtataaaattgtagaaataaattagttgtgcattcatagccctctgatttagtgatctctagtggttaaaataagttaacattcttaaataactcatctacatagttaagtggtttatattcttccaagttaaatgagcagagtaaattattttagaataatgttaccaatcaattaaaatcttgtttctaagcaggaaagttgtattctgataygttagagcaccatcatgtsaaactctctcctttggttcaaaatcacaaacgagaggtggagtcttccttgttgaaatagtggtcataatctcattccactattagcttagtgggcagagtgtacagatgatgatgatactcagttgcttgagggcctgaagaggccgagggtcccataggcttctgaatttcttaaaatatttcatgttttcatttggaagtgagatggagagggtaagggagttgtggcttttttcaaagttatttgaaatactcacctttgtgtccagtattttgtggctgactaccttttccaactgttttagggaacattttgctcatactttgtgtggaaagtttcttgctagaggctgtattttcatttgagagttaacatgtggttaatattttatcctgaggaagagtatttcaatcggtgtgaatacttaaatcatcttgccacctctttggtcttccttattaagtcagtgttgctgtgaataaagaggccagctagtctgtggagagcatgtgatttatcccatcaagaaagatgtaatgagctcttagaagaatctgctttccatgcagtgycggggataaggactgtggactatttcactgtgcagttgctacaagccattgttccttccctctaaataatgagtggcattgtttttgtaaatgatatttccccctaaacaattaacataggtagacttagtataaaaaccaggtccggacaagtttccaaaagagattctcacctgattagggaaaggggaagaaagtaataaagggaacctattgcattggcatcattagcttccttttcttttgattttttaaatggagaccttgcaatgtttcttaccccttgggtttattatttctgtttggtttagttgcttagcatgtttgctatctttccaatacccccgatacacacaaccacttgtaagagatgctttcttagttatgtctttgtcatctcgcttttctttctattagaagggtgagatgttttgtctaagtttaggaaattatttttataaacatttttgaagtatttttcaaggttccccaacccccttttttttccctgatagtaatacagcttgctctttgcatatgtacggtaatgaagggtatatagaagcagggaaatgccatcaggcttctgtgtccatgggttctgcatccacggattcaaccaagattagattgaaaatatttggaacaacaacaaaaaaacaatggttgtgtctgtactgaacacgtagaaacttttctttgtcctaatttcctatataatgcagaataacaactatttacacaaagcattttctttgtaataggtcatataagtcatctagagatcatttaaactatatgggaggatgtgcatgggttatgtgcagtagtccaccattttatgtaagagacttcagcatctatggattttggtatctgcaaggggttctggaaccagtcccccatggatactgagggatgattgtaatttgaaattttgaagatgagtagtaatgacattttgatgtattaacttcaggacttctgtggagcatggctctatacagatgttggctattcttattaccagggggaaccatccaagtatagtttaatttcctgcaatgtttccaatttctgctgtattgagagaattttcctatgcctcataaatatggatagtttacataatgttatattatgtgttgagttcttatagttaatgtttaactttatttgatggttttttctgttgtatgacatttatatttttgccaattttgtttgcttttataagtaacctttagaagtacccttcagagaatgtccttatttatcaatttatgttggcatctctgattattttctttgactagattcctcmagtagacttatttggtaaggagatgaacatttttaaagctattagtaattgtttcacataaattctaggctaataaagtatgaagtagttaggatgtataaaatgctctgagaagtcctagataaataggataggagtgaggcttgagggtggtggtgaaggaaacaagcagctggtactattcctgagttccagaacttactgtcttactagatagcttaaaggttctacatgggtgtgcatcagaattacctgtagacttccaagagctgaaacacaggcattactcacaccaacagattcctttacccactccagaaaatttgtgtgcttccttaaagctcttctgtggttttcagggctcggtcttttttttttttttcccgcaggacctcgggtctagctgaaaacaaagtatggttacattttaagggagagcaaataggaatatagtcatgccttgcttaatgacagagatacatcctgagaattgcattgttaggcgatttcatccttgtgtgaacatcatagagtgcacttacacaaacctagatggtgtagcctacaacacacctaggttacatggtatatcctgttcttctaggctggaaacctatatagcatgtagctatactgaatacrcagctgggacacaatgcattcatatttagatatttgtgtatccaacatatctaaacatagaagaagtatagtaaaaatacaggattttaatcttatgtgatcaccattatatatgtggtccattgacgttgttatggggtgcatgactgtataatgttttttttgagatatcttttgtttaagcgaatgcagactagaatctagtacatttgctgtatttgggtttgtgacatttcacttcctctcatacttagattgcacaaatttatcattttcaaatgaaaaattaattttgagtcttttaaaagtcctacaactcatttaatattggatgttgactatcaatacaaaaatataactgaaaatatctttctagatagaagccttaatgaaaacaatgtttctgtctactgtttctgtgtgttccttcattcctttcaaaacccctttgtttcttttccttcccttccttttccccttcccctcccctcccctcccctccccttccccttccccttcccattcccattcctttccctttccccttccctttcccctcccctttcttgttctgttccccttcctcttcccccttccccttcctcttccctttcccttcctttccccttccccttccccttttctttcccttcccctttccttccccttctctttcctttcccttttccttcctccccttcccctttcccttccccttctctttcccttttcctttccttttcttccccttcactttcccattcctttcctcttcccttccctttccctccccttcccctcccccttccctttcctccccttcccctcctcgttccctttcctacccttcccctccccattctctttcctccccttccccttccctgcttctcccttccccccttctcttccctctccccttccctcccattccctcccctctcccctcctctccccctttctcctccctttcccttccccttctctttcctcttccctttccgttttccttttccttttcttttgccactgtctggctctgctttattgcccaggctggagttcagtgcatggcttactgcagtttcaactttatgggttcaagtgatcctcccatctcagcccatgaagtagcttggactacaagcatgggccaccccacccagctattttttttttaagagatggggtctcactatgttgcccaggctgatcttgaactcctgggctcaagtgatcctcccatcttggcctcccaatgtgtttggattacaggcctgagccactgcgcctgcaccagtttgacttcttgatttctgcttctcctcattcattctttctaatttacaaggccaactgtcatattagtaaatttgaaaacactattttatttctaaattacgtttttaaaagtttattttatttttttccctttatgttctgttggatttgaagaagattattttaaaccacaaaatacacttgaccagttggctgctgagaagaagttgtttatcgtttggttatttgtgagccaagcatagcttccagcattatggtaaccatccaaaagcttaaaggatgagctgagatagttctttagaatcacatgtcctctgtgacagacctgtagctctctttaattttctgcggcattagtttcaagggagatccagctgagaacagactttaaactattctgctgcaacattttgtatttcctgttagaggtctctataactataaattttacccttctattttgcatattaaaatatcttatttgaatgcagcacattttcgaactttcagtcagtatggttataatcatttctacaataggctgggctcactgagttattgataacctagtctcatctttttctatgctacattaggaatacagtctgccytcatatgctttaaatattttgtgttcaaaktgataaaatcctaaggtgttattgataaaattttggagcttggatgcgatatttttagagttcacaaaccactgcaggagtataaatcctgaataaagtcagaagccttcttgtgtgcccttaaagttacatacatcacagagggaaatgaatatgttatacctgattgtcttgacttaggggagagaaccaggaagtatcattgattaaattatatagaacaaaattttgcgtagtctatatacattgaaaaaatattttaatctcatttgatctcatttcatctttttatttatttatttatttttcttgagatggagtctcactctgtcgcccaggctggaatgcagtggtgtgatctcagctcactgcaacctctgcctcctgggttcaagcgaaactcctgcctcagcccccccagtagctgggattacaggcgcccactaccacacccggctaattttttgtatttttagtagagccagggtttcaccgtgttggccaggctggtctcgaactcctgacttcaggtgatccacccgcctcggcctcccaaagtgctgggattacaggcatcagccaccatgcctggcttcatctttttaagctagtttctatttttaattttttataattcagcttataagcctacctgttttgagttgtgaagttagatctagtcccttcaggtcctgttattaacaagaagagtatcagatggattgctgcaactggagcacctgtttgcattctaaggactttaaacatcctttcttttaattttgcatatattcctgctcctgttatgatctgggctgcctttggagaaatgtgttccagtcagtgtttctcgaaatttggtagtagaagtggtttccatctattttacctataagccaaatctgttttcttggttttaatattttcactaatgataacaaagttgtttttgaatacttgctattcctaggcattatgccatgcttggtatgttacatgttatatatcatttaattatacctataccagaagtgtaggtactgttgctgtacccattttatttttatttttatttttatttttttgagacgagtctggctgtgtcgcccaggccggagtgcagtggtgtgatcttggctcactgcaagctctgcctcccaggttcatgccattctcctgcctcagcctcccgagtagctgggactacaggtgcctgccaccacacccggctaattttttgtatttttagtagagacggggtttcaccgtgttagtcaggatggtctcgatctcctgacctcgttatccacccgcctcggcctcccaaagtgctgggattacaggtgtgagcccccgcgcccrgccttgtacctattttattggtgagcaagtagagccctggagagtttaaatagctcacctaatagttcaaccagctgttaaatgttacacctaatagttcaaccagctgttaaatgataaagttgtgatataaatgtgctgaattctcttggctgggtacttgcacttttgtatttaatttttattggggcatcttgttgcaatatctgttttatttcgactttagttagattgtgtttttttggggggaaggggagagtaaggtttcaatagacgttactcaaattccctgaatcacattttctaaaattgtagtttttagccatgaatggaggacagaaatagtttccttgaatattaatatcctttttagagaacatgctttttctgctaatggggtggtagagaggaactcagttctttagaagtttgtgccatccatttctttactctaaatgcttcccatgtggcaatgtaattctccacaaaagtcattacttatgagaaacaatatgtaggataagattatgataaatgaaaataagcactttctacattaagataaaaagtatctgtggagacagtgtacctgaggaggcactttcacaattaaggggaaagctaaggtagactgtacctagggactttcacagaaattacccaattcttctacgcatccatccagtccattggagtttggattgtgggctgaaaaatggaagaaagtggtaattatcttacattgtcagactagttatatgtgatttaaatctcttcattttcaaattgtagtaatttatttaaatatatatgtatatatacattcgtttttaaattcagacgaaaaatatttagataaatataaaatatttatgatgcacatctaaataatgtataagactgtaggtattttggaattaggcaaccactataagtattttactatctctccctttctgtctagcatctgttcccttctttttgtattgtgcatagtattcttgatgcaaaatgctattgttacttataattttagttttggagcatacatatttagagtggagcatttttgaaagaaaatgagggccgggtgtggtggctcacgcctgtaatcccagcactttgggaggccgaggcgggcggatcacgaggtcaggaggttgagaccatcctggctaacacggtgaaaccccgcctctactaaaaatacaaaaaaaaaaattagctgggcatggtggtgggcgcctgtagtcccagctgtgctggaggctgaggctggaggatggcgtgaacccgggatgcrstgcttgcagtgagccgagatcacgccactgcactccagcctgggccacagagcgagactccgtctcaaaaaaaaaagaaagaaaatgaaatgttgttgcgtatttcttgccttcaaagttaagcactttctaaaatgtttttaaattgtttcagtataaatttgtttttcagagttaagcagcttttagtcaaatgttgctcctcatgtttagtgtagtgtaagaaagtgagtcaagatcttcaagatttaattgaacccgaaatatttatttatttattctttcacacactcacccttcttgttttaaggagtataggtcaaaaatggtggtcccgtgttctccattcctgcccactgctgatagtggaatgctggtggctctaggggaattcaggggccatgttggcccttatgaaatactgtgcaggaaagcaagtggaggctgtggttcatgcggctttcctttaggctctgtccttcagttcctcagagtctaagagtggacaacatttttgtaattttttataaacgttaaacttccctcatctatttcctcctcacctctttctgcatgttttcccaggataaagaagataatctaagttatacctggaaagagattttctcttgttttgagagaggatctctctctgttgcccagactggattgcagtggtccagctgttgctcastacagtctcaagctcctggaattaatcagatctttgttttgtaaaataatttgaggctgggcacagtggctcacacctgtaatctcagcactttgggaggccaagatgggaggatttctcgaggccaggagcttgagaccagcctgagcaacatagtaagactcagtctctacaaaaaattaaaaaattagccatgtgtggtgatgtgtgcctatagtctcagctattcggaaggctgaggtgggaggatcacttgagctggggaggttgaggcttcagtgagctatgattgtgcttctgcactccagcctgggtgacagagtgagaccctgtctccccaaaaaataaataaaaaattaaamcaaaattaaaaaattattttaagaatgaaatgagacaattttaaagccaacattttacgtatgattattygtaacactgtatagtatttcttagtgaaccaaccatctctatgaaaatataatttgtgatcaaatatatcatcattttgaattcaagaactaccttcccatgtgatgggatgcttgtgtagcagtgactagatatcagaaatttttgtcattagccacctaaactatggttccatgttagattaagaatgagaagttggaaattttattactcaggattgagtagaggctaggctggtggtgcatacctataattccatactttgggaggcttaggcaggaggatcttttgaacccaggagtttaagaccagcctcggcaatatagtgagactttgtctctccaaaaagttaaaaaattagctgagtgtgttggcttgcacccgtagtcttaggtacttgggagtctgagrtgggaggatcgcttgagcccgggaggtggaggttgcagtgagccaagattgtgccattgctctccaacctggatgacagagtgagaccctgtctcaaaaaaagaaaaaggaaattgagtgagtagaatttgggcattgaggtgggtaggtgtaaccatgagaatgggttgtcatcctcatctccacaatttatttgttatcacttctccagatccctgtttcttctttcagtcagtaagaggttaacctagctgttgtctagcttcttccttccagctttaaaatgctgtatccaaaatttttcatggcttccttctctgtcaaagtggattaggaacagctgagaaaattggttcaaacgagcatcctggatgtggttgagttttgctggtctttctcttctccttggattccctggttggctctctggacagatccagtggcttcagagaaatccgcgcccgttttagtttgatcagacctgcatctccaggagagatttttgaccaatcctttttcawattggatccctttatgttcatagcctgatacagatccatactcctgtgattatttttcttgtttgataagaccgttaacaagatactggccagttacaggttatgacttaaaactaaaatgtcatgcttctgattttgtcagtgtatcaacttgaagggtttgctgccatgacaggaattgtatttggaaacttagttgtaattttcaaattctttctaatatagaaattcttctatattagaattccactgtgaaaattttttggcatattcagaattcttgagttcctcaccaaattaaatgaattttattatctagaagatactgagtatgtatcagaatgactagaaaagatattatcaaatgtgaagaatgatatagttcatttttcaggtcagaatgagttttaagaactatggataatacctttaacatttcaaaggaaaaatcctagtaaaaatttgatatatatgttaggatattttattttgtatattgttaatttgttggatagttaatttgcttggaaaaattattttcaaatttttttacttactcctgttcaaaactttaactcagttgaaaaagaaaattggycaggcacggtggctcacgcctgtaatcctagcactttgggaggccgaggtgagcggatcgcctgaggtcaggagttcaagaccagtctgccgaacatggtgaaaccctgtctctactaaaaatacaaaaaattagccaggcatgatggtgggtgcctgtaatcccagctactcgggaggctgaggcaggagaatcgtttgaaccagggagacggaggttgtggtgagccgagattgagccactgcactccagcctgggccacaagagcaaaacttcgtctcagaaaaaaaagaaaattgacatttaaaaatgaaatattacttaagtaatttgagcyaaagaggtgctgcaatacgtcttttggcattcaaaatctctggattctgaccagtgtttctggttgcagactccaccakagtttagcaaactattaattatcactaatgatcccgatgtggttgttttgacaaaaatgtatggatgtttgagtttcctctttgtcttgccatagttctgttataaaaactttataaacacatactctttcatttgtcttttccatacctctcattaatagttattaagaatgtgggggaaacctgttagcaaaaaggaaaagtaagatgtatacatgtaccagtgctgattatgtgctggatactggcttaggaattacagataatataggaacagattacttggcctcagttctacaacattaggcattacacataggaagttggtttgcatggatttcaaatattgctttttagttggttcattatacttaggaatagacatgcacctarggtaaatgataatgaatactgtgtttggaataaaattctgggtttccttatttaaaaaaaagtcttaatagrcatttagtttattattccaataggaactgccaaaattttctgccttcatttacaagttggtgattaagcctgcgttttgtgtgtgtgagtcattttatttcacccttatctgtctcttttttctgtttttatttattttttagaagatgaataaataaattgttgccgaggctccagcctcggcaacagagcgagactgtctcaaaaaaaatcattctaagccatcattattaattttacttcagtctcctaatttcagattagatatcctgaaaatagttccctttgttttttgtgtatcatttcctggagaaataattaagcagaacattgaattctcttttaccataattgcagagctgaaaaatgtgggaaatgtaaaatcttaacatcacacgggaatatttgaaaccatatgatgcatagaggttctgaatgaaatgtatatgcattgagtattttgtatttcaaaatatgctatgatttctcataattcttwaaaaaaatgagatttttgcactgaaacgaggtggaaacatagttgggtttcctgtgccaacacagaaatgtttatgacttctataatgcttatgaaaccccagttctgacttctgcaacagagggatatagtcttgccaagaaatctgaccatcagctaaatagctgtttctgggagataaagcttggagttgcagcttagtatgccgggaatgagcctctatctcaaggcattgggtgggctctatatagttttcctgaattgtaataagcttggggagggctaaggtgggagaagacacttactttccttaccctgaaagagattttctccatagccaggataccgctaccagggagcagcaaattaatatgcatttcccagccggagtggctttttgacacctgatgctgtggcagtacatttagatgataaggaaratccctgatcacagcaggaacatctgtttttccctggcaagaaggaaaatttcccacctcgcacaaagctgagcagctatttgggrcagcctcataagtggaggattaaagttataatttaaaaacgggagagtaatttcttatggcatttttttttgtataatcttttaaataaagtcataactctaacaaattaatttatgccattagtaagttttataatcattagaattatgtatatttgatttaaaatttttgatttatagttataatttgattcatwagtgagcatatatagtyttgaatagattggttaygagtgccatattttaacaattatttatgctaaagcaaatattttcaaattgaaaatagagtgcatgatgtatatttcagtggacagtggtatctagtataaattgtgttgtagaaaatatttaatacattgtatgctgcgatgtttatggatatctttccatcataaatacagatacacagctttacaggcctacagtccttgtatgcacttgatacacattgtatgcagtagacggtgaactagatttgtggccagacttcaggactgggaggaagaaacatgactgaaacgctagtaggacctgcatgatgctgtcaaaaatataacaaatatgttgataggaattaataatgtattttaaaaattcttcaactgattgataataattcaagattgctgtaaataactgcacttttcatacattatacataagtcaatatatggattcatcattgattttacatgaattaggaaaattcctttgttatgagagtgaacgttagttttagttttattatccatgaactcaaagttgattccacaaatataaaattgtaaaattcttcaagtgcagtggaaaagtgcagaccttgccatcttcagccattctttctcttagtctgattattgtatgttgctgtgctgcaggtactgcatgtcataattgacttacatggagaaacagtgtactgttttttctatgcatttggaaataatcacatttgccacagacatcatatgctgtaggtgtgacaggaagttgaaataggcatataacagtggtatacatcttttagtataaatctaaaaatacagtgattacatttcactgaaaatacattttactaaagtttatcttaatgcctctttgaagcattccctaaacaatttttaaaacaacttatcaaaatgttcttttaaaattccaggattttgaaaccatgtgaaatagggaacataaaaaatattcatgaaaaagtcatccacattggtgtaagccactgtgctgagtgcttgggtttaaaggtgaatgatgatctgcccaggcttccctgtaagattagaaatagcaatttttaaaattagctaaattataagttagaaccatagttaaagtaaaattagaacagagtggtaacaaaaagcatggcatgattagttctattgagaatcagggaatgcttcttagaaaatagcgtttgaactgggctttgaagaatgttcagtatttctatagaagaaatgatgttggaagtacaggtctcaaaaaaagcaagaatgaaggtgaagaagtttgtgtggtacagtaagcaccattgtctgaaattccctctggtctacctatagtgtttgctggaggtttgatgtgatccaacatatgttttaggaaactcctgtgccagaaagtggtgcagaacattgttagagaggatatggccagagcctgtgtccagttagaaggccactgttaaaatttcaggtaagagacaagttgatcctgaactaggtttatggccgaggaccaaaatcagcaaaaatgttgtatcaataagacttagaagctgtggagatcaaagagggaggaaagagagtaaagctaattctaaatgttttagggaatggtgcctgagtcaaaatagggagctcagtttcgaggtatctttgggacctcttgttggaaactgagatcatgaattcaggaaacagtttcgttttcgtgacttgtgcttaaaagttgtcagggtaggacgtggtgaaattgtgcactttttgagcttgtccagagagataataatcagcagtccatagcgccaacaagaccatttacgggaagaggaaaaatggcatagattcaggaaggagcagaggggtgggtaccagtagcatactggactccagacaccaaaaggtgagagttgtgtggagcctgagctcttcatttcaaaagtagatctttttcttttcaagtgatattttgtcactatgcaaatatccagttatctatcaactcttaacataatagttttagtatgattatctttgcctgaattatttcattaggagttgaaaatggtcatatttctaattctgttattagttctatttccattatttggcattcttctgaaaagacaggtttcccctcatgaactggtactgttgatttctctgaaatacagttcctactgaaaagagagggtagatttttaaaaatacttttgggttaattattcattctctaagtaagcagttggtgtaataatcacctcaaatggtgggaaatgagtatgaaagcctggtccctagtcaatgatagcctcaatttttatttttgacataaaarttatacttgyatttcagtgtactttaattcctccttctctttgtcgacacataaggttctgtcactaataaataaagttctgtcattaacaagtctaccctttatgacttatctgaatttcttattagtataagaaagtcttatcagaataagcttatcaatgtatctatggactatcatatgaaacrgtatttcctttccttttttctgaagcttaagttttaaggagagactcttagtatcttgagatacggtgaaccttagtttctagtttgcttccttagttagtttttgtccatgtcttctccttaccatttctattaaaaaaaaaaaaaaaacttgctgctaaagtttcatcttgctactgagtttttaaagattttgtttcttgcaggttaattcttaaagtttatgaagtttcatgtcaaagtttatgttggtaaatgtttatcaatttccttttgtttgaacatatgtcccaatatttacataaacccaatactatcaattcatttttaagttttattccctgatggaactcatgaaggaagagcaaatagtatcctgatctataactaagttttatacattgcaaacctattatattgcacttttttgtttctgtgtttgtattgggtgttcatatagtttagcacatgaagagtaagtatcaatcacacatgtaatacttatagccagattactcttaacagtgttactaaggataatatgccagtacttcttctaacttggtgtactgagttaagtggatccaactgaaggtaatattttactttgttcttataggagatgatttagatttcgtckttgaactaaaaagtttgactcccctagtttatcctagctttctcatttcttttcagaacattgaaatgaggttttacagctcataagccaaaggaagttattataattttttatctgaaagaaatatcacgtagcatttggttgttctggggagtattaaaaacttagttgataaatatttatgtaaagacatcgcttgttatatccatgtcacagtgaacaattacgtatctgttatgtaacaaataatagtgataggccagttttttcccctgatgtttgagttaatgctgactrctatcttgtgaagtaggtaatagaaacagcctgaataatctaaatctcttatccaaaaatcacaaaaccataaggctttgaagaaagggcaaatttattaatcttccttatttttagcatttctgatgaattaagatggtacctcataatttaattatgagactggaaagaagggaaaatgccacagttgagagagagtgaaagtcttgtatagaagtacttttcactttttggtgtacgtacttggtttaggtgattgatttgggtaggagtgcaaagtgtagtgttttgtctgttgtgtgccgtgtgtgtgccacccttcctgctgtaattattagacttgcctgtcctcggcacatggttataattccgaggtctaatctgggtggaatgtcctcaatcagctattttgtataggattggaaagatgttttaaatatgtagaatcatttttctgctacttttgaaaaaccaggtgcattactgatttgcaaggtctggttttttacaagacacctttttgtttctttttgaatagaaagatgaaaactacagaagcctcccgcgggatactagtaactggtctaaccaatttcagagagacaatgctcgctcgtctctgagtgccagtcacccaatggtgggcaagtggctggagaaacaagaacaggtaacatgacaaatccttatatgtgygtcattgctgtaacatcctgtcccataccccaaagatgtttctcccatctcartcactggtgatgattaaaagttaattattctaacaaactttagttaagtaccaatctctatgtcagagtttatctaacataaatgcaggatatttctggctggtctctgatcacagatttattgtgagcagttatgaatatttgcagtacattctgaaggttcagggctttagagtttgtaatgctacagaggcacagatgtttggcagtgaatcatgctgttagtgagtagactttcaagactcttctcttctttaataggcagtaagtccaaggatctgaagacgcaaattaaaactttctgttgtacctaacttcactgtatgagagaaatatatcctatggtgttgttttagaatttagattacggtattttgtcatgtttgggcacttatcccttcataaatttcaaggacctattttaggtttatcagtctttagagttatctgtttcactgtgcagtgcagccacctacaattcgtgaaatcagaattgtttaccactcagaaataattgttttctgccttgggaagaatgactatttacaaagttgttgcatcacttagcaaagtcctcctttcatatggaagactcagaatgtatctgatgagttacttttttttttccactttttttttatactttaagttttagggtacatgtgcacaatgtgcagatttgttacatatgtatacatgtgccatgttggtgtgctgcacccattaactcgtcatttagcgttaggtatatctcctaatgctttccctcccccctccccccacctccratgagttaattatttcagtgttttttttttaatgcttcagttgtttttattgactcacaatgggttttttgtagtagggaatcccagtgttttataattttaattgtgctttcttccagctttattgaagtataattgacagataaaaatagtatatatttaaagggtacagtatgaggtttttatatatgtatatattaatacaatgattaccacaatcaagataatttatctgccgggtgcggtggcccactcctgtaatcccagcactttgggaggctgaggtgggtggatcacgaggtcaggagatcgagaccatcctggctaacatggtgaaaccctgtctcaactaaaaatacaaaaaatagccgggcgtggtggcgggcacctgtagttccagctactggggaggctgaggcaggagaatggcgtgaacccgggaggcagagcttgcagtgagccgagatcacgccactgcactctagcctgggcgacagagtgagactctctctcaaaaaaaaaaaaaaaaaagataatttatccatcacattacatagatataattttgtgtgtatgtgtggtgaaaacacttgagatctattctgttggcaaattttttaaaatttaatttaatttaatttttttgagataaggtcttgctctgtcacccaggctggagtgcagtggtgcaaccatagctcactgcagcctcgaacttctaggctcaagtgttctcttacctcatcctccctggtagctaggactatacatgtacaccaccatgcccagctaattaaaaaaaaatgttttattttgtggagacggtctccctttgctatccaggctagtcttgaactcctggcctcaagcaatcctactgtcttggcctcccaaagtgtcatggttataggcatgagccactgtgcctagcttcttagcaaatttcaagtataaaatatgtttattagactcacctaatgctatacrttaggtctccagagttcattcatcttacaattgaaagtttttaccctatggccaatatttttcctttttccacacccaactccctgtggtaactgccatcgtactctgttagcatgagttcatttttttttttttccaagattccacttataagtaaaatcrtacagattttgtctttctgtgtttggcttatttcttttagcataatgccctttaggttcatccatgttgtcacaaatgtcagaatgtccttttttattaaaggctgaataatattccattttatacatttatgtgtmcacacacacacacacacacacacacacacgcagtgtatatcacattttctttatccattcatcggttgcaggtcacttaggttgtttccatatcttggctattgtgaatttatgcttctgtgtacatggaattgcaaatatgtctttgatatagtgattttatttatcatggatatatatgcagaagcagaattgctggatcatatggtagttctatttttttaagtttttgaggagacttcttactgtttcatagaggctgtcctaatttacattaccaccagcagtataccagggtttccttctcttcgcatccttgttatcactttcattttgacttttttttctttctttcttttgagacagagtcttgctgtgtcgctcaagctggagtgcagtggtgcgatctcggttcaccacaacctctgcctcctgggttcaagcaattcccctgcctcagcctcctgggtagctgggattacaggtgcccaccaccacgcccagctaatttttttttgtatttttagtagagacggggtttcatcatgttggtcaaggtggtcttgatctattgacctcatgatctgcccgcctcggcctttcaaagtgctgggattgcaggtgtgagccacagcaactggccctttttttttttttttttttttttttttttttttttttttgagacgcagtcttgctctgttgcccaggctagagtgcagtggcacaatctcagcttactgcagcttctacctcctgggttcaagcagttctgctgtctcagtctccaaagtaactgggattacaggcacacaccaccatgcccagttaattttttgtgtttttagtacagatggggtttcaccatgttggccagggtggcctcaaactgctgacctcaagtgatacacctgcctcagcctcccaaagtgctgatctcaggcgtgagccactctacccggctgtattttgatgttttgataacagccatcctaccagtgtgaggtgatgtcctaccttgcttttgatttacatttccctggtgatgagtgatgctgatcatttttcagtgcttttaataaaaagccacgtgtttgtttagttggtcacttattttctttaaaaagtttatatggatagaaagcaaggtgggtactcagagagggtttagttgctttattaatttttaaaattattaatgattttgttgactaaatgctggaataaattgtttttcaatttagattaatgacagctgtagaaagaaatcataaatgttttacatatttcatctcagcctatgttttatggtataaagatcctaaagtaatttcatggrtgtagggtattaaaatatgaaacagcaaaaagggacagcttgccttgcacaccgtgatggcacaggaaatgtcctaattttgtcatatattaagtgttagcatacaaacattgtgtgatggaaataattttaaataataaaacagccatggcagttctatgaaggaaacataattttctcaacataattcggatttttaaactaattgatattagtatcttattattactttgaaataaatgtttttaagatttagatagtttctcatggacccagaagtcagactgactggttactagctgtttaccatatatgagatttgggcacattactctacttgtccatacatcagtttactcatccagcaaatagggataattgtagaccttgtctcaggggttgccgtgtcaagtgatacaatacccgccaaaggcttagaatcagggctggtacctagaaatactcaacgtattaatataataggacaggtaacagacaacctggaatctagaatgaggaaatgtttggcatatatgtagcaggaagtctggagctagggaatatgtgggagttaactctgtagcttagcaacctcactcacattttttcagggagccttcctgaaggccaccttagctctgtgctctagcttgtccttttctttcagagccacatccttgcacagaggaaggggaacagggcctttgtcttctttttgtggctctttgtaaaagcaaatacatttttcctaataacctcctgacagatccctgatcatgtttgttggctggaattgccctactcttctgcccatatcaaaatcaaagggagtaaaagcaccagtataggttttgatggatagagcttgacccctggarctggggctgcggtgggagctcccttctttaccttccctgaaacacagtttcccatcacttcacacagtcagatctgttaagcaagggatatgtgggcagggatggggagtgacgaccagaagttggttgagtaagctaaataggactttttttttttttaaatactgcaaaattggtagaaaaagattggtagcccagagcttctaaaatatgatacagcttaattatatcataaagatataacttttatgattctactgtcattgtagacctgtttttaaggaagtagtatattctttgtaattttgttataaaatagtttctttttaagcaaaagggatggcattgagaagccacacacaccaaagaccgagctttgatttgcttctgttgaagttatttgagttagttgtctatgtggactgagaaggtacctaagtctaaaaacatcttctttggcataagtgtaaaaaaatgatgttccattcctgaaatttgatttgagtgaaactgtatactagaagagtagaagccactgatgttttcacatccagcagaataattgattaaactaaaatctgttgaagaggacaagaaccacagaaacaaaacaaaactccctctcaaattttttcagaagtaagcactattgtttgtgcagaagaggaatcttaggttatgctttatacactagaaatctattccaattattcccatttaattatggatttattctgttaaccattcccggaaagtcatctgactttaatgacctgatgtctcttctgaggctttctttttctctttagtttttgctattaaacatataataaagaggattgcatcatgtacatgaaaaaatattttgtatgcttaaaaaaaaaaatcctctgcctttccaatttgggaacaccagggtagaactgatggccatcttcctttagtcgtgtggtctggagtgaggtcagcagagttctagattttatgtgcctccagtggttttgtttttgctctgttttctacttaatgcttatctctcattatctgtttctgaaggcagttatgaccttatcagcttttccagtgggaataagcagaaggaatggaaaggcaaaagagtgctttaaagtgctaagctagctggcccctctagaagtctggggtgtcttattctttgggtggtattggtcctacttacggggatagtgaatcttctttctataagaatattggttagttttacttcaataagaaaagataggttgtatgtcttattagaagtctgtagcagcaagcacaatatgatttccaaaaagagtagccggggttttcagtgactaatcaccttgttcagaatagcccatagctgaatcctacatcagagtcatctcacaagttatgcttctgaaattttgactctgacactcaagaaacaaacgaacaaaaaacaacagcacttttagttttgatgtttgacagtgttttaagaagttcaaattcctttttaatggtaactgtttccctgactcagcatagaatatagtttgatattggcagataatagatcataagctgactttgttcttatattcccacactttattgcaactaataaattccacagaagaggcagcagggactttgtgatacatgactggaagaatttaggaccagaaggtagagggaccttaaggaaaacataagctaattgggagcctgccattttcacaaccttctcttgttgaataggcctgagcccaattagcagaaacagcagagaggcacaaggcacattccagccactgcttaagctctgttataggggaatgactgccctgacctttagagcaaaatccatgttttttccatgttttagggctctctccatcaagaaaaacatcttttaattggagattatacaaacaggcaaactggagggaaaactgacttaaatgtttgttgatgaagacaaaatgccgatgtctacgtcattttcatacctttggcagctacaaaagaatcccaccatccagtgtcaagtctcaaagtctcagaggccagagttttgggagcaatgatgataccttttttcctttttattttatatacctttgtcactttctgcagctgtgatgctttttctttatacttttcagaatatttatgcattataaacaatattcacatgatacatgttgtggtttggctgtgtccccacccaaatctcatcttgaattgtaactcccacaatttccacgtattgtgggagrgtcctggtgggaggtaattgaatcatgggggcaggcaggtctttcccatgctgttctcatgatagtaagtctcatgaactctgatgattttaaaaatgggaatttccctgctcgagctctttctttgcctgccgccatccatgtaagatgtgactttctcctccctgccttccacaatgattgtgaggcctccctagccgcatggaactgtaacatgtccattaaacctcttccttttgtaaattgcccagtctcrggtatgtatttatcagcagcatgagaacggactaatacaatacacaatatataagttatattcaaaaattatttgagaaggtaagtttctatgagtttaattttttgttttcattataatttacagccaaattcttgaagattgagggcaaaagtaaatttaaaaactagtgaagaaacatttttcagcatatccaggttttatggaggcagttttttaaaaatgtgtttttctccaggctagtcaatataattgtggacgcaagttttgcctaggttttagcttgttcttataaaatggtgggtgtctgggatgatcaacctgtggttcctgtgtccacaygacttaccagagttgttttttttccactgatctgcctacatagaagaaaatccccttccttgcccaagtgcttactagccttttctaagtgaaaaaaaaaaatctcatttccctgagatctagaactatccagatgacataaagaagatgttttctggagtatgaaatgataatgttttcttatcttttttctgttttaatctttaagaggctgggttcttgctctgttgcccagactggggtgcagtggtgcagtcatagctcacttcagcttcaaacttctgtgctcaagcaatcgtcctgctttagccttctgagcagctgggactactgatgcacaccatcactcctggctaattaaaaaaatttttttgtacaggtggggtcccgctatgtttcccagactggtctsaaactcctggcttcaagtgattctcctgctttagcctcccraagtactgggattacaggtgtgagccatgatgcctgtattttctttctttctttttttttaacgaatgtgagrccttttaaatgttgcccaggttggcctcgaatgcgtagcctcgcctccttgtgcgccaggacaaccggcctgagccaccggggctcccctcagtgcctatattttcttaattacaataggaggtggtttattcagcaatctgattacaacaacttcagatcggtcagggaaatgactgaggggtcacagcattaaaccgtggaagagctatagaaaktctgatataggaatagatagggcttcatggtatctgccatcattggtgagacttaaggatagattctgatgctgccagatagtagttaagatgtgggttttttgggtttgttaattctgtagcgtgaagtcaatgaggatccaaatgactgttcatattatttggttaaaaataaactaagccctttgcctccaaattctaaaagttctgtggaaaggaagggatttattattatttaccagttggcaaaccttcataaaatttgtagagaagcaaaatagtcgtgtttatctctagcaacaccaaatgtagaaactaaaaacatcaagattgttttaaaattaaacttacttttcattataaaataccagaacttctattttataagataaatctgttatgtccccaataacacccaaaataaaaccaaaacaaccttttaagagacttgttacctggatatattaacgccagtagcagattattttgttgtgctttgataatagaatccctggtattctaacacgtgttaaaattattttttaaaaaaacaatgatcaaaacaccctatatgtatgggacacattattttccatgatccctacatattttctgcttttattatccaagaattctggactagaaaccacagtggaagcacaggaccggagtgtggggctctggtggacgttcttcttagaaggacacacacattttctggggagcttccagtcatgtgcagggttacttttaggagtaccagatggcattctacttttccatatatttaacaacaaaagacatagtgaatctgggaagcatgtttcagggttggaaacctgtccctccaatgagtgtgtcctgtttctgacccctaagactggttatatagaaataaagaaagataaactatgcaaacttcattttcattgtatacaaaatggggaaaatcatacccatttggcagatgttaactttgtgggcaaagctgaagtgacacagcacacattccagtgcagacccagtttcttgtatattaaagacactcataagatgttttctttcatatctttttaggtaacattaggtttattggttatacctcaacaactccctcaagtattgggtatctcgttttcttaaattttgtttttctccttgcatattggaagtaccattaggtatgctggggtggtttattttcatccctggtgtatttctaatgcccccatcgtcatttcgcaatttgatttttgcttccgtggcatcttctcagaattagaataaaatttaaccttttaaaatcatctctggttcttttctgaagaacataatctgacacaaaaatgacatcagtgttaatctctatgtctgcttccattccttatattctcttttgtttttggcgggcgtgtgtagttttaataagattaaatgtaaggataccattaagaatgctaagtatcttcatgagagcttctgcttgaccacttgctaggcatctgggtcccttcgtgatatgaatggagtttggagggcacagcatcactcatttgcttttggacctggggtgtgcagttgaatgggggtactcatcaatttctcctttaaaacaaattttacaactgtctttatttattgcttctttggcctatggagctaaaagcctgcaagcagcggggaagtaagttagaaattttactgagtgaaaaatctttggtggtgtgtggattaaccttcaggggaagtctgttaggagctgatggttttcttacctgtgaatactactgctagaactagacatttagagcttgcactacggagaaagatacattttcatttttaactttgaccttcaggtgcctttgcatattttcattgcaggcagtcttaaagatttttgttgtgagctgtgtgattaaatacgacaatggaaggaatacatgctttatactataactctctttattcccacccatctgtacgtcatttgcttttgaaattttgttctttatttctacgttccatctatgttccatgagctgtgcaactgctattctttaaaaaatactggttatgaaattgcattaacattttcatcctacaatgtgtttttttcactgcctgtgtcctacaagcctgcttttagaaattgaatcacttttataagtcatttttaattttgaaattttatgatctagctatttaatctatttctatccaggactttcccagttaccttcaacatggtcttgaaatggccctaaaaaattcccgtcttcagtgttcaaacattttgcccggtggttgtatgttttcttcccaccgctgaggcctgggtatatgtgccctatagtatttttgtgacttctgtagatatatgagccatgtttttcctttatttttgaatttttttttcctgtgctctaatggcggtaggagattgtggattatctttttaaatagctgaacaaattataaagaaattaaagtacggtattgcggtagggttggcgtaggcttttgggtctcatttcatgtgtcagtattattactgtcctttatagtaggcacgtaatacttttgacakttattatttttagtaatctcagcactttgggaggctgaggcaggtggattacttgaggtcaggcgtttgagaccagccttgccaacatgatgaaaccctgtctctactaaaaataaaaaaattagctgggtgtggtggcacacgcagtaatcccaactactcagatggctgaggcaggataatcatttgaacgtgggaggcagaggttgcagtaagccaagattgcaccactgcactccagcctgggcaacagagtgaaactctctcaagaaaagaaaaaaaaattaaaaaatgtttttatttttaatacataacttcacaaggttggaagactgagcttttttttttttctgcaagttactgtcatttccaaattgtaagatggaattgcagtcttgatatgtgttggaattaagtttaaccctttgagaagcaccacctcttttcctacctttagtaagccctttaattctccgaagtaattcattaactcttctgacctagctttttattccattgaaaaaatgaaagcctggttcccaccaccatttttacagccctgcccttcctcgcatgcagaagcttcsctgacctctcaaacaccaaagttttcactctcatcctgtctcccaacccttcccagtattaggacgttgcttttgtattaatctcctgtctacggagtcatgcacataatctcctgtcttcacagtcgtgaatgtctcttgtttttctctctctcttctagaactttcctatcagcagatagactcaaccaaccccagtcctccctggcaaacccctgtctcattgtggcaccagcctggcttgcactccctcacagttcacacacttggttcccacttagctttcatgcagtcacctgtcttcccctcagggactttcctccatccccccatttgatggcgggtgatatccctgcagccttctgttattgtctctttgctcaccatccttttctctgtgatatttatgaatctaaatttgtcttttgtttcttttttattttttatctttctgtctgttttgctgtcctaaaatggcccaggcattgtcttgtttactatagctcctagtgaacccttatatacttttgggtaaatagtctttcaataaattgaaaggaaaaagttcataatgtccctactttttctgatatcatgtattatgggtggatctttgttgggtgaactatattgactcttttataatgccatataatgtgatatggtgattttcattaattatgggctayaaactgtagattataggtaaataaatgaaaacttgatgaagacatgtacatttgtaaacctcataaatagttgtactattttgatgacattattgcttataacttagcatctgcatatgacaaaaagaaaaaaatgattataaactaaaggaccaagaaatggagggaaatgtaagttctctcaaagtaatgcaatgttcctatttttttaaatcttratatgatggagagcacagcctttcttgtgcataagtttaatcgtttgtgaactttcttcaagaatgtcttgtagttgaacatggattcagtgttagaagataagcccgctcagtctgtccccgctggcctgtatccagtggtgtctgctgtatcaccgctgatcacactagccktgggaaagccacctggctctccagaggctttgtagagggagtgagggggcagagggtaagagctgctatgagctacttatgtgagatttttgtgggacaaaaggaaaagccaaaaaagtgttcttataggcccaagatagttgtcaactctattagctctaaaagtatttaattaaatatttaagatgtttaattatcaggaaatattaaataactcttcatgtttatataactaaagtgacataagttttctgttaaattggaaaaacaatatttgaacaaaccatttgattatattgaataatttataagcaattgatttgaacataacatagttaaatattccctccataaaatattacgtattttacttgtttgcgagctgattttagctgtttaaaatttttttctttagagagtccaggggtttttcatttttattcaaatgaaaataaattatactgttaatttaagaccccaaactggcaaattttttttcttggagatgaatttttttcttattctaggaacaatggatgtttgcttacatgttcaatatataaaacatggatgttacaaattctgatctaccattaatatgtaatacctagtatatagcttttggggagtattttcctcagttctctgagtaaagctttttttgtacatggatatttggtagaaattgacatttgatatgagaattattttgagttttggaaatcattttcaaatacagaggaaatattcttcattatggtattgcataaaaagtttcttagtcactggagtgtatcctggtttgaggataccccatacaggctatagaggattttttgtttttttgagttgatgatgataggtgtcccaattccttattatcattagggttcattagacktctgtatgagacacaggattctaatcttccctgttcccatgggatacagtataactcttcagactatagggggattaatttgataacattctttttttaatttttaaaatatttatttgaattttgcaaaggtgatacattcatagttctaaaatcaaacgttatacatggagatgcaaaatagtagtctccctcccccaactctctattagctagctctcctccccgtattcagccacagttatttgtttcttgtggctcctttcaaatggtaccatgcttttatgagcaaatacggaaacatattctcttttcacctttttatataaatactactacagtatcctgtgctttgattttttttttcttaatatagcttggcaatccttatagactgacacataaaaggtgtccatttttgaaacactttgataattttcctttgtatagctgggccagtgtttattgatgggcattaaggttatttactatcctttgctgttgcataaatatactgcagtaaataacctgttatagataagtcattttgtattgagtttctcrcagaagtatgcctaaaaatgaaattgtatgtttacacattgtacaggaatattacatacatttgtaactttgatagatgttgtcaacctgacctcagtagacatcgtaccatgttgcactccactagcaatgcccaagagaccctgttcactctatcacctcacattgtgacatgatgttgtatgcagtctattaaactgacttgatcagttatacctttaaaatatctccctttacacattctctaaagcagaaggctgttgatggagttggccaacatacaggctgcaagtgggcttcctatactgtttaggagcacagaccattcaaaaccttcccctttcctccaacaaataaacaacagttaaggaaaaggacgtcttggggtgagagttgggttcttcttgctctgttagagcattgagttcaattctttagcatttgctcagatgtcagtcactctgaaatgcacataaatcaaatgagactttctgaaagttcttacctttggcataacttgtgtattcttttcatattctaaatttcgtatttgattcatatttttatattttcaactggaattgagttattacccctgagcattcctatctcctatttgatagttgttgtttttgcatactttgccagaatgaaaatgagtagaatgacggggacagaaaaaggacaagattttctttttttaagatgggtagttcactaagtgcttcttgaaaagtaagagttttatgctgtgttctcaacagtaacttttgcccataaattctgtctgaacagaatcaatagtgttttcttcccttagtatatcccaaagcggggtgctttgtaatttacttctgtgttaacttttttcctgttatgtcttagactgtatgttatatgatagtatagaagccacctatgtgaaatatttaaacttttgtgaatgaatgtggtcttcttgccaaacgtaaacatactatgtttttctcgattgctcgggttcactgaagaaagcacaccttcttaagatacaagatttctgttgatgggattggtctatttgggggcttagtcaacagatattagtgtctcatttgtaacctttctcataccatgaaaggttgttggcaatttgtattctcattatcttactacctatttggatctggcagtctttctctttctttcattgttccatcatttattggcttaaatgagtatttggaagtcctggctggtaagaattctgtgtctttggatatattgattcgttgactctaggaagcaactgattttagattgttcttgatgtttccaaacttttccctttctgatgtttaagaagttgagatgatgaagtgttgccatctgcaattacaacaaaagtaccagagatagccacagtgacttcctttttttttcctgttatttgtaatatcaaaatgtaaaccagaaacagctatgcacacatatacacaggataaataagtattaaattaatattagatatcaaatgtggaatttctgaaattgcatgtaagtgtttagaatgacagaatgtttaaatgtcttttaccgttccctgatacctttatttattttggttttctatctcttatatgtcaacttgtcctaattaattaaattaattttatgcttgatcaaaataaatacagaatttgtgcagctcatagcaaagcctcgtgtgaatgtgaatatgtgctggtgtgtgaatgtgatagttatgatgttattttgaggctattttcactaaggaaaagacagtccaggatcctgatattgcaccttttatcagccattgatatttagrgtgttctttactttttcctcctcttttctgtatgcctctaatcttggcaattgtatttttaaattcattcatccctctgcatcttcattactacttccaaagtccaagctgtcaacagctctcacctgggtcactacacaacactgcagccctcctccctgtttacatctctttgtccactgtggctagactgatgtgtggtcaggagcactgcttgacacactctggggctctgaccatacccaggaacaccgtgggtgaagtggttaacagctgcttgaagttgcagcaacctggattggaattgcacagcatgtcttatgctgaccaagctgctgaactttctaagtgtcagagcaagcttcataatctattgtgatatatttcagaggattgtgaggatgagataagatgagtcatggaaagctcttaagacagtagctaaaacacatgaaatactctaagtgtgagggctgatattggtgtttttgtcctttttgagtcttcctgatgttccttcaccatgtggatcgcagctgcttccagggtgcattcccaggttaggcagccctgctgaactcactctagtctccagatctaccctgttcttgcatctctgggtctttgaacatgctggccaactcttccctttttcctgcctaggatctgctgttctgatctcctgccacctgcctccttcagctcattattcttagccatacccgatccctgccaaaaccaatgtgaggcacacataatagtgtcttattctttcccatccttgcactttccaaatttcattttaattatgtctttctttttaaagagggcaggacccatatctgttcctctgagtttttaatttgctttgttttcgagggaggcatgactcaatgtgtggaggcattgggtctctgtcacatacgtttgcagcctagcgtaaccatgcttttattgaatacatttgttattataaagggctttctgcttgtaatttgtatatctggaaatgttcttctcttaaaacatttttacagcaaccattttgataaaaaaatcttattccatagatagtatatattttyttacattgaatgattaacttttcaagaatctcctctagattaaattggagaaagtttgaggggagggcaaggaatgttagtttgattatatcagcagaaatctgggctttttgaattactcatattttaagtcccttgggggactaattttcctgagaactttgtattataatcataaacagatccagttcagtaatactttcataaacttctggctgagactttggtattaatgtcctgaactcttagaaaragaaacatatttttgtaggttggccaagaaaaataggtcttgattcaaataaaataatgtatttgttatttttaaaaggtttttccattgagcaatctgtgaaactttttggtaatttagttgtctaatattggacatgacttaggcagtgacttggtgtattttctgtggctcaatataatgactatttgaatttttaagtttttgcttttgacttgggagtaagttatgttagattacacattattacagaacagttaactgttactcctttggttgtagattttaataaaaggtagaatcctgtgtcttagttccttaaatatatttgaaatggtaaaatatgcagagaaattttttattgaaagtaaacattttatttaaggtactttaaatgtactttaaggtacatgtgcagttttccccctgctgttagtaaatggctgaaatagcactttggatctgtggcaccctggagaagctttcctcttcactcctctgacattctgtttctaagctcattcatattatttatagaaatttcttctttttgctctacctccctgagtgctggtcatttctctggatgggtttttacatgctcttccttggtgaacttttatgttactttagttcctcttcctgttccttcagacttgtgcttacctgcaaggatgggctggtcactactgtctagatatctttttgatcactcagattcaacatgggtgaaggtaaaccatctttatgttttccctgagatgggaagtggtccctaataaaaagggcaatgtgacttgaaactgccagttctgaacctcattgtccatggatctgggccatatatagcaacctatgtgttcagaattaccttacccctgtgaaatcatgagtagttaatttctggtgtttcctacrcccagaaaattctatgattggccattcttttcttgtttcttttaattttgctctgtgtctcccaggcttcaaacttactctcttattatcttctctctaattttttatgtcttacctagtgccaggtactatatattatacctttactcctctgtgtgtgtgtgtgtgtgtgtgtgtgtgtgtgtgtgtatgtgcacgtgtatatctttctattttcacagcacctgttctcatttcagccatattccttttgactagacctatgtaatatttgtctccctctccatctgtttgtttttaaaatcaattctgcgttttcctatttgcttagtcttccaaattgccacttggatttcctcacytgcaagtttaaaagcatgcaaaacactccctactgtattttgatttaagttaaatcaaatttattatcttgatattctgggttctctgcattcttttttttttttttttttttttttttttttgagacagagtctcactctgtagcccaggctagagtgcagtggcgtgatctcggctcactgcaagctctgcctctcaggttcacgccattctcctgcctcagcctcccgagtagctgggactacaggtgcccgccaccacgcccagctaatttttttagtagatacggggtttcaccgtgttagccaggatggtctcgatcttctgacctaatgatccacccgcctcggcctcccaaactgctgggattacaggcatgagccaccatacccggcatttttttttttttttttttttttttgagacagagttttgctcctgtcacccaagctggagtgcagtggtgtgatcttggctcactgcaacttctgcctcccaggttcaagcaattctgttgcctcagcctcccaagtagctgggattacaggcacacaccaccatgcctagctaattttgtatttttagaagagacagggtttcaccatgttggccagactggtcttgaactcctgacatcaggtgatcacccgccttggcctcccaaagtgctgggattacaggcgtgagccccttgcacccagcctgagctaccacacccggcacaaatttctatttaacttttttaggcatcatctcctaccatgatctcatgcatattttgtgctctggtggactgctgtgccttcctttaaaatcaattctgttccttctgacttcagatattcctacaatgctagactccccctactttctgaatcagcattgtgtcattcattgtttaattctgtctttgatcatgtgtattgatgctcacattaagatgacactctgcttgaaaatgaaggggtagcatcaggggtgttattcatgtgcagagccaagatggatctcagcatcatacttattaactgcaatctggagtaagctacttaatctgtagtttccttgagaggcctcaacctgggctaaaatggtcacttaatgaaaactgatatccaaaaaagaaagtgtgtggtagaattttgtggaaatccaaatcatttatttcagttaatgatctgtcyagaaaacgccaatcagtttttatcacatgacctacatgttcctcttcatttctgtggagtaaaagatgttgcggtgctccctctgtgtcacaccctgtgaggaagtggtgtaatatgcccacaatcagatggcctagatttgactttctgaggcattcattagcctgacccctgtgatcctccatttcctcatctggataattggggaaattgcctctttcttccttatgcagttgttcagaagctttaataccatagcggacagcttatggtcttgacccagaaaaagctaaaatttctgtttcttttagttgtgtgactttggcaatattgattgtttcctattttagttttcttatttgcaaaatggtagatgatagaaccgatttcatggacttcagtaaagataatgtaaaataatatggttcaatattaatcagtgttagttattttagttacygtatgctagttcatgcaagcctaatataaaatttatttttcttctcgctgcttatccaatcctagtgattgctacaaatttttgatagtcatattctatcattaggaagtcaacttgctgcttaaaatggaaagccttgttagaataatataagtaaattacgtacaatagtctattctattctaagatattctaggttaggatttttaaaatgtagaaaaaatttggagtgtatgatcagtattatctttatatttctcatatgtgttagatggttatgtttttcatgtagtcatacatatggttaaaatcctttgataacaaaagaaaaaataccatatagccaataattcaagaacatgccagttggcatattctcagattgtactcaaatggtaaacactttcaataaggtgtttcttaatatcttactaagaagtactagcattatggctaagctgctttttgtaaataaaacagatttttatagccaggtgcagtgactcattcctataatcttagcactttgggagaccaaatcaggaggattgcttgggcctaggagttcgagatcagcctgggcagcataatgagaatccatctctacaaaaaaaattaaaaataactgggttaggctgggtgcagtggctcacgcctgtaatcccagcactttgggaggccgaggcgggcggatcacraggtcaggagtttgagatcaacctggccaatatagtgaaaccgtgtctctactaaaaatacaaaaaattagctgggcatgttgatgggcatctgtaatcccagctactagggaggctgaggcaggagaattgcttgaacccgggaggcggaggttgtggtgaactgagatcacatcattgcactccagcgygggcaacagtgcaagactccgttttmaaacaaaacaaaacaaaacaaaacaaaacaaaacaaaacaaaacaaaactgagttagagtggggctgtattcttagctacccagaaggctgaggcaggattatcccttgagcccaggaagtggaggctgtagtaacctattatcatgccacttgtactccagcctgggtgacacagtgagaccctgtctcaaaaaaaggaaaaaaaaaaaaaagatttttatttacttgtggttctaatgcttctcatctaggttaagttttgcttaaattcaaagaggtgtctagacagaagtaactttgtcactaaaaccttcattcatgactatataatatatatatacaatgaaatatcatttcatttcatgaatattttatccagcatacatgggatataaaaattcattttccgagtttctgagattttattttctttttcttctcatagaaactaagtctttttcaagttctgcactgtacctacttttggctttaaaatataaaaggaattaatttgtatgatgttttcaatgtgaattcatttacaacctgaatttataagcgttctactctgactatgacttctaaaaaatttccatatgcatactgtggttttaaaaataattgtttattgtttattcttttctttactacctccagtctgagcaagagttctttctttctttggtgcaccattttgcattgctaacaaattttccttgactgattcgtacttctattttggatgtgtgtatatatttgtgtgtttgtgcaagcttacataaaatttagygttagtgtttctgcatgatttcctttagtttataatgtaggaaaaaaatagttcttacagtctctcaccccaccagtgatttgatttagcaaaaccactggctttataatccttcctggcccttttgtcccattggcagggctstaacctctttactccagagaaaacacagctgttgtcktcttctttctgaacagtgaagggggctacatcattttcaactgtattttgaagaattaatttgtgcactaatataaatgagttttctaaatttaaatgtttgaaataaagacaatttatataattttaggcctcttttttcttytagagatgggatctcactatgaggcccagactgggtttgagtttctgggctcaaatgatcttgctgcctcagcctcccaactagctggaactgcaggcacacaccaccacacctggcttaagacatttttagcaataaagcaatttttggtaggtatttgtgagtagatgaagagcttttagttatgttgggctctttgcattgtctcttacgactaggcttattcataagaatcctataagtcatactgctttaaaatttttattatcactagagtcaggggaattgggagagattcttcctcagttagttgttctatcttgaagattggggaaatgctggaggtttgttgatcgggagagattcttcctcagttagttgtcctattttgaagatgggggaagtgctggaggtttgttgtgggatgatgtcgttttttgggagttgctcaccttgcaagagccttggtctaccggccttctctctcaggtagcatttgcccattgccatcacatattccacttcaytgtccagctcccccattcctctacatggtgatrtggtgtgtttgtgtctttgtgtctgtgctatgtagttgccacttccccctaccccttcatsgcctccacatatcgggggaacctgtccccgataattcaacgtagtttcttttatattttccctaagtgtcagccagtctgagaaataaagagaaagagtacaaaagagagaaattttaaagctgggggagacatcacatgtcggcaggttccgtgatgccccctgagcggtaaagccagcaagtttttattagcaattttcaaaggggagggagtgtaggaatagggtgtgggtcacagagatcacatgctttaagggcaacaaaagatcgcaaggcaggaggtcagggcgaggtcacaaggtcagggcgaaactagaatcactaatgaacttccatgtcccgctgtgcatgcattgtcattgataaacatcttaacagggttcaagagcagagaaccggtctgactagaattcgccaggctggaatttcctaatcctagcaagcctaggggcactgcaggagactagggmgtgtttcatccctacctacgtctgcataaggcagacactcccagggtggccatttgagaggccccgcctgggaatgcattcttttctcagagctgttaattattaatattccttactggggaaagaattccgcaatatttctcttacccgttttcggtaataagagaaatatgcccggcccacaggcagccagactttcaggttatctcccttgttccctgaaaatcgctgttatcctgttcttaaggtgcccagatttcatattgttcaaacacacatgctctacaawcaatttgtgcagttaacrcaatcatcacagggtcctgaggcgacatacatcctcagcttacaaagatgayaggattaagagattaaagtaaagtcaggcataggaaatcacaagagtattgattggggaagtgataaatgtccatgaaatcttcacaatttatgttcggagattgcagtaaagacaggtgtaagaaattataaaagtattaatttggggaactaataaatgtccatgaaatcttcacaatttatgttcttctgccatggcttcagctggtccctccgtttggggtccctgacttcccgtaacatccacacgcctgggattctgggattgctcttcttctacttccttttctggttgtgactcatcttttaactgtaacttattgaaggtctcctacatttttaacactgaggtacttgtgaagaaaaaggacattcatttgaacaaatatttgccactagatattagtcttaaacttaagccgatatggtactattatttagaaatattttaacaagtaaattttttgaaataatcatgtaattactcattcttaagttgcctatcttactttttaattatagaagtggattctatagcactgtaactattttggttctcttttccttatctcttttctacaaaaaaataccattctccaaaaggacattttagygtraagtaagccaccaagcacatgcaaaaagtggatggattctgtttactgtgttttcagttgtttaacatttatattgaaaatgctatgagtaacgaggaaactcagtttgctgaatgttcaccatgtaccaaggtttgtgctaaatatcagtgttcatgatcttgtaggtaaagcaggcattactattgccatttaaaggtaagaaaactcatccttttactaaactgtttgcatgttacctacctagtaagtgatagagatacaatttaaaaaccagttgattctggtttttaaacctattacttgtacggttgaaaatataatactawatttgccattttgtttttgctcagttaaatatttctttagtattgactctaggctttggtgttcagtattgattaaaaaaaattcaactctgtcctcagatacctgatagtttattgggtccacagaagattggaatcattgttgtgtttatgatgaagtaatataggtggatgtaaagcatctgtgaacgtttcagtgactttgacagttgaatagaaatttgggtactctgcccaaaacactaaagctgctttgggtgaataaatagtattgactttaggctttgaagcacaagtaagagttaaactagaaggggattaaaatccttgrcaaaaagtcagagtttaggtgaaaatggattacagtagcatgtccccatgcccagcgccacctattttcacagggacatgcgcctgtaatcccagcactttgggaggccaaggcagcaggatcatttgagcccaggagttcaagacaagcctcagcaacctagggagacccccatctctacaaagagtaaaaaagttagccagacatagtggtgcacacctgtagtcccagctgctaggaaggctgaagtgagaggatcccttgagcccaggagttcgaggctgcagtgagctatgattgtgccacagagcgagaccctatctccaaaaaagaaaagaaaagcaaattggtggaattttcgtttgtgagtaatctgatgtgttgagagttgtttgttagtggccggggtgcatagaacttagattgggttctggttgtgaaagtatccaaatgtataacgttaagaggcaatgttggtgaaagaaggggtctagagtgtcacattgcttccaaatgaatgtttcattcattaaagtataatgaaaatggatttgagaagagagagacaaaagagagaacgcttaggagggtgagcaaaaatattctaaatgcaggctattccagtagagatggaaaaaaattggaagataggaggtrgaataaaaaaaaaagtggtcttggtcatgattaagatgtaattttcatatgattgagacattaaaaatggctcacagcaatgtcagtagaatggagggacacgccccaggtttctaggaggctgtgaagaaaatgggaggtataaaatgtggaatgctaagagaaatagaggaatcttctttgttttaattttttaaatagtaaaggagatttttgcccagttgcctgctgataggagagagccattgctcatgtaataggtctttttgctcaaaatttaaagttaggccaggcatggtggctcacccctgtaatcccagcactttaggaggctgaggtgggtggatcacctgaggtcaggagtttgagaccagcctgggcaacatgacgaaaccccgtctctactaaaaatacaaaaattagtccggcgtggtggtgcgcgcctgtagtcccagcctctgctgaggctgagaaatgagaatctcttgaacccgggagacagaggttgcagtgagctgagaccatgccattgcactccagcctgggtgacagagcaagactctgtctcaaaataaataaataaataaataaaaaatgtaaagttagaatcttgattacttgaattactaagcccagtttcatcatgctgcatatttgattagttccttctggagtctttcaaagactttctggtttctacttacctaaacggttttctgttactcgaatacatcttgttgcctatttcttccaacagattattatgaatgtattaaataacattggtcttgattcttatcccaggggattctgctactaaaatctctgttcatcctaagaaactctttatgtttgtttgttagagaaaatgatgactggtgattttatttttcatcccctgcatgcattgctgtatgtaagaaaagaatggaagtgttcatcaatttttagctgctctttgacttttctattatgtttgtattatattatattaggtaagatgttaatatacaataacaacacttgcaaatatagaaatatttatgaccttaaaaataaaagggaatttaagggttaatcttcaatctgtggtgagttgctttttgctggaataatattgcttggggacttcctatgaataagtagataaaaattggaccagagtttcatgatttcttttcaattccccatgtgattataagtttgccagtttgttaatatttgaactttaataacggttctgtgagttgaaaaacaccattatgattttaaggtggtctggaaaacctaggtagttgttgcataatttgacgtaactacttgaaactctggttctcttaaaaacaattttgataatagtaataacattactagctttttttaaacatgcccaaattcagttgtgtatgtatttgtgtatatgtgaatcagtgtgctgtatttagggtaatttttggttaataacagtaattacaagaattattccttttcaaattttataaaatgttttaattgacaaaaatgtatatattgtgcacgacttgatttgaaatatatacattatggaatggctaaattgagctaattaagacatgtaatacctcacgtacttcgtttattttgtgtggtgagaacacttaaaacatgttttcttagcagttttcaagtatacagtatattgttattaactacagtgactatgttgtacagtagatctcttgaactttttcctcctaatggaaattttgtatacttttaccaacacatccccacccaccatccccctaaccccaggtaaccacaattccactctctactttgatgagttcagtgtttttagattccacaataagtgagatcatacagtatttgtctttctgtccctggcctatttcacttaacataatgtcctccactatcattcatgttgccacagtgatagatttctttctttttaaaggcagagtagtattttgttgtgtgtgtgtgtttgtgtatgtatgtatctgtgtattacacatttttcttattcagggtctattgataaacactgttgataaacaacaagataggttgattccatgtcttcgctaatgtaaatagtgctgtaataaacatgtgagtacagctatctcttcaacatactgattgcattttctttggatacatgcccagtggtgggattgctaggtcatataatagcactatttttaactttttgaagaacccctataccctttttcataatagccgtactaatttatattcacaccaacagaatgcaagggttccctttgtccacatcctctttagtacgttatcgttcatttttttgatagtagccattgtaacaggtggaaggtgatatgtcattctggttttaatttgcaattccctgatgattagtaatcttaagcatttttcatatacctgttggctayttgtatgtcttcttttgagaaatgtctattcagattatttgcccatttttaaatcgagttatttgttttctttttgttaagttgcttgagttttttttttgtatttattttggatattaatctcttaccagatatataatttccaaatatttcttctattccatacattgtgtttttactctgttgattgtttccttggctatgcggaagctttttagtttagtttgatgcaatcttgtttgcctatttttgcttttgttacctgtgctttgggttcatatctgacaagaactagcatgtcttgaattttaccctgctaagttttttatatacgttattcttaaacagatcctatggggtagacgttagcattattacgtcagttttctggttgaggaacctgagttatgaatgccatattatttgctaaaggtcacacagtaaatataccttggctttaaatctcagcctttctaactttaaaatccatgatattatctactaaattataactgcatagacaaaggtggattattcataaactgagattcctaggggtgagagtgggtgtccctggatgtgctgtgggaagtctgtgaaatctgttccttccttagggcccttggtctggtcctctgcctggaaattgctttacccagatatcttcttgcttaattctcctgggtccttcaagtcttcacttgaatttcacctcctcactgagaccttctctgacctctgtttacaactttatcttgctgcctctgcaacgtccccacctctccaaatttctgtattcccaggtctccttaccttactcatttttaatagcactagcatacatacaattctttacatttattgtgtattttctttccctgcctattaaaatatgagtttcagaagggcagaaatcttttccgttttgttcactcatctgttttaagcacctgggatggcacttagcatatcataggcattcaataattgaataaataagtgaatgattcagggtgggaattctctctgaattcacaaataagatttattgtttaatgagcttgcagctaggaaaagagttcatggcttttagcagattttcactttaacagaccggacccaaagtttacttcaagcggtagtgattcctgtgcttttaagttgaatgaaaaaaaaacatggatgctcatttttagttgtatatgatgcatagaaatgtataatctaatgtagattaatgtaataactagtataattattaataactaatataactaattacaaattataattaaatacttttatattttatatttactttaaatattataatttattacttaaataactagttataataattattaataagtagtacaataacttatatatgttaataactagtaaatgctagttcagtttgcagttttccttgggrtcattttggaaagataaattatactttgcatttcatttttgttttgttttgagatgtgatcttrctttgttgccaaggctggagtgcagtggaatgatcatggctcactgcagccttgaccacccaggctcaagcagttccacctcagcctcttgagtagctggaaccatgggtgcacaccaccatgcttggctgattttttttatttgtagagatgaggccttgcaatgttgcctgggctggtctcaaactcctgggctcaagcaatccccccsaccttggcctcccaaagtgttgggattacagacatgagtcactactcctggcctgttttgcagtttaaaattacagattgaagattattaaattttgttctgaacatgttaacatgcatatatttttgaatgtcaccatttgagaaaagaaaccgaactgtgggatttaatgcttacatatttgttataaatacacagtacggattgccatcgtagtctttgtcttctatttgtgcatgcaagtgatgtgtttttattaatttctacaagaattattgtacatgtacatgtaaaatatgtaacaaagttgattaggcagtgaccatcaagagagaggactcctgtcatcagtcaattaaatagttgcccataaagctgcacattcagtaaacttaaaagcaggaacacttgtgtggatgcaaacatagtgaggcgcattgaattccaggatcatgatctctgagttatttgtttaactgtttcatcctctttaagatcatacacccttatcttgggcatctgtctcctatgtataaactgactgttaaaagtttgaatgttgttgatcagagtgaataatttactaaaacaagtaggaataaagaaatccctcttcacgtatctacagaaatatttgcacgtgaataaggatgctaattgtagcagtaaaaacagggtgctagaaacaggcttaagtgtccattaatggaggagtgactaaatcaatgattttatatttgcactgtggggatactctgcagctattaaaaaattgatttagcctgggcaatatagtgagcctttatctctgcaaaaattttaaaaatatcagacgagtgtggtggcatgcatctgtagtactagctactctggaggctgaggtggaagaatcacttgagcccagaaggcagacgctgcagtatgccaagattgtgccattgcactccagcctggctgacagagctaagcaagactctgtctcaatcaatcaattaatcagtcaatacagttgaggtaaaaataaattcctaggtattgaaatatttgcaagtcatgttgttaagtaaaaagaacaagttttacgtaatttgtatgttttaattcttgtgaaaaattgcacttgagtgtatggatatgtcctatgtataaaataatagagaattgttttccaaattgtaatgatggttaattctttctgaagggagagttggaatagaaatgtagggtgaaatattgtattttatatactttaccactaattaaatattttatgaaactacttaataatggcgaaatactgcctagtaactacctaacatttaaaacattttctaaatagacatacatacactccaaactgaaatggattggttttccttgccttaaataatgtttctttgcacattacttcttttcttttctttttttttgagacggagtcttgctctgtcacctaggctggagtgcagtggcacaatctctgctcactgaaacctccgcctgctgggttcaagcaattctcctgtctcagcctccaaagtagctgcgactacaggcacatgccaccatgcctggttaatttttgtatttttagtagaggcggggtttcaccatattggtcaggctggtcttgaactcctgacctcaggtgatcgcctgcctcagcttaccaaagtgctgggattacaggcatgagccaccgcacctggcctgtttctttgcattacttcttatccattctcccctcaacactgaacctttgctcttatttataatttacttgatgacaaattttaagattttaatattcaacagttattctgttttttaaatttaattttatgaacacatgtcttttattaaaaattctaggctaggtgcagtggttcctgcctgtaatcccagcactttgggaggcttaggtagttggattgcttgagcccaggagttcgagacctgcctgggctgggcagcatagtgagaccttttccctgcagaaaatacaaaaattagcctgttatggtgacatgtgcctgtagttccagctattcaggaggcagaggcaggaagattgcttgagmccaagaggtggaggctgcagtgagctgtgattatgccactgcactccagtctgagtgacagagaaagaccctgtctccaaaaaatacagaaattctaaagctctctcaggggacaaggttggagttacttgccctctgaaaatggaacacactagacaaatgtttttatgtcaactacagtgatttgaagttagtcactcaataaagactagtgagttaaacatttctgaaacagatttaggtaattttctaaagattaataatcatgaatattgaagtagacctgtagtttatttgctcatgtttgtgagataaaagattaaggcttgcagagtaacagttatttcacattcccattggaaatgtggtaaatgtgcaaaataaagaatatatgctgggtgcggtgactcacacctgtagtcccagcactttgggaggcctacgtgggcagattgcttgagtctaggagttcaagactagtctgggcaacatggagaaaccccatctctagaaaaatataagaattagccaggtgtggtggtgagtgcctgcactctcagctactnaggaggctgaggtgggaggatcacttgaacccaggaggtcgagtatgcattgagctaagatcaagccactgcactccagtcgggcgatagaacaagaccacgcctcaaacagtaaatatctaaaaataaaaaatatataatataatcatccatggcactttactgtcttgaaaagttaaatgatagacacttanaatttactttttaaatttcgaagttcactattcttgcttctagagtatagaattacactcctttttcagagttaggacaaattattgaaaatgaatagctctgaaatagatttatttttatgaacttaagtttttatgaatatgcttttactgaaaaaagatgttgtatatttaatttctaaaattttattttagacttgtcttgctactttctccagactctgaaagaggaactttattttttctggatgggtcattggtcatttttactcagtggaaattttttataaaatcacattggtaatttggttaaggaagggtatttctctttgtaccacattgaaaagtacctgtggaatttaggctcagcctattttctcctttttgtggtgaaaagtcagaaaagctgaacagtagtaaatgcagttggtaattgaaaaccattaagataaatgcactcattatttcctttcaaaaatttcctcaagttcaaaataaacccaaacaatcgaaattattttctttattttgaaaataattaatccattaccttcaaatcacctttaagaatttctattgcaacttaatcataatgattcaaaaataagaaaaaatcattagagaggagacacaatgttggtggttcataggtgaaggggatataatgttgagcatattctttcaattttcttgaggtttgaagttttcccaaataaaaattttgatcataggaaattcagtgtaatccatgttcttttctgtggctttttaaaactgcaaagtgaattcattcttacctgaatactgtaattgcctgatggattcttccttcccgctgcacagacaaaatcagtccgccgagaccacagcattacagtagagaaagtttaattgacacaatgctggttcatgctgaagaactggagttataacttaagtcagtctccccaaaggcttgaagcttagggtttttatgtacaatttggtgggcagagggctggggaatkggtgctactgattgggtggggatgaaatcataggggtgtgggaaccattcctcatgcctctgggtgggaccacaggatctgttgagttatgagtaaggggtcccctgttatcatccttgctgtaaggttaaactgtaaactaaattcctcccaaagttagcttggcctatggccaggaatgatgaaggacagcttggagtttagaagcaagatgaagtcaagtatgtcagattcctattgttacaattttgcaaagacatttcaatctggccattacagttcatgttgtgatacaatcttttttaaaggtatttaaagtcacaaaattcatacattattttatttgcagccacctctatttgttcatagtctcactttccatattctatctctagcaaatggatgtcagtgttaatactgggcagtgtctggctaggttttcattttcattttacatcaggttgttcycttagtaatccagcgcattctggacaactaaacactagagtcagggactgagctagatgctgtaggtgcaaagatgcctgagggaagcctggccctgataggtgcttaatgaagatctgagtttgctcactgttactgtagaacctctcatctctgcaggctgccttcttctgacatagtctcattttgagcaggaaactcatgtttgttgttagtgatgttctctgcaaagtcccccctgccctccttatgttggtgtgaagtgtcactgaaatgagccactctcctggacgtcttttaagagtgcatctagtctagttatgtctgctcaaagcatagctgactgtgacatgacaagatttgggttattgtggggctctctctgctccttccctacctgtgacaccttccccagtaaactctatttcccatttacatcttgtgattttggcactgtggattttgcactctgtttacaagcggtgtgtcctattattaagtagctctcttttgaggagggtagacctacatacacgtagacttcgtggattgatagcacagacaggagatggattacctaactactctgagcagcagttctctattcctagaataggaacagcgtgtgtatagtgcctggcagattcatgaaggcttttaaatctatgaccactcagttaatgccttctgtcctcctactcatctttaccctctgagggtaccctccatgtaaagttgtttttagtatttaagtataatatccataagataaactgctttctccagacagtatgtatgcacttaataggtatacttgtaaaacaccaaatagcaattctatgttcaggaccactttgttgatgggtagatttgggggtgcaatgccacctatacactgcaccccaagctgtgtcccctccaagtgtctcctttccytaatcccactgaggtgccataccggtgagcagaggcactatggtgtttaatccctttctactggtcttttatgcaattcaggttcctttttagataagaatcgttctttgctgtttgactggtttgctataaattcattgattgatagcatttcatttgttggttcaagtaacatttaaacatgtgatatatgaataggctttctagaatgtaaaacaatacatataaaagcaataatctggccaactatgagtatcattcagagtgttgatactttatattattgattttgcttatttattgatcttctgcgaactctttcttttctttctaatggtactcaagtactacttcattcacttggctgacttctcccttcccctgagccgactgtgcatgtgtcttcccaactctgtgttcagtgacactatattggttgccagggtgggagtgtttgtgcaacaggtatcaacaaacactacatatacggcttccccacctcctgaccctttttttttgtttgtggagattctattagatgtttattarcacgctcctggctctctgatttcttcataccagttcttgcacattggtggttattcctccagaagttggtggttcttcttcctgatcatggctttaacagtctgttccttgcattgatttttgtctttcacctgtaagatcaaacttctggttactgcagatgaatctgcatgtctgcatctgcttgtctggtctgcccacccccattcctctctccatgagtccctggaagagttatggtatagaggcacttgggaggtcttttcagtttccttttcccagtacttacttagtgacgttgctttttaattttttttatttgttttctaaatatataatacttatacatgtgatattttgttatatccatagaacatataatgatcagagtactgggcatgtctatcaccttgggtatgtttcgagtcctctctgctttctattttgaaatatataatagattgtttatttttttcttttaatttttttttttatagagactgggtctcgctgtgttgcccaggctggtcttgarctcctgggctcaagtgattggcccatcttggcctcccaaaatgctgggattacaggtgtgagcccacgcccagccagattgttgttaactgtggtcagtagattcagcttttatagaaaccttagggttttgacccgaggatgtgatttaaaactgatcctttccaacttctcagtcctatccaagttgcaaggccgactgagtgttcctttaggatgttttatggctagcaatgtcatgggtttttaagtgccttgagaaaacagctgagccatagcagtgctcttcttaggcatgtgggtacagtagacatgcttctattttttaaatatgatttgtactttgtaccttgatgatatttgtttctcccccctccctttttttttttaagagcgagggtcttgctctgtcacccaggctggagtcgctctgtcacccaagctggagtgcagcggcatgawtatagctcactgcagtgttgacctctggggctcaagtgatcctcccacctcagcctcctgagtcgctgagactataggcacgtgttaccactcccagccagtttttgtgtgtgtgtttctttgttgtaaagacaaggtctcactgtgttgcccgggctagatgggatttcttttactgtcagaagaaatgagatcgttaactattaatctctttgaccttgtcaattatttaactcaactactttgacatttgcaatgttattactagtgtcacaagttttctcatggtttaatgattcttttagggtagaattttactaatatctgacttgctactctaaagaacgtttatagtcatcaacttgttccccctttcccttgcaattccaattttttaaaaaatcctcatatataggggtgattttcagaatgatagagaacagagccaaaatgatttggccacgtaaggagtgggtttcctacttaatgtccaagggacagacctaagcctgcgaaactcagcgtggtgatagagacctgtgaggcaggtaactcgggacccttagagataaagaagaatctggataaaagggctatgagacttattttagaaattgcctaatgacagattcagggttttgaataggaaatagtatctggtagtcaaaaggtttctcaaataagtggaaaaaaaaaaaaaaaggtagagctggcccttgaaatgctaatctgaataacaaaagaccgagctgactttccaggaaaagtgtgaaaggcttctgaacccactttccttgtctttgtctttgtgtgactgtactgcccattgttcctacacacaattaaacacatccatgctctggagtcaggtattaatgcataggtgttatggtttttaaaaatatacctaccgtcctattttttaaaattgactttagtttcttatcagttacaaagtcttatatatatgtgtgtgtgtgtgtgtgtgtgtgtgtgtgtgtgtgtatatatatctgaagtactgcctaatgttttttcaagagagaaaatttctgttagtagtaacccacttcaccctagtctattatttggagaacaaataagcagtcatcttgatcctgttttatcttaacattttaagagtaaacgtttcaagagtaaaacagttctgatcccccagtgtgacctcaacaaatatttcaaatcttttatttttgtaaatgaaagtaatgtcttctgtattttctatttcttatttggcctatgtatcatttgtttaatcatttttctaaaaattgtaatgtctctttctctgaaggcatctctttctggtaaatattgatatgaaaatgtttcatataaaaggagctgaagttcttttagtccatttgcaaatcatgaatcccggatttaattatatcgcaagggaagaacctgaggaaatcaaaagtactaacataattgggccaaactgtgtaatcaaaagcaaatgatatggttattaaatctaatgaaaygatttcccagcatttaattcatttctcggattcaagatattttagtaataaatacatctgttgaaatggacattctgtgttgtcaccacttttaaacagttcttttctcaagaccatttctggtaagaaatatttctaaaggttacaccttaatgcagatagtggatgtctgctagggctgggagaaaaggaaggtggaatgggaggtaaagtgtgggtccttattaaagcggaaggagaggaatgaagagagtacatcgctttttaaaaaatgttattctcttgtatcagcatcttcattttacataaaatgaaaacatgccattgcttggtaaaatatatatgatatctacgggattaatggctagtttggctggggctggggttcatgcctgtattcctagcactttgagaggccaaggtgggaagatcgcttgaggccaggagttagagaccaaaatgggcagcatactgagacccagtctgtacaaatatttaaaaaattggccaggtgcgatgatgcacacctttagtcctagccactcaggaggctgaggcaggaggattgcttgagcccaggagtttgaggctgcagtaagctgtgattataccactgtactccagcctaggtgacagaatgaaaccctgtctcttaaaaaaggaggaaatcacacacacacacacacacacacacacacacacacacacacgactagcttataaagattttgttaaaatacatagaaaaaaaactcctgataaacttgcaaagagtatatgtaatcattccacaaatatgattgtattagggtttttcagagaaacagaactggtagaatggagattctgtctatctatctatctatctatctatctatctatctatctatctatctagatatgtatgtctttagatatatacacacatataacatttactataaggaattggctcatgtgattatgaagtctgaaaagtcccaagatctgcagtcaccaagcaggacccccaggagaaccaatggtgtaaggatcagcccaaatgcctgcagctctagtcccccagaagatctgatacttcagtccaaaggcaagaaaagaccagtatctcagctcagcagtcagacaggactcctcttcctcagcctttttgttctattcaggtctccaaatgattggatgatgctcacccacattaggkaggacactgggcttttctcaatttcctgatttaaatgttaatctctttcaaaaacaccctggcagacacacccagaataatgttgggccaaatgtctggatgtcatgggaccccgtcaagttgacatatatacttcactttcactatgatatctttaatctcacttgcaattttaaattccagctagaatggcagcaagactttttgctgatagattaaggggaataaggggtatgtktgtctttttgtctgtctccctatctccctcctcccccatctctgtctgttagagcagctgtctaagaactgagaaggatctaagattttatcctacttgcaagctaacaagttagcctgcctcagtttcatggttgctgacagaagacctgaggctcctaggtcagagatgagaaattgtattactcttagcacaacatgcaacataagcatcagcatatttggttcagttctccttactccctagacctatggaagtgatgcccttgggcccagatggatgcctgcatgctctatgggtaatgttacaggacaggactctgagctgatgaatcttttataatggcagtaagcaagactcactccccttggccctggagggagacactgtctctgtctcccacagcttatctctgtagaggtatctttgaaaagcaagtccagaacagaagcaatcagtgcctctgtttataagacatgcagatttgcaagagacaaatggagaattgtgtcccaacacagaaaataaaagttgtgaaatgaacagtttaataagaggctggtaatgatatcaattggctcggtcattttagaaagtagtttgatactggctaccttaaaatgatcatgccatttgaaacattatgttatagacttcctccaaagaagtgaatcctaaatattgaaatgtttttatttagaaatctgtcagttactggagttgaagtgttctttgatgagtgaattgtgaaatgatgatatgtttacccgatagaatattgaatcattaaaaattgtttctttaatgattgcaataaaatgatacattaaatatttatattttattattactatgtaagaaaagaaaaacctatatgatctaaaaaaaaaactgaaagtaaacaccaaaggtaagaggaaaagacagaaatcatctcacatcagtacaacagtgtcctggagagcctggtgttctttaatcactctaactgaacttttgtgccatagaagatgaaggacacttattttttaaaacaaatatgttaccaaattcccattttctttttaaaatttatctagagggtggtgttgagcacctagttagcccttaatagttacaagacagttttctgagtacttcaattagctcatttgatttttgtggaaactctgagatagatactattatttcccacagtttataaatgagtaaactgaggcacagagaagttaagtaacttgtcaaaatgattctgcatgcaaaatccgtgttttttattactgtgctcagctgccatatcaaatataacatgtttaatactttaaattattgtatttgtttaatatcttaatttttgtttcacatttgtatcatatactgggaattaaggacaatgcaacaaatacatagctaatgagttttattttcaaaagaaaaataagtgttactctggtaagcaagccacttctgaaaagagattgattagtctgaataaaatcgtgtcaactagagggtggccacttggtcactagtgtgtggtgggagaaccctaagcagtgcagacgcccttcgtgcaaaacaagcggtgccagtgttcctggcatggtggtatctgcttgagtggtcatctgggataaatatgtataggaatgcrgcagatgatggcaggtaaggtgctgggactagttattagattcagtgatttttagtaagcatcaatatgtaaatcttcctgtgtgaatcattgatgacaggcaaaatggaagaagaatgtgaagacaaattgcagtgtacttttggatgctggactaaatatcttccaagaagattcctccatgctctggaatcctaataatcaatgagaagacttacatattggaactgaattttaagattccattatgcatggaactggtgcagagatacatactttttgttgttctctgtggttagatagctttcataaatcagcaccatctgttcttttgcctttggttgtatggagtcatgttgtatatgtatcaagacgggaggcatttcatttctctgggaaatggaaatttcatggactgtgttaaatactacatttgatcagtactagcttgagataagaatagtaggaatctggttgaggggatggcgctyatatacagtgattacatcacaggcgctgaataattcttcatagaatcctaaataatttgatgttgagctttgttcagtagagcatagtttatattataaggaactggacyttgtctaaaactgtaacagctgttaatttccctctacaagggaatatttttaattttaaaatatcttatttttgctatatattattatattattatatcttatctaatattgtcttttctaaaaagtatttgcatttttttcatgaatgtttttattctggcagaatataatgaycatgaattaaaattgtattacacatttcctgattttatttctttggaaggttgctatagatttatcattttgtattgtgaagcccctctctcctacagatgttttcaattgttttccatatatgatgggaaattactttttcctggtgtttcggccagttaatcaagtagttgggacattaacacgaatgccttctgcaatcctatttgtgatacctaggagacttggaaacagattccctttggaattatttttcatcaaatgtaatccaaagaaaaagtgctttaattcactctgtcaacatcctaataaatattttctctaggataccatagctcactaatagttaacatgtctctcattaagttaggaaaatcttggagggattctaaaaagtatgaaaaagaacatttagttgagtgtttttttagcaatatatttgaactcattaaaatattttatttactgttatgaataattttttttaaaaacacttgacagaaaatattgtaaattgtaccatgagaattttcattttttttttgtgctttctaaacacaaaaatcaaagatagatattttggaaatttaagtagagaagtataactttaagtttttataaaacattttaaaaattataaatataggcttttctttcaagtgataaatatccaaaatatttacttcttggacctcagaatttgaatgtagatatacagatgactggtttctagattaagttttatagtgttcctctgaattagacagtatggtttatatttcttgttttgtaaacatttgtgttcctgttttctgtggtgagagatggaggcaggattctagtctcaagtgttytagttacaagtcctgtactttttttgtggtaggatcacttaagtttttggattttttttttcttttttttttaggcataaggactcactctgttgcccaggctggaatgcagtggtatgaacataactcactgcagccttgaactccctgggctcaagtgatccccctgtctcagtctcccaagtagctgagactacaggcgcacgccaccatgcctggctcttttccaatttctgcatgagaagttaaactttagttatgttttggccccccttttctggaatcctaataaaggtagtatgtcgactgcctttttaggcaaaagtaaccactgattggtaaatcgtattgagacttgaaaaactataaatatctgaggagcagcagcttacgactatggcattgttccaagagacactggcttctctggggcatgaggcttttcagccatggtagctcttgcaacttcctgatgtgagtcaacacgcctgcgctgtctgctagagaccccaagagaatggctcctgcacagctgtgaggactgctgggtgcacactcctctggaaaacaaggcatgatacagccttgctggcaagtggggtctcctgccttacaccctgcactgtcaatccaatgccaggcagtctgtgggggccttgacagtctgcatgttagttagaccggagaagcccctccacccccttggcaggcatttcagaataaaaataaagacataatgctaaaagacttatcataaaaatgaacagcctctctgtgccactgttcccgtctttctccctaaatgtctgctctgatatttacttccatgtttctaaataatatatttatgttgctctttcctgattaccagttactgacatctgttgacttgccatatggaagataagagttgttccttttatactgcttctggtttcttgttcccatcctttcaatgctgttacatccaaagtctaatttcagtcaatagccagtgtcacagcacatggcaatgtgacaattgctcactgcataaccaaatggatactctgaatatatttcctcttctacagattttttttctcctggggcaattttttttttttcatgttgctttgttttctctgtatatatttttgattttccccttgcattctgtgtcaggtctgtcaagatgccttttatttttcaaatattcaaaagtatcagacctgagcccagggaggaggtgcaaacttgtagttgcagctatttgggaggcctaggctggagtattgtttgagcctaggagtctgaggtcagaactgggcaacatagcaagaccccgtgtcaaaaaaagagaaaaactaaaggggaatgaaagaacttttagaacgatatcagaccaattattagtttctttttttctcatggagatgtacttactagacctctccatcctcctgctcttatctgaactggtttctgcttccttaaactgccatttctcccgtgttctaggacttcccttgggttctgactgatttcttactgtgttttctggattttgctggagcacttccaaaaagagctttatataagaaagtgttcatgtgaaggagataaagatctctttgcaagtctcaaaatttcttttatctttcatgcttgatctttttgagcatgtagttttacactgaattgttttttcagtgtagaagatatgacttttagtagaatttaatatcgctattcagaaggcattgttatcatagatcatttgttaataatattcctagttttagtctgctagcaatcatccacatcatttgtcaatcctttgattaaactctgcagtttggagataactcctcattgttctcttggcattttgtacagatgactcatctaagaggaggaggttntatatgtatatatacacacacagaacagaagtcttcattgtggacaatcttttcaaggatgtttgtagagcaagataggtataagatctcctctgacagcagcaagcaaagatactccctgtctgtctaaaagattcaggttccctaagcctagggttcttctgtgtgtgccagtgtccctggatcctcttcacatcaccttgtgagaatcttagctgaggaaccactacataaaaggaagatactctggctagcggtgtggctatgagttgtgaatagttctttgtctgtgacccaggaatcttctgccttctgccagcattgatgaaggtgtagctttcaggtattgtaaaaatcctagacccctcctactttttttacatctactttctctctgaaaatgtcttcaaccaccaccccacaaagttttcttcttcttgccatgtacttgattgtatatagcatttatttatcttttttttggtttctttactcatcctaaagacattctacattgaaaatattttgtatatagcaaagcacagtaaatatcaggtgtcagcaagtttctaaattataaataatatgttttttatttgatcgagtgggtaatatgtttcatattaaattgttttgcaaggcacagtgtatgaatagatgaatacatgtatatactcttaaaatgtcgtatatttgtacataattgccctaaaagatttatcgaggtwtgttttctgtattatgtgttatctatttctgtcttcaataatgtttataaaataaccatttgttgggtaagtactatgtgtcaggcaccatgtaatgcttgtgatatggaggattttcgtactgattctttcagtactaagaggaagagtttttaaagtgtgtgtgtgtgtgtgtgtgtgtgtgtgtgtttgtgatggggtctcactctgtcacccaggctggagtgcagtggcatgcatggtcatagcttactgcagccttgaactcctgggctcaagcttcttgcttcagccttcccagtagttgggactacaggcacgcactatctcacctggttttttgtagagactgagtcttgctacgttgcccaggctggtcttgaactcctggtgttaagccattctctgcctcagccttctaaagtgctgtggttacaggtgtgagccactaagcccagccaaggaagatgtttttattgttcacgttttatagaagaagggatagaaacatggaaaggtacataacttgcataaggttataaaattggcaaatgatagaattgctattcacgcccaggtctgtttaaatcttgaacccaagctcttaatgtctgtactctgctatgaaatggagagtagggaaaggaaaaagaaaaaaaaaacaaatggctgtattgtctcatatctgaaagttctttggcacagtttagtttaaattgatactatatagttctatttttttcttactttaagaaaaaaatagaggcgggatctcaccatgttgcccacactggtcttgaaatcctgggttcaagtggtcctcccacctcagcctctgaaaatgctgggattacaggcgtaagccacctcacccggccagtactgtatagttcttaaatattgatttgacatacataataacagctttgtttactgtagttataatggaattcagtgtatagttcttgctaaaagtaactacattcagtcacagcttgaaagaaaaagtaccagacaayagaataaaaccatacaggagctgataatttacacatccaaatattgggaaaatctaagttgaggttccacagcaactgcagctcagcctcagggcagtgaatgttgccatccaaactggacactgtatgtagcttcatgaaataatattctccatgctctttggtgcctgataatggccactgtgggaacaatgtgtgaattatcagtgactgttttatcaytgtagtttggggcatttcatttatgtggctgtttcacagtgcaacataggtgtttcaagtggtgatacatcttggtggcatttcagtagtccttaaattattaatgaatcctgaaaaaaagatctgtaatgtgtaagattatttttgtgtcctacatctggtttataaacaaatcacatttgctctccttcctgcacccactcccattggaaaagcatgattttgggagttcgtgtttacattccaagtgcagttctcaggcacgttcaagatgttggttaacctttgaaatgtattatgtgctggtgcttaaaggagatagatgactaagaagtacatattagagcctctcaagacacagcatcatcaatcaaatagcctggcttcatgcagagctccaccatccacaaagcacagagcacagctacgactcacagaaaagtttggtgcccttagtttctacttctcatagattcgcaaaggaaatgtcagttgggccttactgcctgctttgccgtctcttactatctcttcaatgatttaatatattgtttgacattgtatcttgaacctataactcttgcttatctgttgttcctattgatggcatacacgtttctactgtgagtctctggaataacatgattgaaaatataaaatttttctccartgttggacttcctgtcctaatatagatggcttggtaaattcccartgtgtgcacctatgaattatgttgaaaaaagttcacaataaaatcaccattgtcaaatttatgtaatagaaaagatcaacctaacaaattatatgtatacataaattatacatataaacctctaagaaacagattaaatacattttacttagttgcatttggggaacatattaccacagagattcctaggcatgattttactttaattagcaaaacatttacagagcttctagtaggtgccaaagactatgcctccatcattgtgtttggagaatctgaggatctcttaactgttctaatctggctaataagtccattgatctcagtcaggtatctttatcgttattcaaatgattttgaaaagccaacttttaactattaataatagtgaactctttaatgaaaagacagtggccgagattataaatgaaggtagattcttgggtggcttttcatttatttttgtgaactaccacgtttattccacatgcacctttttgaatactgattatcccatttgaacacctatctaatcattggtttgtaagctgagaatagtataacttcactaaactgacatgtgtaaacaccagcaaacttattgaatttctgcaacacattggagcaatttgtacaaaatattgcctttgtcaaaggaagcataggaggatgggggctgagtactttgttactttagcttgtccttttgtttggtccttcatgcacagaagtaaacaaaagtggtccattatggctaagaccttaatacctttacagatacctctaaataatcagtcgattggcttagggtaactttatgtgaaattttacgggatgaagcctgtaaaatctggaactataccactgcctgttccttttgacaagctgtgttagcaggaatcaagaactgagaaayatgactttgaagcttttggtaatggttatggtttataatcgttgtaactgttttgagtaggaagctgttttcagacatgcatttccaatgtcatgtatatttgtttatcaatacattgtaacaatggagtaatatgtaattacttcctaaaatatacatgaaaagaaatgaaaaatgaccagataagaaaattagcataaagataagttttttctttgtttttttgttttctttccttatcacagtagtatatcttattcaccttctgggatacactatctcatgagactcttgttttcaattttagctttttacaacacacactgatcctgtcattaaaggtcatccttcttagaggaaacagttaccaagatcataatgcctattagrcttccattttatccagtttcctttcacattgtagcaagaaacctaacacagagtgtacttttctttgtgttggctgcctctaggatgaggatgggacagaagaggataacagtcgtgttgaacctgttggacatgctgacacgggtttggagcatatacccaacttttctctggagtaagttactgatggtttcaactaagtttgcagtatacatgtagcatcattaattgcagcaagtattctgaaagcatatggcatgaggaatgtttgtgcttagttaaaaacatgccgtgcattgatttgtttttctaaagaacatctttcatctcttgagttaattatgtaatgtaagcagtatagcatggaagttcatgtgtaccagtcctgagtttcatgccctggcaaatactattgaattataatataaaatagtatttgattgaagatttttgtcatgttaacaacactgtaaacaccgtaactcttttcagattgctttgtgtgtcaatattttgatcatgtgtttgttcttcactttgctaaattaaaaaaatttgcagacatacttgaaaaactagttagatcatgttagcattaattattatagtgcatgtaaatatatgtatttattgttgtttgaagaaatagaatctttcaagatatttaatgaaaaagggaggtcctaggttagggaccttgaaaatgattttaagtgtaaaaggacaaagaaaaatttcctgtttgttccacagtgttctgattattttaaatattgacatgtgtaaatggtaggcattctcaggacttctttccttggtagcttagagcagggagggcagtcattctggatttttttctttgactttgggcaaaagttggggatatagacattgacatttatgtacttaattctgtcttttcttggtcttccaagagaagtgagattaagcaggcactagagtcagatgctgtttgaatgtatggcagccagcacgctgagtatttacatttagtaaagtacttgccatgccatagttctgtttagactgtgggataaaatcagtttattgaagttatgctattcttagcttacaaaccaatgattagataggtgttcaaatgggataatcagtatccaaaatagaattttatgaaatttggtaaaaaaaaaaaagtaataaaaaatccatttaaccatttggcagtatggcagaatttttatgttgtcttaattagtgcatgtgattaaatctgtgcacatattttcaattttgatttgcttgatattcctgtctttatgcaggacattcatagtacataggataacttcaggtttttatattagaaacataattgaaaaattggcattttccatcacataaaattatattgtgatctttgtgaaattcattggtaataattgattgttttccagctggcttaaaatagatgtttaattgaagtactgtttccaaatattggttgttaggtaaatactgcttagacctctgatgttatatgtatatatgaaaaaatctacaaagaaagaaaaatctcatttaaatagtttagaaaattacattgtctatacaaattttcattaaactcaggctttattttattaatagtaaagattcatagacttgacaaatccatacattatgtaacgttatgttccttatgcagaatagttttgtaatagaagtaacttcatgttatgtcatataatataaatagcttcatagctgtagtcccagctactcagaatactggggcgaaaagattgcttgagcacaagagttctaggccagcctgagcaacacagcaagactccctttctaaaaagaaaattaatttcgagcaattttatgaaaattatttgatttgcagtagatgcctgttggctttgagaaaggagttttgtaagctgcacttgtagcactcttatagcggtttaggaaatagtgactttgaattgtcatgaagtagtgagcagtaaggacaatggtgatctcccttggactgtcacttacaggagtgaaaactttggtctcattggattattggaaggattaatgatgtgacatataaaagagcactttgtaaattagaaagtgttctgtagctgcaacatctttattcagttaatctttagagtccttggtagctgcaacatctttgttcagttaatctttagagtccttgacgtgagtgttgggatggaagagtttcagtgtaagtctaaagattttacttgaaagacataaacttgtattacacagaagaatagggtcggtccaagagaaatgttctgtgtcattttaatgtagttatctctgatgattgctctccctccatgccatcagactagtgttcaggtatgtagtgtttaatgttgccttcatcaccatgcttatattccagaatatgtatatatatgcctatgcacttggtgggatttttgttctgttctcttttgttgtttattgtgtgtctgtgttgttgcagttttttgttttgttttgttttggttttggtttgtttacagtacacgttcatgctccctcattcatcattgtctcacagtgatatggtaaagctcgtagaagtccccaacgatggagggcctctgggaatccaygtagtgcctttcagtgctcgaggcggcaggtaacgtatcttggaggtttttaattgaatcataatgtagagtgttttatcttcatttatgctcagatagagagtggtgttgacttagcrtatgcttaataggaaacattctcatttggaggcaactgctccttcattcctatatatatgtcataatcacagaaagcacttagcctgatgaagagaggttttgcaggaacgtgaagaaactgcatttgaattatcctaataaatttattgttcatcacactcaagcaaacattttactttgctgtaaattgatgatggactttcaagtcagaactccagatgaatttgcaacgttaaggagagcttaaaagcactttttttgggaaagcttaatgcaataaaaattatctagatgacttaaatttgatttaagctttaaatttgtgtttagttcttcaattttatgagtttttttattgttaaaaacctttaatatgaaattttaaaaaattaggcaagccatagatttctgaaccttgagtctaaaaatcatgtactgtttgttaatctcaacttcattactttacagaacatgcatccttaaaaacttcaaatgttatgtcagtttccttgattctgttcctttttatgtgtgaaaggactgttgtgatatttttggttttaatgtattcaaatagtatgaattgattttccaacaaaggcttggcagacctctgtcacagacaagtgaggtgcaccgcatcctttcccatgagtctgaacttgtgcatgtttaacttgtttaatttaattgcatcttctcttacttgctctctaatgacctattttggctttttaatttttaacttatttcttttattgctatcaccttattttttttctttttattttaactttctttacatggtgcgaaaaagtggggaagttggagggtagacttatagcagtgactgagaccgtagaacatagtttaaactgttgtcaagtaattacaggcatctagggtgttgtagaagatagatgtgtgggattaaactatgcattttatttttttaaatgagtatttgaacaatggtagtactttcttgttacttgtaagtaactgtggtgagttcagatttcatctctcatggttcatgcaatgttctaaagctgaaacttgacttagaactctgctggagtatgaatgaggcttgaatggtagtgttacataacaaggtataacattcaccttgaattttcaagtggtgttatattcatagagttgtggctgcttttactttttaattctctttaaaattctttttttaactttagagaagcattaaaatttcttcaaataacttatagttaaacaatattattttcaacatggccttgcctttatttcgtgtaagaaattgagttctaaattacctcaaaagttaaattttgttttcatttctttccggagtaggaaaaaaaagataaggtaaaatgcatggattatagcttcccgatatgcatatgtcttaaaatgcctgtgaaacataactcatcacaaatgagatttaattgtgtctgtaccagctttgagccagcatttcaattacatgttactatattttctgtcgtttattgtgtattttctacctcactgtgaaaggatattagggtaaagtgaacagatgaaaagcctaaagcaaatggagagtaagatggaaaaataaacttactatctagattaagtcaaaggaaggcatttcacaaaatccaccacagtttctggttaccatggcatttagttttgatacaccaaacagattcaagaaaacaagtatgtctttgcagaactagaagttcttttatagctgagtcatttttaagccctattagtttggcacttaatgaagaaagtcgtgcacagagattttcaaagagacaaagagatttaagaaaaacagattctttataacctcttcttaggcatcaccaattttcatatggaagcagaacagaaatagtttgtgattccccaatacctgtgttgcatggttaagcttctttgtggaattgatagtcatggttcctcacagatggttaacaatgggagagaaaaagtaggtggtctgttcagattgacagatacaaatctccaagaacccagagatccccacyttcctcattctcagaaatgctcggaaatggattcctgttactkcataagaaacctttccaagcatttctgttgtgacaatccctgtgttaggtgctaggaaacaaagatgaacggaatatgttcttcctccagagatttgcagtctagacggagtgatagccaagaaatcacacaattataattatgtgataaatgttgatatagttatataataggtgctctgtgagctgataggggaagaatagtctgaattaggcaactgaaaatggcttgttgcggaagatgattttaaatgtgatgatagcttgtaaaggtagctgtgtcaacttcatggtggcttgtgcaagagtaaattaagcaatgtagtatagcaggaaggaagaaattaagtgaagttaagaaattgcacatatatctagtaggactacaataatatatattcatgatatgtaagtagaaatttccaagataacttcccttatataaaactccagtcattcttgggccttctcaattttggaggataactaattgaataacagttactgaatacttacttttataaaagtgacaaatacatgtcaatattgctttctcatttagattttcaaagtcagagcatctaacgaataatgcagaataccaattgtatattttgaagagaaggaacacaacccagaccacctcaaatatcaaatgtcattaaggaaaatagtaatgtaagcttgtgaagttaaygttagagagttttttacagccatgtagatcttattgtgacctgatgtgtgatgaagttttttttgttgttgttggtttttttgtgtttgttttttggttttttttgagatggagtctcactctgtcacacaggctggagatcctggctcactgcaacctccgcttcccgggttcaagcaattctcctgcatcagccttcctagaagctgggactacaggcatatgctaccatgcctggctagtttttgaatttttagcagagacagggtttcaccacgttggccaggttgatctggaacacttgatctcaagtgatccgccggcctcagcctcccaaagtgctgggattacaggtgtgagccaccatggctggcttaagttttttaaaataagaatcttgcactgcttactttcaaagctattttttagactaggttgaatgtttttcaatcaggggcattaatgacaattagctcgtcctccaacccctgtcttagttgactacctgctgatatgtagaaatagagacaaataggtagagagacaatattatcttccccatgatgatgtttttcttttttttttttttttttttttttgagacggagtctcgctctgtcgcccaggttggactgcggactgcagtggcgcaatctcggctcactgcaagctccgcttcccgggttcacgccattctcctgcctcagcctcccgagtagctgggactacaggcgcccgccaccgcgcccggctaattttttgtatttttagtagagacggggtttcaccttgttagccaggatggtctcgatctcctgacctcatgatccacccgcctcggcctcccaaagtgctgggattacaggcgtgagccaccgcgcccggccgatgatgtttttcttgagttatttccttgtatatgttattcaaaaataaagttaactgatcctcatctatattcgttcacggtttcattactttggtgatttctttttttaaattattttcttagtagaaaaacatttacctaaaacgtttcattaccttggaatcaatttttatttcatccatatcatttcatttcctcctgatttaaatgagaaccatcggctgggcgcagtggctcacgcctgtaatcctagcactttgggaggtctaggcaggtggagcacttcaggtcaagagttcaagaccagcctggccaacatgatgaaaccctgtctctatgaaaaatacaaaaattagctgggcattgtggcaggtgcctgtaatcccagctacatgggaggcggaggcacaagaattgcttgaacccaggagatagagtttgcagtgagccaagatcacgccactgcactccagcctaggtgacagagtgagactctgtctcaaaaacaaataggaaagataatctctttatttaaaccacaaatgccactattttcaggaaggttatgccaaataattgtgattacctttggcagaagaaccttgcttttttttttttcttttttaatatttctagaacctggttgtaggtattggtctacaggaccataggtactgcttagtgaagcgtaatcagcacaggagcaaatgaacccatgactatccatattagatatggtgttactatattaacaaagaaacggtaatgatacatcctggcctggatggtggttaagaagtatttctgacactttctcatgaaatagatatatgattatgatataatgttaagtatataaaaagcaacatataaaattgtgtgctaaaatagggactggacctatgaaatgataagattttgtgtttgaggctggacatgatggctcattcatgtaatcccagtacttttggaggctgaagtggaaggatcacttgaagccaggagttcaagtccagtcttggcaacatggcaaaaccttgtctctgcaaaaaatacaaaagttagccgagtgtgctggcatacacctatggtcccagccacttgggaggctgaggtgggaggatcacttgaatctgggagtgtggggctgcagtgagccatgatcatgccactgtactccagcttggcatggcagagtgagaacctgtcttaaacaaaaacaaaataaggccgggcatggtggctcatgcctgtaatcccagacctttgggaggccaaggtgggcaratcacctgaggtcaggagtgcgagaccagcgtggccaacatggtgaaaccctatgtatactaaaaatacaaacattagccaggtgtggtgatgggtacctgtagtcccacctactctggaggctgaggcataggccaggcgcggtggctcacaccttaatcctagcactttgggaggctgaggcgggcggatcatgaagtcaagagatcgagtccatcctggccaacatggtgaagccccatctctactaaaaatacaaaaattagctgggcgtggtgatgtgcgcctgtaatcccagccactcagaaggctgaggcaggagaattgcttgaacccaggaggtggaggttgcagtgagctgagatcrcgccactgcactctagcccaggtgacagagcaagactctgtctcaaaaaaaaaaaaaaaaaaattactactattcttacttgggcttcataatctaacttaaagtagatactctaaatcttttcccctatggaaaacaattatggctaaaacattttaaattaattaattaagtagaaactgggtctygctttgttgcctaggctggtctcaaactcttggcctcaagtgatcctgctaccctggcctcccatagtgctgggattacaggtgtgagcggctgtaccyggcctaaagttttcttctctggatcttttttttttttccttttgagatagcttctcactctgttgcccgggctggagagtagtggctcactgcagcttcaacctgccgggcttaggtgatttttccacctcagcctccsaagcagctgggactacaggcaagtgcctccatgcccggctaattttttatattttttgtggacatgaggtttcccaatgttgcccagtctcgtctcaaactcttgggctcaagtgatctgccagctttgtcctcccaaagtgcatggattacgggcatgagccaccttgcctggcctggatcttttctataatggacatttctcacttatttacatctacctttattcttaagtctgtggcacttaaatttgtttcacattacttttccttgtgaaaatagtaattgtatgttggtgtttatatacactttttttttttttttaagatctagtatctactagttagcatttttggtgcctttgatatctcagatcaaagattcacaaactttctgtaaagggtcagataatcagtattttaggcatcatggcccagaaaatctgccattgtagcatgaaagcaaccattgacaagatataaacaaagcttcatttacaaaaacatattgctggctgaattgactcataggctgcagttgtcagcccttgccctagggaaccaaacaaataaaaatggctgccatgatggttttacattctagtatttttcatgtctaaaacttcttcacctctgttttctattcatatctttgggggacaagagtgtacaggattttgatttccacttactgtttgataagaaagcctcttttgttgtaactacatattaattcccagcagtgcatgtccttgattctcaggaagaagggaagttgaaaaaaaccatataagcccatttaccatactctcattagtagtatgtactcacagaacaatccttcttaacatctacttgtcaatcataagacttaaggaaaaatctaaagtttcacagttagaaaatcaggccctgtgaagatggtggtgagggaaatgaagggactctgggtgtgggtctggctttctgctactgactcatgttggcagatatcttatttattaatttattctcaacttactttttacagatttgccatcatttgatttgtctgattaactttgatttttatcccaaataatttttttcatctgtttatcttcaatacaatattcagaatatcaggtgaagtgtcaacatcctttggaaaaagcttcttcaatttctgtgttaaagtttatttttatgacttttcccctctttatttatttgcttagttacattattgtccataaattccatcatgaagctgaaaaatgaaatcacatctctaagagaatattttttatttttaaaattgatttattcttttttttactttctttctttctttatattttttgagacagggtctcactctgtcacccaggctggagtacggtggcaggatctccaggctcaagtgatcctcccacctcagcctccctagtagctgcgaccacaggcacacaccactatgcctggctaattttttgtatttttggtaaaggtggggtctccccatgttgcctaggctgatctggaactcctgagctcaagtgatccacccacctcggcctcccgaagtgctgggattacaggtgtgagccatcacttctggccactaggagaatatttttaatgttttgcgtttttgagttgaaataaaagtgaccctgttggaaaatatgtatttcataagtattattatttgcattctatttaaacctgaatatagattaattagaaggtggttaaaataatctatatgcagattgtattttgtaattaatctatattcagaaaatcactgaaatataaaagtttgttttttacatcctgcattcatgtcttgaataatttccccctcaaatataaactgatgtttctctgtctacaagactagtagtcaaacatctttggatggtcttragacataccatactcatccatttaattcagcagaatctgagcttcactctcccctcaactaagatttacatgattataattatattgtttgtcatttttatcccttcctgtctgaacaaaaactgtatggaatcaacaccaccgagctctgtgggaaaaaagaaaaaccttctcccttcgctctgctggaagctggagggcgctaggcccctgtgcagtagtgcatagaattctagcttttttcctcctttctctgtatattgggctcagagagtacactgtgtctctatgtgaatatggacagttagcatttaccaacatgtatctgtctactttctcttgtttaaaagaagaaaaaaaaaactaaaaaaaaaatgaggttatagaaggtcagcaaagggtgggtttgagatgtttgggtgggttaagtgggcattttgacaacatggcttctcctttggcatgtttaattgtgatatttgacagacatccttgcagtttaagatgacacttttaaaataaattctgtcctaatgatgacttgagccctgccactcaatgggggagtcagcagaaccygtaggatcttatttggaattgacattctctattgtaattttgttcctgtatatttttaaattttctttttgtttcgctggaaaggaaagatgatgctcagttttaaacgttaaaagtgtacaagttgctttgttacaataaaactaaatgtgtacacacacaaaaaaaactatattgtttgttatacccttttgttcatctaagatattctttatcattttttgctctattatgtattgaaaacgcaatttattttccccagatttggagttgggaattttgtattacctctctgtgtcagtcagtgactgacttgaccttatgttgtcctcgttttattggcacggggattgtcaggactggggaaggataccttgctcagtattttttacgtagtgtggccttgggcaagttagcctcacttagccctactccttacatatgaaggataggaatcatgacttttgtatggtttaaataagaaaatatatgtaaatcatttagcaaggtccttggcagtggcagctaataagaatgatcaaatcatgagaagagattttatactcaatttatcttttgttatgtgccttgaaattccctccagtggtgcttggtattctggtgcttggtattctaggtaggtagtgattagtctacccaatcagagaaagtgatcattttcctcttatatcatgaatctgggagaaaatttactattatgtcgtaaaattgagaatcccaatacacatttgtttagttaattgggtacatatgctaatgaagaattacagtcaatttgagcttcacaaactagctgagaataaatatgctcttgaacttttgagtactcaattttaatttaataacttttgaaaaaaacgcaatttaactttatttgctgaatcaatagtcttttgtctgaaagttttcaattgtgcattctcagccgcagactcatttgttataataaagaactataacatacgcattggttttagagagacaagttgcagwttacacttacatgaatcatgtctctttatatatagcaatatgacatctgtgatttctgctgtaatctaaaggaattytccatttttatttacctttttggcctgatttatctcattcattgaagtttttctaaaaaaaaaattaagatttaaagttttaacttggcattcctttaaactttctccttttggtgtccatgctttcagtggcagtrctttctgggctcatgtaggtagttgctggccccccatgggctgtactcagggagctgagcggttcttgttgatgagaccctattctgcccactcatattctgccttccctaccgttgtgatgtttatactgtgtcaacctttattaagatgaattataatcatttccatacagctgggtggcagttgtggtagtttacattatcaacgcaaaactcagacttactcagccaatttggatgtcaataaaacatttgttacttattttcagttttatcattggttgtaatttatacttagaattgaaaatgttaacatgtgtgactgcgtttgttttaattaagtgtataattaggctaatgaaccttgtaaaaatgtagtggtgcaatccttaatataatctaagtagttaaattctaattatgcatccaaaatcatgtacaaagaagcagcatttcaatggctcgctttgtgctactgtaccctagcttgtcttttttttttttttttttttttttttaagaaacattgttcaaaaacgaagtcttgaaagaaatatgcatgtaacatacttttgtattaggaaaattattcagaagtgatatttgtatgcagcggatctagtgttttcttcttttcaaattttgaagaaaatataggagactagaagaggaatagatttggggatgtttcagctccatcaggaaaaatccatttgcttgaaaagcataaagccaagtagggtttatcttagattcataaggaaggtagaggaggttctgtttcacataaccctaaaccctataatcatttcttcttaaatctgcgccaccccactaataaatgcccaactcttttctcttatgtcttttgtcctagcataacaaatctggggttgttctgctcttggaaccattccccaaacagagcttactccaatgcctcctttcctgacacctacctcttttattttttgcaaagtggtttcttcttaggatggaacatggttgacccaataaggaattctggtattagctgccmagaaggaacactgttctctctaccagcacactgacgtgccaaaatgtttagaacttcatttgctttgattactttctctaataaaactgttgcagcagccataccataggcagttggttctttattactttagaacaaattctgatttctagttgagtttgcaaaatatatccctaaaatttgtttttaattatattgtttgatacagctttaagttgcaaatgagggctatggaaatgtakctgctcgcgagcacacatttttcaggaaagtgtctcttcttactacttttgatttccttcggaggttcttttcattctcagtctagctgttatcagttggattttcttgtgacttttttttcttttgatagttcattcccattcctttgcaatcattttcacctagtggagtaaatgagataattttgcagattgtaccactttccttttaaattaatccattctttttgagagaatgattctaatagtgtggttaagtacttagaaatcagcaggctactaacttcaccttaattcagtctgttcccttgattccctcatctcttgctgtgtcagtcagggtgatgttctttctcttctgcagtcttcttccaccctctatctcccagccccccatcaggtctcttgtactgagtaaaaggaatctgagatctgagattttcatgacttataacaatgttggttgctaaagcctcagttaataaatttccattatagtttctatacgtgtgtggtgtatttatgatttgtagaatttctactgtatgttaggattgctaatgcatttggccattgatgaggacttatttagaaagacaaccattcaagaaatggaacattacatgcttttctactttggattattagtctagaatgattaccagaaaaaaaacacataggtttaaaactgaaaaattatgagatgaatataaatctgttcatctacttatctgaaaaaaattattgatgttacttctagaattaaagagcagatttcagctggcacagtggctcaagcctgtaatcccaatacttttgggaggccaagtccaggagttcaagaccagcctgggcaacatagtaagaacccaagtctacaaaacaaacaaacaaactagccaggggtcgtggcacacacctctaatcccagctactcaggaggctgaggcaggaggattgcttgagccccggggtttgagcttgcagggagctgtgattgagcccagtatacctccagcctgggtgacagagcaagattctgtctcaaaaaaaattaaagtgaaaggatttataagttacactgttttaagttgtcataaatactgaaaggatgtatccaagatagtttcataaatttaaataaatgatcggtgctaattaactgctaagtaatttccattgaagaccgtttatatatatattttttgtaaaaattttctatggactattttagattacacaaaatataatacataaaaacatactaattgttagtcacttacatttgcagtaatattgtagtcatattgggaaatcgcttatgatttcaccaattaaaaactcattaactggagtgagtcttggtagggcatatttttattgcaaggactgaaagcatacacattccaaagtgtgtctggtttatagtggtggcttttaactacagctgtggcacctcacatgtggttctgttatgattacctgtgggtgactgagacatcgtttccttcaagatgttctttgaaactgaagtggtcagatatcttctgcatgttctagtggtaccagtaactgtgatttaatttaatttcttgtattaatcttcctcattcatcggaatcatagatatatcttaataattcttttttttttttttttggacggagttttgcgttgcccaggctggagtgcagtggcgcgatctcggctcaccgcaacctctgcctcctgggttcaagcgattctcctgcctcagcctcccaagtagctgggattacaggtgcccgccaccatgccaagctaattttatacttttagtagagagggggtttctccatattggtcagtctggtattgaactcctgacctcaggtgatctgcctgcctcrgccttccaaagtgctgggattacaggsgtgaaccactgtgcccagccaataattcctttgattcctatgatagaacactttgttcagttgcagatagaaacaaacaatagggaatcctagggagataaattatggacatgatcacatttaaacaataacttcatttttggtttggcatattatggaatctctttctcccaaatatgaactgagagttaagttgctcctgaagataaatcagtgtactttattcttacctttgagttgagataattttatgtctttatatagctgcaataaatgataataagtaactaaatattatctacataatattgtttttactagtcactaatatttttagactcatacactagtaggtgctgattctcaacrctaaaattacaattcttgcaagctgataggcttcactctagtataatgccaccttattatatttattaataaaagttagaatgaaattaatcgttgaccttactaatatcgtaaaaatgttaaactgcaaaattacaagtgaaataggacttttgtctgagtttaatttatttcagtttcatcatatctttagtagaaatgatactttcatgaagaaagaatctgaatctaaattctattcacttgtattctattttgcaaaaagcttatagaaatagacttgtttgcctcagctaacctcaatcatgccttcattcagttgtcatttatcaagaccttactactagttcagtgcttgaactgctgaatcttatgttctctgtctgctaggagcttatagtccactaatagagataaggtatgtatataagagaagaatatgataaatgcccatggaacagatacaacaattactggaaaagtatagaagcagcagctatctattttggtatatttctactggaaaacatacacagatgactgcaagttgtaattctcttggaaatcatttagacattatttgaaaattagggtgtcttcaattttaatttatactggattctcaattttagtgcctgtgtaggcatttttgtctctttattaggattatgaaagaaaatacaaattttggaagtaaaaagactaagttcatataaaaattttaatatcatgatacaaaatttatgccagccatcaagtaattaacagtggctcatgcctgtaatcccagcactttgggaggctgaggcgggtggattacctgaggtcaggagtttgagaccagcctagccaacatggtgaaaccccagctctactaaaaatacaaaaaaattagctgggcatggtggcgcatgcctgtgatcccagctactcaggaggctgaggcaggagaatcgcttgaacccaggtggtggaggttgcaatgaaccaagatcatgctattgcactacagcctggacgacaagaacgaaactccatctcaaaaaagaataaaataagactaaaaaaataaaaataacagcaatcagagctaggttaagacccctgttgcttatactgtgatttaaagaagtatttcttatttgtcccagtctgtatagaatgtcctgtcagttatgaagttagtgttctagagcaagtagggggtctctcaaaggtcattcacacttttctttcaacctgagtgagtacatatgtggaagagatgaatggtgattggcattatttgaacctctcactgacgtttttctgttgggtcatttgtttttccaaatgggaatattgacaataaatgacttacttttgggagacctracaggttttgaaattcacaatactaagcactatcaaattcaaatgcaaagcatggaaactcctttattcctgaaatctttcctattatcattctcaaacctgcagtgcaatgaggttagcttttcctcattacctttactttcacagaaagatgggagttgcagtcgtcttttaagctagcgtgccagctggcttaaaacagaaaattgcccaagccattcaaaaatacatgcttatccatcctccacactgcaatacccactcaaccattaggcgggctctgtttggggcatttgtaaacagagagagtgttatagcttgttctagaaacataatactgaccagccagaaactgattttttacatttatggaagggatgcatttttacatgtcattttaacgttgtggtttttgtctgtcatttaaaaatgtatgaatagtcattttaacatgctcctttgtaaggacatctttgtaaatataataacagcattaaagtggtaaggcagtgtgcatggtggagatattacatgtgtaatcatttgcattcttaatgttccagaaccctggggttattagtaaaacgattggagaaaggtggtaaagctgaacatgaaaatcttttkcgtgagaatgattgcattgtcaggattaatgatggcgaccttcgaaatagaagatttgaacagtaagtgtgtgctcgctgcacttctgttcttacttgcattaggcatgacagagtgcagtcagttgaaatgcttcaaacatgtctgtgatctcagtctgtatactggagaggaatattttctgccattagcttttaaaaatttaaacatactcagtaattaataccattagactatatttcaaaatgtcctctgatggatatagctcttcttaagtattatggcccccatttcaactttacaattttgctggttcctctccttttggaaaattgacagtgtgcccatttttatcatactttaactcacccgtccacctttgctgcacacagtttctctagatacaaacaagcagataaagctgtttgtatctgcttgaggttgtattcagatacactttatcttgggttgtattcagatacaatattgggttgtattcagatacactttatcttgattcaggcccttagtcaatgaaaaacataacagttggccagttcttataaaacaaggcaggagcaaacagaactcttaagaacttgaggtcctgaccagggaaccagcatgagaaagagctgcttcccaggctggttgtatgggtgcactgtgacccacagctgtcaacattttgaattattgagcctggattgctgttcttgagatttttacatataccaacttaataaataattaatagttactttctatagtcttctaagtgtgtgtgtgtgtgtgtgtgtgtgtgtattttaaaaattttaaatacacatctaacccaatccaatattctaaatataattataaagctctgtctttctttgaaaacttaaattgaagtattttgtaatgtctacaagttgtattagacaatgttgtagagagaatgttccatttggtttctattattgaaattataatacttgttatacttaaaacatgtttaatgatttacagttgagaggacagaattttatctgtagttgtagataatttttctatttttattgagagaatgagaaatttatatttgaagaaacagctattgatagatcagagctgcaaacttgattgataaatgggttattagaattttgcttttcaatttcaacagcctgtcagttcttattgcttaattagtaaacttaattaagctcataatatcttctagtctgccagtcttaatttgctaattttctattctttctcaaacccagagcacaacatatgtttcgccaagccatgcgtacacccatcatttggttccatgtggttcctgcagcaaataaagagcagtatgaacaactatcccaaagtgagaagaacaattactattcaagccgttttagccctgacagccagtatattgacaacaggagtgtgaacagtgcagggcttcacacggtgcagagagcaccccgactgaaccacccgcctgagcagatagactctcactcaagactacctcatagcgcacacccctcgggaaaaccaccatccgctccagcctcggcacctcagaatgtatttagtacgactgtaagcagtggttataacaccaaaaaaataggcaagaggcttaatatccarcttaagaaaggtacgacctatcctgtttttgttttgtggaatttcttttcttagcagcaacacacaagggtagaaatggaatttattttaaaagtcaacctactaacccaaagcaccctgagtcttatctaattattttgtgaaagaactgatagattttttaaagttacttaccttttaacatatttcaaattgtatttcttatatgtctcaggtttattttgctctgtagaaattaaaatgtaaaagtgcagagaataagactatgtctatgagaagaagatagcagttactgtagtaaaatttttgattgtgaaagaaaatggcttcaggacattaatatcaaatgcagaacaatagtaaggatttgaccattttgactgccccatttgctgtataagtccagccctcaaggaggactttagaggtagtgcacgtcaatctcagtatttgatgtggggagggaccaatttgtttgaggctgccaggagtttatagtaggttgctgagaagccaggccattgactcttgtcttttgttttcttgtattattgcattacttccctttcttttttttcttttcttttcctctcttttctttttcyttcyttttttttttttttttttttttttttttgagacagggcctttctttgttgcccaggctacagtgcagtggtgcagtcatagctcaccgtagcccgcaacaccccatgtcagccttccaagtgctgtgactagaggcacatgccgccatgcccatctcatttacaaattttttgttgtgttggagtcttgccatgttgcccaggttgatctggaactcctggcctcaagtagtccttctacctcggcttcccaaagtgctgggattatggaagtgagccaccatgtccaggcctgcttctctttcttatggtgatgtggaagtcatgatgtcgattgccgattcttcatacatcttccatccattatgtattttagtacccttcctgtatacagtggatctctgtatagagagcatgttcttgcagtttgcctccttcaaagttgagtgcaaactattggacttgactttatgattttcacccaatgtttcgtccaggcaccaagatacacttttactgttcctgatccattttagctgagcattttgatatatttttaaatcatgtctttcaaaatggtattattataaagaatatttttttttataggctcaaccatcaactcttatagttggatggaaatgattccaagagaggttcattatttcctcaggtcatgtggctgttggccacagattcttactagtatgttttccatatccggatattcagaccattcttctttacatttggggtagcatttacaaggttgtaaactctgagactgctgtttcctttctaactcatattctttcagtgaactttatgtgaacctcaagtttcttatttctggttactggtttttaagctctaaatacttggttgacatgatcaggagttgacagcttgcctcgttgcaaacacagagtcatatcaacagaaacccctttagctctgtcaattcctaaatgagagaaatatcacatcctctttcctccttttgctctacttaaatgacaggcccttgtttttaaccaaaaacatatcaagaactacaaatagaatcgtataaaaaataaaattctgcttgatatctctaaacaaaggtacagtattttgcttcaccattgtcataaagatactggttcataaatatcttttcctttttacactgatacagcaatattcatttagttaattatggtttttcaaaaattaggatatttgacaaatcatgatataacatgaactttttaaatgaggtgatttgccattaaaagtaccattgttttgctaatgaaagaatgagaaatacaaaggaaatctgaagtgagaagataaaggtaaagtattaaacagaatacagattctccaaaaaaaggaaaataatgagtatatctaatttttatgttatagtaagtctgaagtgataaataaatcaaattgatacattttacttacaaaamtggtaccattgttttgaatacagatattattttaatagcatttaatgaaaaatatgattgcatttacacaagctaatttagaaagactatgcttaatcactgaaaggagaaacaatggttttaagtgtttttcagaccttgagtaatcttaatgatatagagtcccatagatctatcttgattttaatttaccaactgtgagaatgtatgacaaaaagcacatgctgcttgtgcatgctgccaatacttacaaatattttatataaaaattatgtttactataaatgtggggaagaatgctgattatctttgattaggactaaatgcatatattttaataataatgaatgtaggagaattgaacaggctttccttgtagctagcagatttttttcttacaagttattacatttattagtgaagtacattaaaaacatagggtgtgtcagtgttaaacttcagattcagttcaaagtgagctaatgtgctttgagtggcagcagttcttcaaaaactggaatcaactcttagtacaaaaaaagatgtcagtataattattctttggcctaattttggagctatgttatataacatgacaacagaatagcctcagtgtacttgcttccataattatgatttcttaatatttattgccattttggtattctcaaatacccagctcttttgtagaaattagctttttaataaagtcagaggagaaggtcagtaatctgtttcagtcagtgcagaatgttttgttggctttgttaaatgaaaattgatatctacttatctttccttgaaaggtcattgcctgaacttttagcttacagatttaggggttgttgctgatattttaatagtattgaggttcctacaacagtcagcattcatagttcaaaaaagttagtattgcaaaaggagagtaattaagaattctttcttaataaatgttattgcaagtcattagagtttcatgaaagcagagacatatggaaaaatctccccagagcaataacaaacatttcatatagacagtatgccattcaggtgttcagcatggaagacatcagaaatattaatagtccaagcaccctaaagtgacttcagactaaagtaaatgaatgctttgtttgatgttgagaataactatggtaggttttgctacaggaataactatggagtgttttctttatttctcctttaatgtttctttaatctacatttttattcacccttttttgttcacttatattttatacttttcattacagttttatactgagtgatgtatcagattaatgtgctcttttctagatttttcacctttacagatctctttattcttcccataatgagcaagcatttgccttaacaatattttaactgaaatggaaactaatatcttaagaagtaactttttaaaaaagcttaggtagaaatcattattgtaaaaatgttgtgattcattacaaatgtatcattatctccccagtttttcctgggcacgtgttggcttcttgcgtcttgattctagtgacatataaacacttttctgctttgtattgagcatgtaagactgtctgtcaagaaagctgccaaagaaatgagaatttaaattctgtgaatcatcagagtaatttataaatgcatcattaatttagtacctttaagcataatatgatccccagatttggtagccatgatctgagatggagtcttcactgagtaatttgccttgtttgggagtggggggtggtgaaggaaatatacatggtaagatttaggtgaattagaagtgaactaggcaaagataatttggtttatggtttatcctcttagtaaactgctttgaataattatgattttgggaggttccattacctctatctagagatacctctcatttcactgttcttttccatctccctggacatttttgtttcccttgctcatacctcctacccttaaaatttggatgtcattattgcacaataatacttgagttttgaggtactgtgggtcttaacagaagtttttttctttcttcatgtagtgaatttcctattcaaagatttacattgatttaaaaacttttagcagtcatatttacatattaactttcatctgtctttgagaagattgctgtttcttcttagattaataactgttgatatgtaaaccatttaaaccttccacaatttagtctattttgaaaaatttattacaacttttaaagtagtagaagaaatgtggaccattgtgaaagttacaaaatgtcaagttgaggttgagtatactggtgcaatacacctgtaaaattcaagrtatctcattttatttacttttcttctccttcacatacctaggtacagaaggtttgggattcagcatcacttccagagatgtaacaataggtggctcagctccaatctatgtgaaaaacattctcccccggggggcggccattcaggatggccgacttaaggcaggagacagacttatagaggtaagtgacttccccagcaggatgttccctrattcttgaaatgttccatttccaggagccaacttttaaaaacattttcataaaatatgaaattcagttatatacattttagcggaagtatgcgtcacaaaatgtgtttctgttttatgtttagattttccatgttattttttatatatwtttttttaattgttaaaatttttgtagaggcagagtcttgctatgttgccccagctggtcttgaattgctggcctcaggcgatcctcttgcctcccagtgtgctgggattacaggtgtgagccatcgtgcccagctcttttttccatgttatctgatgagaaattatctttccatttatttatttatttttttttatgagatggagtctcgctctgtcgcccaggctggagtgcagtggcacaatctcagcttactgcagcctccaccttctgggttcaagtgattctcctgcctcagcccccctggtagctgggactacaggcgtgcaccaccatgcctggctaatttttgtatttttcatagagacagggtttcaccacattggccaggctggccttgaactcctgccttggcctcccaaaatgctgggattacagacgttagccctcatgcccagccccatttagtttagttataaatttttagttactcagacatttggtttatgaggtaacattttgtcatataaaatgtctgtaaggttacgtttctaaatggctttatatttatgtctggcaatgtggaaatgtattcagaacagagacagatgaaataaatgaaaacagtgttccttgataagaggagcaaggaaatcttgaaatggcagcatggagaataaattgagtcataagagtcaaatgtcaggaaagaaaagaaaaatcgtttttgaattttttttctatgtcttatgagtttgggttcattggtatttgaagctgccttggaaatagattaacatacataatttgtgtttgtgtgatggtttgcacataaaagagaaaattgaaaaatatgttttaaaccatttttcttagttttttttaaagaaaatatagtctgtatttttattagcagatactgcatttcctaattaactagtattcaaatattaatgctaaggtaaacttttaccacactatccttttttcttatagtttcatatatggtttctatctctccagattgagttctcctaaagaatttttgtaaagtaggggaggagagggataccgtctgtatttttttccatgtctacatttggagcctagatcccttaaattttattcccactgttttggtcctgtgcatgtgacaacgtatgttaaataggcactgttagaagctaaataacagatgtttgagtacaaattatgttagggtcctgcttcctgaaaaagccacttgtcctggggttataaattgagtggtacgttagcccacgtctgcagtcgtagcttgttttatttgtaagagtctctgctgggacttgaattcagtcctcctgtcttctgagtccaaaaaaatatctgtccttttctggctctctccrtctttctttctaaagataattgctttattattgagtcacttttttcttttatcacataatcgctttactttcaacatatcagaaaaacctttttattttaaagcagtgagaaagacctgcaacctgyatgtctttcgagttaggctttatttccatagctgtcatctttgtcttaaaatggaaacttcatttttgcatgctttaagcccaaccttctagtatctacagttgtagctatacaatattgatacttacgtgcattttctctgagtgtctagataattagaatcatacaaagaaaaaaggatcaagtgacttaattgtctagattttttttcactttcttttgtttgagtacaaattatgtttagggttctgcttcctgaaaaggccgcttgtccttggggtataaattgagtggtatattagcccatgtgtgcagtcgtagcttgttttattttgtaagagtctccactggaacttgaattcrgtccttctgtctgcaattccttaatagtagtaccttgaggtatatgaggttgatttttttcagaaggggaaatgttctgaaatatattttaactacaggaaaattttgatactgtaatttaagttataaacttatttgccttggacaaaatgtcttttttgtctaaaaagaaaaatgtagaataccttttaaaggaaacatatgctctcatttctgtggagtatatagtgctttctgataatgatgttatacttcctgttagataaaagattccctaagaacaagttgttttaaatttttttcctgcttgaattctctcataacattgaaaaaatttcagctgaaatattgcttccctgctaaaaaatattgttttgtagtttctttaatgtttaccttttagaggtaaagtgttttatttatatttatcagtaaaatttcatttaaagtgaaaatactgtaccaaaatatttttggtgtgtttttattaccctttataagagcaacacctttttattttggtgtaagaaaacctatgatgcacaaggctatcaaaatatctctgttctaagccagtaagttttgtgttaacttgacatttttgaaatatttattgcttggtacttgtcaatgccctggtgattgtcactttgggtttaatgatgaacactaaaagattgaccacttcctctcttctagatatctggtcttagtttctttattagtcacaaaaccttagtggttcccagatcatggcagaattgtgcatgaaatgagttatgttccatagcagatatggctagtcctagaktgtgtgtgtgtgtgtgtgtgtgtgtgtgtgtgtgtgtgttttcctgttgtttccacaggattacagctgaaaacttttgttttgttttaggtaaatggagtagatttagtgggcaaatcccaagaggaagttgtttcgctgttgagaagcaccaagatggaaggaactgtgagccttctggtctttcgccaggaagacgccttccacccaagggaactggtgtgtaaatttagagtagatgaaagatttctgatatgcagcagccaggggtctgggttagttgcctgatggcaaatgtttattgagacattttctgaggagtttctagatcttatatttctttcagccctcactgaatacaaacattcttttctctaatactcccttagtttcagaaatggatatcctcagtaatgaatggaggggtacttaaacatcagactgtagggatattttcaagggcatcaaatgttcatcactgtacaccctcagatggactgactgaatacagagacgccgattatttcagaactgtcactccacagactgtcgctgaaagcttgccatcttccacactgcatatgacaaattttcatatttcacattttcatagtacatgtcagtaagccaaatagatgcttgcttccttactgttgtatgaaaaggaatacctttttaaaaaaattattattaaaaataaaaagacctaagtggcaataagcctcatggctattaattatacaaatataggtcwtgttacttaggatgacataaatgaaggaaatgaaaaggcatttacaacttttgcaacctatctccttcactttccatacatacattaatacatctgagtatttacatggtattggtgtgaatgaaataagtgtcttaaatgtacatagttctgagtggttttctgcaaaagtgctaggtttcatttatatataaaaatgacataattggaggagttgcctttgtcttttgatgtggtaagaaaattgttttatttcaagtacaagtggtattttaaatatttcaaaacagattctacttggatcattttggaatacatccttttcatctagctcttagykctaaacaaaaattaatttgtataatctagagtgacaaggttttagaaacgaggtttccaaatttatcatatagcccaaattctcttgtgtcttcaagtatggatgtgttatgataaaaataactatattttattctctatataaactatttctataaatattataaatgaaaaaattttagtcataatatcttatcccctggttacacacaggtcttaaaacttaatgtggattttgtggaaatttcagacagtgatagggttgaaaagtgaacacttttgttttaagtagattttgaataaattatgaaaacttctttatatttaaaaatgtttaatgcattatttctcaatttaaattcagtttttcgttttccccccactgttatccaattttgtgcttaaaatgccacctgatcctaaatctggagatgtctctattaaattgtaaatgagcacttaaaaaaaaaaaacaactagctttccatgtgatttgccgaagctttaattcttcctcagtgtctcggagtgcactagttagcattattagattgccaaagcttagacactgctcttaagcagccttttccagagttagtgccagcatatagccrgcttaaggttattcaggttcttcttgtccaattttgatcttccaggcttctgtttttcccttctgctacctactttttttttttcttggttatgtaatttattgcttgtgagcttttcattaaggagtacgccagtaggccgtcagtctattatgcatgttgcagctgcttctcaaaatttaagagaataaaatcctgaaaatttaaagggaggggacatttaaaaataatcttgaatccagtagacgtaactattttcctctgtttggggtgtctgtgtttaaattctgtgtgtctaaatctaaatacttttatcaatcggtgcctttttttaataaatcatccttgtaagttcctaggtaattaaggcaaatcaacattataggaaaaaaaaatcatgtttatttcctgtgcaacattttaaagtataaagctgtggttcagactgtggttcaaactgttattatctggtctagttatcaaatgattctataccttaaaactttgatttgattgggaaaattttaaagcaaaattagaaacagtgccatgattaggaaagcagtttggtgagacttgttttcctccagataataaattcatgatgtactgtgaatgagcaagtaaaaatgtatatctagaaaaatttcttaaaacacacacataaacacacacatcagcaaaattttggaagacagagcattatgtcagccatcatataattaccctttatatattttgtggattttaagaatcaasaaaattttmtttaaaataaatcattgtgtccctgtgtgttgaagatggctttggtcagtctgtatttatgtttttcttcaattcttctagaatgcagagccaagccagatgcagattccaaaagaaacggtaagagctttgtcttttgaaggatgcagagatgttggaaagatacatggaactaacttcttactaatttaatacgaagttacttgtcctgccttttcctggctcgtaatatttaatacatgggtttattaaatgccaaagtggtcttattttaaggtgacttactgttaccaccccaaatggagtatattttgtgattaattttggtcagatagacgcaaaaaagagagagacttcctattcacttgcaaagtgaggaccaaagcttagttgtttggcatatatgcaaagtatttcatgagttgtgaaatgctaaattataagtggccacaaaatggaaagaaaagttaaaaaacttgattcaatcatggaaaaaaagggagggctaagagaatacaktaaaaaaagtayacacaggaaaattaaagtgacgtgtcagtattaggctaagcatagttgttagaataactataaaagagataatttaacaaaagttaaggactcacagctcacattaaaatgcaaacatagttgcatcctgttaagaaaacaagtcctgagacagactggggataaaagagtaagcttagttccagcaggcagaactaacacaataaaaggaaggattgctctatcagtctctgtgatgatgcgctatatgggagtaaaaagggcattttatattgacatggtagaaattctaacaatcaggatcttttttcctttttacatcaaacaacatagcacaaaaacattcattctcaaactatcgtaaatggaaaatttagcaaagtcatttccatagtaggtaatgtcaatatgtccctttccaaaaatttttacattgttgactaaagaaaaaatataatgaatttaaataacataataaacaggtttcattttctgtacagctttataaacaggcaactttgaactaatgttatttttcaaatattccttcgtttttttttttttttttttttttttttttttttgagtctagaatctcaccatatttcatggctcactgcagccttgacctcctgagctcaagtgatcctcctataaatattccacaattctaaaaacaggtgacaaattacatcttggaggaaaatcagtaaacaaccttgagaatattccacattaataagtgtgtgttgtagacaattcctagctttaatttttggcttataaaataaatagggcaattatatctaatcaaaatcacactgatatttatgtgttggggtaggttagataaggggaaattggacaaattgattctaaataataaaatggggtacaatagcaatttatactactctttgaaaagacaataattgtggcagagtatatataatataaagctacaatacctaaaacagcatggcattgttatagggttaaacaaatagatcatttaaacagattaagggttacagaaactgacatgatgtgcataggtatgtgcatgtgtgttaaagatggcacttcaaattagtagctttaaaaggatagtttacgtagtgtttataacaattgcccatttatttagaaaagttagctttttctcaccatatctcaaaataaatggaaaagatctataaaacaaaatagatccacagtcatttacacacacacacacacacacacacacacacacacacaccccatttgtatctgtaccatgaaatagttatagaataaatgcaaaaggaggaagtatttacaatgtgatccttaggggaagagctattcctttatggtttaggataagtatcatagaatattttggaaaactcaatgactttgcacacaaactccatctattaatgtctgagacaatctgagatggaaaatgatgctttaagtagtaaagatagggatgttctttcgaaacatgtagtcagggccaggtgcagtggctcacacctgtaatcctagcactttgggaggatcacttgagcccaggagattaagaccagtctgggcaacacagcgagacctcatctctaccaaaaagttaaaaataaacaacaataaaaaacatgtartcagtcgtgttgaggaaactgatgatcggctgtgaattcctcagtcaccagagggaaagaagcatcttttgatgtggtattctgttaagaaatgcaagctgcatttcagttcacaacctgtgtgtttatggtagcatgacatggtgactgggagtcaccttaaaaaaggaagtcatatatacttttacatgtgtctgacttctagttacgcttggacttttttttctaatacgagtttcccaaacaaagttaaaagtatagtttagtttgaaatattatttgtttcttaattttttatgcgtgctctcacatctgtgcctctctttgtgctccaggtatgcggtatcattttgagttgtaaaaggcttaatattaacatgataatttaagaaattgacaggggcacagtctctgcctttctaccttttgatggccaaggatctgttttaggctttttgaatattgctagttcttggcacatagtattgctcaaggaaaactccrtgataggcttttgctctttttattagtgtttcttaatgacttgttttaggttctaggtctgtgaaatctttgattatctattttgtcaatgcctagaaatggggaggaggggagcactaatgatttcaccacaaatccaagtccaatgctcactttcattttgggctttctcagggttgattttggagcaaaccatggtatatcaactttaaaccacaggaatggtaactgtgcatacagttatgattctttttcttttcctgcaggagatatattacttctgtcaggaactatatgtgatttatacaggcttacaaaaaatagaagacagtttctttcacctctaatgcttaacattgcttataacgttgcagtcctatctatgactggcatttattcatcagttattgtgtgaaactctttatgtggattatcttatttaatctttacaatgtccatgacttagttcaggcacgtccaatatcttggcttccctgggccacactggaagaagaattgtcttgggccacacataaaatacactaacastaacgatagcagataagccaataaataaataaataaataaataaataaataaacaaataaataaataaatcacaaaaatctcataatgttttcagaaagcttaggtaggaatttgtgttgggccacattcaaagccatcctggaccacatgcggcccacagatctcaggttggacaagcttgacttagttggtgatattatcctattgaaaggggaggaacaaagaattaaccttaggacactccaaatcttggagccagccataaactcaggttgtctgacaccagaatctgcagggcagattttatttctccttaatgtgacttagtatgttgaggggggaaaaaaaaaagctaagctacatatatagtttcaggtaatacagtatgagttccatgttggaggctgataaactatgactgaattttttttaaataaacaagtaataaagaaatccagggttagatgccatctcattagtcaagatagtgggaagagatcttgttgattttttttttttttttttttttacattgctcatggattgatacataggctttcctagaacacgcgtttagtaccattgatttccattaactactgcatggacacttctgtcctttcccagcccagtgaccagttttgcaaatactttctcctgacttgggctgctcccaccttcttctttttttttgtttgagatggagtctcgctctgtcttccaggctggagtgcaatggtgcgatcttggctcactgcaagctccaccccccgggttcacactattctcctgcctcagcctcctgagtagctgggactacaggtgcccgccaccatgcctggctaattttttgtatttttagtagagacagggtttcaccgtgttagccaggatggtctcaatctcctgacctcatgatccacctgcctcggcctcccaaagtgctggaattacacgcgtgagccaccgcgcccggcctgctctcaccttctttgcctgtccatacggacgccaacttctaatcctactgacttctacctatctcatgaggcttaccctaaccggaactagtgttctctcccattttgtagttctttatcatatttgtctttgttcgtttttatttgtagaatgcatttgtcttgctttattaacaaagttcactgatgtcggctcactggagcctccgcctcctgggttcaagcgattctttttctcagccttttgagtagttgcaattacaggcatgcgccaccaagcctggctaattgtttgtatttttagtagaacggggtttcgccatgttggccaggctggtctcgagctgaccttcagcaatccacccaccatggccttccaaagtgctgagactacaggtttgagccactgcgcccagccacatgcttaactttcaagaattcaaaatgcattctagaaagttagtgggctttccctacagaaaccacagggatacattggggattctttaggaacttttttgaaggtcagaagccatcttgataggctaacttcagaaaggttagagtctcaagttagaaatttaatgagctagaaattaagcatgggccttattaggtttattttgctaacacttaatagatcaagtgtaggctgccatattgtttgtgtgtgtgtatgtgtgtgtgtgaccaagtctcactctgttgcccaggctggagtgcagtggctcgatctcggctcactgcaaccttctcgcccaggctcaagcaattctcctgccttagcctcccgagtagctgggattacaggcacgtgccaacacacacagctaatttttgtatttttagtagagacggggtttcaccatgttggccaggatggtcttgatctcttgacctcgtgatctgcccgcctctgcctcccaaagtgccgggattacaggcgtgagccactgcgcctggccagaaggaggacattttcttatataactgtgttatagttacgaaaatgattaaatcgattgtattatcagttgtcccaattaatgttctttatatcataaatgaatgagagaatgaatgaaatacaagtatgaatagaatttggtcctgtttccaattcaggatcatgtatggcagtaagttctcatggctctttaatctcctttaacctattacgtttgttaatattttctcaagaacaaattactccaggcaaatttttaatttttgaaggggcagattactttgagaatgtccctcaatttgagtttgtctgatgtttctttgattgggtgagtattttgggagttaacattagagattaataattgtgcaaaacattttttcctcagcattattttaccaagcaaaaaatttaaaagtctttcaaaatgtatttggcatctaccattcgaattagaaaaggcattataaagccagatatgacatttgaactttactgataagaataatgaactttataatatcaacacaaataacatacagaaatgttcatctcacatacgggataaattaaaatggggaacttaaggaaattttggagtctctttggagggttattcttttattaagaggtttatcatggttcttaaatttaagaaaaatttaagaaaaattttaaaaccatgataatttctccatttaaaaaatctttctcttagttaaaaatataaatggttgttcatattgtctcagatacctacctgcatattatttaatctctgtttgttgaataagtatattctctctttaatgtctatgaaaatttctattctgcgtgacgctatgatggtctgctgtcatggcatggttttttttagagctgtcctaaggtgctcattcatagcccatctttgtcccaagcaacagcccctgcccatcatatccaggtgcccctcaatttatgatggggttacttccccataaatttgtcagtaaacccactctatgttgaaaatattgttatgatgaaaatgcatttatacacctaacmtacaacgctgtaacccagcctaccctacctcatgtgctcagaaggtttaccttagccttcagttgggcaaaataattaacacaaagttattttacaataaagtgttgaatatcttatctaatttatgggataccgtactgaaagtgaacaacagaatggtttcatgggcaccatcaaaagtggaaaaatcattaagtcgaaacattgtaagttgtggaccatctgtataaccctctatcaatttctcctcccccatgcagtgtttttttgaggaagcagaattaaagaagtggtatacaatggattttttgtattgtaaaaataatgcatatcaactgtagaaaattcagtcatgtgtagaagaaaattaaaatcacttgtaattctgtgacttcagtatcatcattttaatgtattttttcatatatatatttgtgtctgtgagcctagccaaagataatgtatttttttaaatgattttcttgttctggcttggtggctcatgcctgtcatcccagcactttgggaggccaaggtgggcgggtcacctgaggtcaggagtttcagaccagcctgaccaacatggcgaaaccctgtctctactaaaaacataaaaattagccaggtgtagtggctcacgcctttagtcccaactgcttgggaggctgaggcaggacaattgcttgaacccaggaagcgagattgcagtgagttgagatcataccactgcacttcagcctgggcaacagagcgagactccatctcagaaaaaataaataagtaaaaagatgttcttgtctacctatttaactaatatgtatcatgtcccagccacatatcctattattgttaataaatgtcatgccccaggcacgagtgaagactgacataaattcctaccttgtgaagcttctagtgatctttgaaggcagacattaattcataaaaatatgttatggaggtttttgatgggtgtactggaagttatggaagtccaaagggtaaaactcaatttcttagtcacaaatactttcttgtcttacatattattttgctaagacactttattagctgaatggcattccattgtgtagatagatcttaattttcctgactttcatacatgtcaatttttagctattgtaattaaaacaatatcctcacagttaaaacttggtacatgatcacaactatttttgtaggccatatcactaaaagtaatatttctagcttaagaaaatggcaaactgtagaaggtttaggtaagcattgtcaaattggtttccataaatattgtaccatttttttacattcaccagcagtgcaagaacatgcgcatttcaccacaccagtattaaatatcattatttttatttattttttagtgttctatggcaaagcagtatttgttggatatcattaatttgaagaaaatatatggagcaatttgataacctttgattgatttgcgagtaagattgaaccttgtacttggaggttgatttattggtttgctcatctttctttagtgaatggcttgtttacatccttttcctgtttgatgcagactgcttatctttttgttattaatttactagggatttttgcattaatttactagctatttgctaataactcagctgggcatggtggctcttgcctataatcccagcatattgggaggccaaggtgggaggattgcttgagcccaggagtttgagaccagcatgggcaacatatcaagaccctgtctctacaaaaaagagaaaaagttagtcaggcttggtggtgtgcctggggtcccagctagctacttgggaggctgagggcgggataatcacttgagtccaggagttcaaggttatggagagctatgatcatgccactgcactccagcctggatgacagagcaagaccctgtctttaaaaaaaaaaaagataattctgtagataagggcagatcttgagagagagaaattaatgatttatagtggagtgatgaaacttttgctgagtcacgtattttgttacaaagccaaaaatcggctattgagctcactcctataattttatggtcttctatcatttgtgcacattccatgtttcttttgcctctcttcacaatattttgtacattctcatccaaattttcgtttgttgcggctcagagattacccttcccatgattgtttttctgctgcttgacacaatcaactcttatttccttttttatagataacacctttgctgcagattaactgtggatttgggcctataggccagctctattctcagttttttggactgtgatttsgggaagaaggaaaagggggccatgatggtgcccacttgtgactctttgtctcactgcagatagaaatgtacatcttttctgctgttctctggagggtgggatagtaagtagctttcacaatacccattcagcaggttccttagcaaaggtgcccttttattctgggcatttaaagacaacaaatggtaatggagaaatgggcaaaggaagaactgacaggctttgttgctgaaaacaatcacttgaggtatacacacatgtatgtgcgtgaggcaggtgtgcttgagtgacatgactgtgcccagatgacatgaggagtgagttaaagaaaagacattttttgcgtttctgtagaaagatcttaattcgagaaacagttgataaggtgcagaatttggatggaatagcaaggtgatagaaagttagtttctattttacatcagaatatggagattcctatactatctgactttatgaacattctcagtaatatagcatttcaaatgatttttgaagagcacaatttttaaaaaacatttttctgccagagaactaagttctaaaagctggcattaatttctgtctatgtcaaaagccaaatggattaatagtggaatatcacatgaaacatacaatgtttcacatcagtgttcttaatgataataatgacttaagacttggtaagaaagctgaaaaagattattcccattctgcagttgttataataaataaactatcccctggagaatatgctcttctttaaaacaggttcagagttcagcaatcagaaaatattgcaacttgattaaaatttttcttcatatatgcagccagctccttatcctgatctttcaagtaggaaaaatatgagaattgtaagccttggtaaaatgttatggaaatgtaaaactcagtaaacactgaaaaggcaactgaagattcaaatcagaaagtaacaattaagaaccttccagagttgaagcaagtaagcatagtgaatgatgagacttaggtgtgtccatagaaagaatattcttgttttccattttttcaaatgtagcttttccatgcttataagtactgattgacagaataattttttatttcagcaacctccaaatttaaagtcaaggggaactatgatgtgtattgatgttgttttgtattttaaacatcaaaatttaccgtactttatattcttgtaacagattttatattgaggtagtgcagttcattcacacatagtcattatttcgtactctgtaaatgtttcaaggggctgggcacgtaagcccaatactttgggaagccaaagtgcgtggattgcttgagcccaggagtctgaaaccagcctggccaacatggtgaaaccccatctctaaagaaatacaaaaatttgcccggtttgttgacatgttcctgtagttccagctactctggaggctgcagtgggaggatcacctgagcctggggaggtcaaaggtgtagtgagtagtgattgtaccaccgcattccaccttgggtgacagagtgagactgtctcaaaaaaacaaacaacaaaaacacttgttttgagctacatggaccaaaataaaaagtatattgaatattcatgtttatagagcaaagcatgtatataaagatacttttgtatcaaagtatttgatatatttgatctttttttgcccacaatacattggttttatttgagctaaaattgttctctgggaatattttattttattttattttttgttatgggacrgagtcttgctctgtcgcccaggctggagtgcagtggcatggtctccactcactgcaaggtccacctcctaggttcacgccattctcctgcctcagcctcccaagtagctgggactacaggtgcccgccaccacgcctggctaattttttgtatttttagtagagatggggtttcaccatgttagctaggatggtctcgatctcctgacctcgtgatccacctgcttcgacctcgtgatccacctgcgtcggcctcccaaagtgctgggattatgggcgtgagccaccacgcccagcctgggaatattttaaatctagtttttatgatgagcaggcttaaggctttatttggactttgatcataaatgtatttactttgcatagttaacatgactattactctgtattttttcagattcttattttgagttcttcattatataagttttaattttttttttaacccattagcaagtttattgtaattgaagtgttacttgtctttaaaaactatcaggccatcctttgagatagcacaaagatgtcctaccataaaatgttaactttacatatttgtaaattagaaacatcacattactatgggtctaaagatttataaatagcatattgcttattttatgatgatctaaaaaattcacttacagatagtgtactctcaaaatgtattttatctaattgagacatctgagattgcatgtttatgccccaaattccttgcattccaaatttccttgaattccaaattccttgggttgatttttattcttattaggacattttaaaaatttggtaggatgcagtcacctactttttttgtgttattgaacattctgtaaaagcacaatctgtttaaagtatatattcctacatatctgtgtaccactgtatttcttattcttcaattataatttgataagtcaagcttgaatgactaaacagatgctggagaaatatttcaaacgtgggaaaagaggaggagaaataggttgtaggactagatgtgccattcagtttttacttgaagagcctgtgccacgtgtctgttatgtggttggagcaagagtttgtgcttgaacaagcrtcctagccttactgatttggacatgaccagtatagagatggtggaaatcttggtcatgggcgggattgctgaggaggaggagctcagaaggctgagtgcttcctcttctggagtgtaggctttcttaatgataggctgtcatcttaatgcattttattcagttctacattaagctttcatttcttcctctgttttaagggaggtgaacaataatttgtatatcctaaatgttttttattttaaaaagtcttccttctatgcttggtgactatgaagttaaatcttaactaattaaacaagattacctgaataatatttaccagctatattatgtatgctacaatattgtggaaaagttttctgtgatgttgtatatctctactttgtctcacagatgttgatgttagaattctttagaggctctctgaacccatatacctttttctgctgattttgtatgatcaggatttgttattttttgtgaataaacaccattagtgaacattaaatatattgataacttcagaatttcctcataaaaagggagataaatgaattatatttatttatttttactcccattgttactgtttttcttgtcgtttagaatatatgattacaccaaaaaaatcccgaactctagaaatctactagtctttagtccttccactacattttccctctatctttctcaaatctgatttaagtttggttcaatattgaataattgctacataaaaatattaacagctggttccaagaatcttctggagtgggtgcagatgtagtgttttcatggatcttgctgtggaaccttcatggaaatattttgcctcttatgattaaggaactgctcattagcagtctttaaaaataactttgagaaagaaacattggactataatgtgctgtgcaattttgttccctattagaaagcagaagatgagratattgttcttacacctgatggcacsagggaatttctsacatttgaagtcccacttaatgattcaggatctgcaggccttggtgtcagtgtcaaaggtaaccggtcaaaagagaaccacgcagatttgggaatctttgtcaagtccattattaatggaggagcagcatctaaagtgagtgtcaactttatcatgcgtatgcctattaacaaaaattttaatttcaaccctgttcctattttggaaacatatacagttaacagaagttttctcatttctttatggtaccyacattcacatttaaacaactaggtgtatcagtgatgtgtcacgtggggatggagtccataacttcaacctttcattttttctctcacagaacatacaacccattgacatgctagttaaatgaagttaatcaatgcaaagacttggcataggtcctgtcacagaatgggcgtatagtagacgttaatctttcccctcccctcccctgtttgtgggtcacttactctatttctcagcctagagaaaatttcctggccatttgttaaggggacagttctctgcaactgtctaatagccttgagcttttacatgtcttggtttctaaataacctctatgggtgtttctggaagcaagaaagtaatcactttgtgtcctttgaattagtatgctattttggtaaacagattatgataatgacttgatttacaaatgtataaatgattgaaatagacacaggctacaatagctgcttagacgttattatgccagcgttcaattgggcataatccattaggattaaagctccccactttttttttttttgctttgtttttattttatttattaactaaaggaaaagctacttcttttatagcagtctgtttaatagcacttatttttacctgttttcttcccaggatggaaggcttcgggtgaatgatcaactgatagcagtaaatggagaatccctgttgggcaagacaaaccaagatgccatggaaaccctaagaaggtctatgtctactgaaggcaataaacgaggaatgatccagcttattgttgcaaggagaataagcaagtgcaatgaggtaagaaatgcaaaaaagtgctagtatctaaaattgtaaataaactacatttctgtcctaattttgggcaaagggtattaggttccaggaccttacatcaaaagaccataaattatctttgcttattgtagttttattattttgtaggtggattgtggtttgtgttcttaattcttgtgatcaacatattcctaagtggacattaatactcctattgccaactcagcaggaaacactgggatctcaaaagcccctttagctgaattttttcttgaaatcagggtcacatcttccttctcagagccaacagtttctcttctagttggcagagttatacctgggaggtgaatcatgcagagaaacagttgcttattcatttatttaaaatgggatgcctcttacaaagcccctagtagggaacagtctttccttccctgtcctttcttttttatttgagacaggatctcactgtgttgaccatgctggagttcagtgttgtggtcacagctcgctgcagcctccatcttctgggctcaagggattctcctgcctcagtctgccaaagtcctgggattacaggcacgcrccatagcacctggcccacagtctggctttcttagatgatggtgttctcttgtgagattatcaatagcatatacctccctctctttcctcagtccccattttctctttctctatgggattgagtctgttctcttagaatgcctcctttttcagtgatctgtattgtattatactctgcttgttctaaatgtatgttgcagtttggaattaggggtgaggaggacacagggcatcctctcttgaaaggtaggatcatctattttcccaaatatggaaaaacatactttgttgtataataggacatttgaaagttaaaaataaattatatgttgccttgataatattggagcttgaaaaaagctaaatttcatggatccattataaattatgtgccaactgtagaaaataggtcagacttgcccatgtgcaaaatgagctgttgaaaatgtgaagtttttcttaaatcaatgttcagattcccacattttaagatcaaatcaactaagataaaatgattagcaaataatacaaactgaaaattatacctaagttgtttaagagtttttcttaatttttaaacttctgtttaataaacacataaagcaccgttttcaggttgcagtgaccactcatctgaacctatgatacaagcatattttacagagaaaatatactctcgagctcagttggtagtcaatatagaggtgacgtattctgaaagatcactgaccactgaattattttgttgtttttatttgccaaatgtagaatgagttaacagtaatcaacaaattaattgcgatatcaagagaacaacataaccttaactaaaaaatctcagagtggagaagagtgggacatacaaacattcatttatgtaagataaatataaaagctaatccctcacagtaggatgctggactgatatttttttctcttttccgtccctcctggactgattgaataatagtttttactcattgcaaaatcattagctgatcttttaacttaagtcccacaaagcactatatgaaaacatctcaactgtaagtttacaaaacatatcattctcttttaggcctttttattttggccacctgaatactttcccattacacaggacagttttcattccacagatatttattgagcatcttatgtgtatcagaaaatgtgttagatcctgaggacatagcagtgaataagacagatggcatgcattctactggacaacgtatcaccttagtcttttagagaccaattmaaatttttaacaccttctcaatgttttccttcacagaaaacattgaatgctacaggaggacttaaaatgcagaaatgaactgaagatcagtgttctgcttttatctgattcagattattccctattgttccccccaaatagtgacaaagtaaacctgtacctgcctgaaaatgttttgataaaagcactgattttattccctgtaagagatgtgaaattggaatccccctgaaatatctctgtgttttattcacttctccatatgaatttttgtgaatgaatatgatttaagtaaggaaacagctgcagtagacagtaatagactttaatattcaatattccttatggtatcattttcatacattgctggttattactatttcttaggacagcataagcttataaagcaattatatcaaaaaatcttatgagtgctgtgctatctttgtaatactagcaagaacccttttgtactgatagggtttaactaaagaattacatgaagacagaagatctcaattcagcttccagtaaggtataagacatgatttttcagctgttgtacttatgcattaccttaggaaaaccttctcctttgcacactgggagggtatgtgtaaattatgttatagtaaatattgatataagcacagggcatcctgctgtcctgaacaaatctcaagccaaaataatgtgctgagttttctttctaggtcttttaatcagctgtatagtccagtctttgccaatcagaaaactgtattttgctatctcatctttaaatccaaggtttgcatatttaatttctagttagggaaggtaagaatgtgtaaaagaaaatcttttgttctttgtcacatttttctttctcttatacatggaagtgctgtgtattatcttaatatgtcttctttatttttcatttttgtagagacacggtcttgctatgttgtccaggctgttctccaactcctggcctcagcttgccaaagtgctgagatttcaggcatgagccacctcacctggtccaatgtgttttctttaaatttatttgtcagctcccttcactaggtattatgttaaagccctgtatttccctaacattagtcgcgacagggcacattggagacattctctgggagctatttcttagcctattttgcttagccttccaggaatctgcaggcactatgtcattctcaaagtgtctcctatgtactctctctagttttctgctaccctactccgggtcttctctaagggttcctcttttctgcctgttctttcattattcctgtctctcaaagttcctctgggtctgttgtctgtttttttgtttggttttgttttkttttttttttttttttttttttgagacggagtgtcactctgttgcctaggctggagtgcagtggcgtgatcttggctcactgcaacctccgcctcccgggttcaagtgattctccagcctcagcctcgtgagtagctgagattacaggtgtgcgccatgcccagctaattttttgtatttttggtagagatggggtttcaccatgttggtcaggctggtctcaaactcctgaccttgtgatctgcccacattggcctcccaaagtgctggaattacaggcgtgagccactgcgccccaccaggtctgtttgtttttactctgctcttgctccctagctgatctccactcccttgctgcctgaaaccacttgttaggatgaatactatcatcctctttccagctcacaggtccactctggcaccagatccctctgtccacctgcctagggaaatatttcctggtatgtcttatgggcacctaattcacaaggcaccacattctttctgttgtagaaggcagagatctggggtcacccttgacctctcaaatgctgtccctatccctgttgcctgttgcttctacctctagaatttccctcttttcttttttggagacagcgtcttgctctctcgctctgttgcctaggctagagtgcagtggtatagtccccggctcactgtagcctcgacttcccatgctcaagcaatcctgccacctgtctccctagtagctgggaccacaggcatgcaccaccacacccaactaatttttctttaaagatgggatctcactatgttgcccaggttggttttaaactcctgggctcaagtaatcctttggcctcagcttcctaaagtgctggaattacgcctgtgagccactgcgcctggcctagaatctctcttcctttagccgctcccctctttcccctctcccactgcctgagttcagacctcatcctctcaccaggcgcactgctgcagctccctgagggttttctctgcaatcaggctttctccctcaatccattctctgcactgcagtcaggcaaatttttctacagaacacattaatcacgtcagtccctgctgaaatcccttcagaggctttccatgtctccaggatcaaccagtctccatcatggggaccactgggacatgcctgattgtcatcggtgccctacagcccctgcagcacctctgctctagccactcagtgtttctggtaatttctcagacatgggatgctcttttacacctctaggtcttccacttgagtctatctgcccctcatcctagcaaagacttaacgcagtctttcattttccattttctcttccaaaggattttcatagccccgtgtactccccttcacccagcagctgtcacactatcatggtttcctctttgattttcttttgctggaatgtggattctgagactgccagggcttggtccatctaccactttcctgtgtatcctttgctggtatccaacccaggcctgacacatcagcacaggctgaatgacgaagagcaaccctggagagtctggcttttttttttttttgagacagagtctcgctgtgttgctcaggctggagtgcagtggcgtgatctcagctcactgcaagctccgcctcccgggttcacgccattctcctgcctcagcctcccaagtagctgggactacaggtgcccaccaccacgcccagctaattttttgtattttttagtagagatggagtttcaccgtgttagccagggactgcaagtgcctgctaccatctggcgttttttttttgttttttttttttgaagaaagacaggtcttgttagtattagaaactgaaattccagagtcaccctcagacaaggcaaacaaagtgattttgagggcagtaatttttatttcctttgctttccttcttttcttagatctaatggttttatctaactacacttaaaaacattgtataaaccatcattgtttgttttcttttttctttcttcaaagaaaaagagatggcttcccattgtttaaagcccttaaaggatgatttcacttttttagagaaaaactgagtccctgcattcttttccatcgtttcagttttggaatacacaaagtaagaagagaaaaattgttttcacttacctcaaaggacacatttgttgaagacttttattttttattttatttatttatttatttatttwtttatttatttatttattgatcattcttgggtgtttctcggagagggggatttggcagggtcataggacaatagtggatggaaggtcagcagataaacatgtgaacaagggtctctggttttcctaggcagaggaccctgcggccttccgcagtgtttgtgtccctgggtacttgagattagggagtggtgatgacttttaaagagcttgctgccttcaagcctctgtttaacaaagcacatcttgcaccgcccttaatccatttaaccctgagtggacacagcacatgtttcagagagcacggggttgggggtaaggttatagattaacagcatcccaaggcagaagaatttttcttggtacagaacaaaatggagtctcctatgtctacttctttctacacagacacagtaaaaatctgatctctctttcttttccccacatttcccccttttctactcgacaaaactgctatcgtcatcatggcccgttctcaatgagctgttgggtccacctcccggacggggtggcgcccaggcagacgcgccccccacctccctcccggacggggcggctggccgggcgggggctgccccccacttcccagacggggcggctgctgggcggaggggctcctcacttcccagacagggcagctgcggggcggaggggctcctcacttctcagacggggcggccgggcagagacgctcctcacctcccagacggggtggcggtccggcagagacactcctcacatcccagatggggcggcggggcagaggcgctccccacatctcagacgatgggcggccgggcagagacgctcctcacttcctagatgggatggcggctgggaagaggcgctcctcacttcccagactgggcagccgggcagaggggctcgtcacatcccagacgatgggcgaccaggcagagaggctcctcacttcccagatggggtcgcggccgggcagaggctgcaatctcggcactttgggaggccaaggcaggcggctgsgaggtggagattgtagcgagctgagatcacgccactgcactccagcctgggcaagattgagcactgagtgagcgagactccgtctgcaatcccggcacctcgggaggcccaggtgggcagatcactcgcggtcaggagctggagaccagcccsgccaacatggcgaaaccctgtctccaccaaaaaatacaaaaaccagtcaggcgtggcggcgcgtgcctgcaatcccaggcactctgcaggctgaggcaggagaatcaggcagggaggttgcagtgagccgagatggcagcagtacagtccagcctcggctcggcatcagagggagaccatggaaagtggagggagaggggagaggggagaggggagcaaaaaagagtaactttacagtggagaaagctgttgacactctgttgaagatttttaaacgagactggagtggaatggaagtaaatgccaggcatcattccttgagtgttgaaaatagcctctatatgagaattatgctgagttttaaatattttaargacattaatatttgtrgaaattactgtaatttaacatagcttccaggcattttattatatccatgttagaagtgattttatgtaaagctttttcttagtgccagtagagaatatcgccaggtgagctttctgtcttagacctcatattgggggatttagtcatcaaggacttctttaaaatgaattttttctctaggcttaaccctcttagaatgagaaaggtatattagaataggaaaggggcctaaggtatcatttatgaatctcttcattttctgtattaagaaataaatgcaaagaggtcaaatgatttgctttaatggctgcaaggccaacataggtggcaaagtaatttagaagcaaaatgtctgtttctcttacacaagtgagtggatctaattgactgtgattgtgttgttcaggcactttatatcccagttgcgttgggaagtagtgtacaataaaagcatgggctttcgaatctgatgtaatcggagaaattctggttctgccatgtgctgacttgaggagctcacctcacatttctggttcttgccattgccctcatggggatgtgaaggaaaataaatgtggtcctgtttgaaaagagaatgtgaaactgtgctctaaatcttccttcactctcctccaaaactaaaatctgtgttttcattagttgctttatgttcacctgtcctctggaagctaatattttccagaatgtatatttgtaatctaggttaaatgtcttttaatatcaacatcatggcgtgtcctcagttttaacagcctatttccacataatgtagtgtgttttaaggaaattatgactcactcacttttaggaatgaatttactaatctaattattccaccagtgcctgctctacgctaggcattggggataaaatacaatatgctaaaaaaaaaactgaaatattgaataatatgatcttgccaatcaccagtgagaatccagttttaggtttgttgaagggggtttaaggccattccaatacgaacttttcagtgtttgtagtggagatagtgggatacattttctttaggtgaaagacactatttggcttgctaatgcatactcacaacaaacggagattttattaaaccccacagataaattcacatgaattttcattattcacttagcttattatttcctttgggatagtgaccacaacatgaaataaaggcctgttcaaagagttaaaaataagatttttttttgccctgtggtaatatatttccaagttactgtagcaaaagactgtatcactttacactcctaccgagtgtgggttatcttgccgcaacctaaagctatttttgttctttaataggtagaaagactttccttgggatggaactgaggggctaaacagccactgctacaggggactgtatttagttggagtcaagaaaatttttgcacattaaaccacaaatagacaacaaaatgaaaatcgcagttgtgcttactttggtttcttcttctaatgaagcttaattctaccaccccccctccccccycgccaagatggagtctctctgttagccaggctggagtgcagtggcgtgatctcggctcactgcaacctctgcctcctgggttcaagcaattctctgcctcagcctcccgagtagctggaattacaggtgcccgccaccacacctggctaatttttgtatttttagtatatttggtgtttcaccatgttggtcttgaactcctgacctcatgatccacccgcctcggccttccaaagtgctgggattacaggcgtgagccactgtgcccaaccgaagcttaattttaataaggttttaatataaggagcctgcaagggggtgatagcaggcctgggggagcagaggccagccattctcccaggaccactggggttgcctctcttcctcagtgccgctggtgccccctctgacacatttctatttcctaagctggtgttcttgcaacaacaaaaaatcatcaaaagatttaaaacaaaactgtaaccccaatcagtttttttaaaagaaattaaaagccattgtatcttctgttaaatatttatgtagtcaactattgatgtcttcatttaaatctgtcttttgagatgcaaattaaatatgggtagagaggtaggggaggtggagaatctttcctatgaaaatgttcaagtgcttggtttttttctgaacagacgtcttactgtttttctctagaaaacctgcatgtactcctttttaatggaatttttatttggctttataaaattttaaaatagccttttgggatatttagggatttctcaagaagaagttttataaaggttttatcatgtagaaaattgcagcattatacagttcaattaaatacatttttcaggcaaccttgaggatatgttgtctgtcttttgataaattattgtatagtaaacagaatttgtttatagagtcttgtatagcaagtctttatgtaggtatactttttagtgtgtgtgttaatttaaaaaccatacttgttcttaatggtatagagtattcgttttattagctttttttttttttttttttttttttttttactttcccagagtctcttggaatttaggcattacattcttttagaaactgttcttttatttctttacatcagagaccttgaatatttaatttacttttcagtaaagctgtcagttgtaatctacaattttaaaaaamacaaatgaaacaaatcctcgtttcacaatttaaaccttattgagtctaattcactagagctgcaagtttattattctcctgcagtttgatgtgcctccaattgtaattgtgttgacccttcaatgcattaaatctccccagtgcttatcaaactgggagagataagtctacaattcgaaacttcattaaatatctcatttatattaaacagatgatagcttctaacggaaataataatttgttcagctgaaggaagtgcgacagttgtggtttcatgtgtgagaggagcgccttctctcccgctgtgctgtgtgatgctgccctcctgcccactcccccacattggcccttcctgtctgtctaacaycaaagcatcatgagataccagtccttgtggtgaacctcacagtctgcgttatgaggattgtagttaaatgttctttcattaaaacagatttgtttgaaggccttactaacatgaatttcttactcatattatttttatgtaaaatatgacttattagacacagctagctgttttaagaaatgcccgatacattttaatttattgtcatcgaaattgacatacattcattgcttatttattagattgtatatgtttttgaaatcctcctatcttggtgtgctttattagaatatttggtcccgattttcatattgttctgtacactactgaagtgattattgcagctactatcttgtacttaaacatyacagtaaagataataccatgattattcttaatttctagcaggaggaatttaaaatcagtgtgttgttcaagacatctgagctgatatctttaggtcttgtagagtaggtaataattccaccagcacacatggaaaaatgtgtgctaattgttagatgtatttacataccataagtttaagacctatagctaaattgcagcttccattctgatcaagcacgccttttatagagtaacatctagtaaagaattctgaattacactgtaacttaaattgacttaaacagacactaacggtcaaattggaaaaataaacaacaagctctgattttaaaaaagccttaaatatacatatttttcctccagcggttgaaatctgacagaacttcatgggaggcatggtataaagtggcacagaaagttggtcattaggcagagctgtcatcacaaattattttggtacagggtgaaaagttctagttcatttggtacccagttggatacaggcctcgggcaagttgttataattctcccatgctgctrattggcctccaggtactgatttttctttgcccccatacccgttactctgtagctgaagtcacctgggagcccccctggacctgagctgcccattgaaacagcgttggatgatagagaacgaagaatttcccattccctctacagtgggattgaggggcttgatgaatcgcccagcagaaatgctgccctcagtaggataatgggtgagtcaggtaaaactctgtttatcacatcttattttgatgctttcattggtttactgagaggttattggtrtaatattaatgtactattagtgtaatattaatgtaaataaaaatattaatgttttcaagacaaaagagaacaggtttattaaaatcattcaggaagtgttcatgtgaagaggtaaatcaatccattgatttaagtgacttttagatcctgtaacatgacgaagcaaccaaaaagaaagggatcatatggaaatgttttctagtgatcaagatattctttacttacttgagataatatgtgaagctatgtttaaaaagaaatcaaaatttaatggcttgtggcaaaaaggattcaaaagttacatatcattcacagtggcactgcctggagggggagaaaaaatatttatatacagatatatgcacacatatataaaatattcacatgtatctggtttgtatttaataggatgttactgtattttaattgtattttacttttctgaagctttagttttaaaatcgcgaaactagtcttctgcatcctttgtttggattcagtaccatcctatctgcatggcccccagtgggtaatgaggttattagcacttgctttgcagcagttcagctttctactaacagatccagttcataaattcttgctttgccacaggagtggttggatttactgagctgctcatcttgcgattagcttgtgagagttttcaaatttaaaacacaagaagccattttgattaaaataacacctgacataaaacacttttattactggtatattttgcaaggctctcatttaaagtaaaaccctaaatttaactccattttgagtacatttaatgcagatttaatacaattcaagtttccattatggagcctcattgaaacagtaatttattcatcagtgggtgtttatggaaagcatgctattggcaagacattgtgtatatactgttgctgtagatacaaagatgagtaagaagcaatctctgccttcaaagaactttctactgggcatgatcaaaaacatacataaacatgtctagtagaattgtctgtttttcttcctctaatctctctagctttctagtttagaaaaattgctgaatatgtaatttcttatcttgttacatgtggaacttagacaagccagctttctggtgttactttgtcaacatttttctttttacatgcttggcgtaagtgaatgtcagggaagagtgccacacctgttgggttgaacacctgtcaggtgaaaggctttgtasatagtttatcactttyaaatctttgcttattacttaccactctcttcactgctgttggattttctgtactttcttggctttggtataaatctttatctttgttaaattatttttttgttgatgaaatttcagtccccttgagagagagagagtgtgcatgtgtccctagatatttgtgcacacaaagtgatatgctgtaatttcccctttattataggaacataggacttgccatactgaatcagaccattggtccaccagttcctgtaacctgcgtcctgcctccaatccctgatgcttcagaggaaggcgaaaaactaaaactaaaactcaaaccaaaaaaatccctaaattcagctagtgaccttttgaaatgctgtatatatgagttgaagagtcattcattttcttcctagtctgttgccccgattttgttagctacagcttcattagtcctcttcggtttgcattatagttgacattgtttcctcttccttctgctagatatgtactgaactcttaaaactccagatgcttccccagggcagtaacttctctcccagttctgtgttttgtgatgtgtatgcccttttaccactttgggctgggggtgacaaatgcgttactatttaagggtaggctaaattgatgtttttatgatttggatattttcttaagataatttttacaatttgtaacggaaactagggattctaaatagttttaccctgacaagtatatatgcatattttgattcatcttgtgttttgcaaatttgaaaattcctcactttttgtcagtccttattctagtatctttggccgtaagaatcaaatgcaatttgtgaaattagttaccacttaaagttagaaatcctgttcaagacgttaccttgcaagagaatgcccaaacaaggcattaggagaggtatggggcaaaaaaattaggaaacttgacaaatcacaccgtttctgaaccaaaattcggatttatgtttttctgagtcatgaattccatagttccaaagacattaggactttggatttccattcgcctaaaccaataacaacagtgtttattgatttgcacagtatctaggcgcatagatattcctcagactgtttggttaatgattgtcttctatatgtttggaatcactcctttgtagacattagtggaggttgaggtatttacttcatgatctgctatgatacaaaaggaactttgtattgaaattctggctgattaccttagggagttattaattttatgttaacaggttgaattttcatatggagtaatcccctatgtaggactctaggctaaacggagctttgaggctttgtgatgcattcctatgtgaacacatccctggcgaaaggcttttaaaagatacaccccaaaaggaagagcctttagagttgaaaggatgtcagatgtcatcagtcacactttcccatttaacagatgaggaactaagtcctgatatcccatgatgttttttgttttactttgtttttggctatttcctttttctaaaaatagccctctctggggaatgctgagatcttcattctttattagtatcaatttataattatctacatctgtaagcagttattcgaaagtctccagatcttattctatcctggcacccatggtgactaaaaaaatcaaagacgttaaatctttgaaagcagccttcaaaccacatactccarccaacttaccttatatgtcggggagttatggagcaaatacattaattaacttgacagaagttgcacactttctgtacttctgaaccaaaatttggatgcatgtttttctttatcatgagtcacacctgattaggatttccttagcttttgttggggtcagacaggattgtgaccaaaggcaagatttctctgtcatctcttttgacagaatttccacaatcatggattttgtaatagtcctggacattcatcagaaagtaacctgtagtggggctgcctacataggattcttcctttgaaaagccttaaacatttttctaatggttggtctctcttaactaacaataaaaaacagcaacaatgcagctgggcacagtggcttwtgcctgtaatcccagcactttgggaggcccaggcaggtggatcaactgaggtcaggagtttaagaccagcctggccaacatgtgaaaccctgtctctacgaaaaatacaaaaattagccggatgttgtgttgcacacccgtagtcccacctactggggaggctgasgcaggagaattgcttaaacccaggaggcagagcttgcattgagctgaaatcgtaccacagcactccagcctgggcaacagagtgagactccatatccaaaaaaaaaaaaaaaaaaacaaaaacaaacaaacaaacaaaaaaaccagcaacagggatagtcagcataactaatttaaccagcacatccatttcgtaaaagacatcacacattgtcatttgtaagcctgggactttaactatttctcaacttttttagctgaataatttttctttttaaaacaaaactgaaatctgttgtatccattttagaatttatctcagtagtttgtatattcatatatatgtggtgagtttaagaagacgtatttagaacatttttatcttgttagcaatttgacatagaaaaatgaaacattaatgtttttattgtgagtcatgtcactggcacagttttcctctagtatcatgtgtggtgttaccttctatgtaaatttgccaatgaataaatgtttagtaaacaaacattttgtatttcattgtttcactcctctacaagatactgactagtttacttagtttgtaggtcactagttaactagttgaagatagaggaaagtttacctatcagaaataaattgaagccttctcaagtcatagaaggtttcacatttatgatgtaccaactactagcaaacataattaagggatcattgtattgtctaggtgcagcttagtagaatatgtaaagttttttagctgtccattaccctggtataatcttggagccataacccaaaactatattcctggcaagcatgttaagaagtggaaaatatgggttttcaaatcttgtggaaatactagcctttcaaatcatgggtgagaaaaaaatgctaaattattttcttactatgaggaagatttcttgccatttatctatgtatacaatattgtatcacaacagttaaggtataatatttctactcagaacaacagattacaaaaaaaatcatatgcccctttcagtgttcatattgctttgttaggccatctctcagaatatattgtgtaaaaccagaagttttagttttgtgtttaaaaatgaatgcactatgattatactgtaatattttcttttaataaattatgcccgtgtgagtatttggtatttaatattgtgacatgcctcgtcagtggtgagttgtccattggggtgactggttttataattctatatactttgaaggaaaaaagtatgtcttgagaaggaaatatttcttggctaatagtgctagaaagtcccaccttattgatgaatgacacttttgctgaacaggtttctatcctaatattctaatactgtattagaaataaatgagtaatttgaattcaggtaagggaaatggctaagtattacatttgatttacatttttatcattagcatttatataagctgttaattttcatagtttgtcaaaatgggtgcatttgaaatcaaagagaaagtttttcttggtaacgtgctgagaaggggtttcagtgaacttacagtattactacaatagtgtagttgatgttaaatgaggaatgcagttgaaatccccagcaagtttactttttgtgggttatcctgaaaagatgtagcaatttaaataaatttttctcctttgctgaaatgtctagaacaatacaatacagacttttaaaaatccttcacgcttgtgtatgccatcccaacatcctcagtcatggcctgaaaaacctctggccactcagatcctaattttttgcatcaagatcactccaggtatctctccttttctaggctttgtttytggtaatactcatcttttaagtktcacctgactgcatcatgggcttttctccatcatgcatttaataatgatgttgttgctatctaaaataaatatcatcatttcttctggcagaaaagatcatattgaccatttaaaacctaattctgatgttaacttttgccaagatttccagcacttcctacccccagtaacccaggcaattacaacacaagtgaatggctttggactcatctctacaccaccatayaattatcactgcttgtaattctttctccttcactagggcatacgtcctttaaggacagagactgtgtcttgcagtacctgctctgcagcagttgctcaatgaatgaatgaataaacaatgcaagttagtggggcttctttgtaaatttcctggtaatttttcaaaggacattcacagtttagaatgcgtgtagcattttcacattataagacatttgagagagtatctttggctttaggaaacttcaaaccagaaaaattgcatgcattgccctgagctatatagttgtagcgtcagaggtagtaatagactcgaggtctctgtttgacaatcatttatgaaaaataaatgtgctaaattctgttttgttctaccaggttgagcagatatgtggaaaattagacttttactaatatagcaaagtattaaaattaatagatgtaacactttgatcgatgtctagaattttctcttcttcttttttcactggacaggtaaataccagctgtcccctacagtgaatatgccccaagatgacacwgtcattatagaagatgacaggttgccagtgcttcctccacatctctctgaccagtcctcttccagctcccatgatgatgtggggtttgtgacggcagatgctggtacttgggccaaggctgcaatcagtgattcagccgactggtaagctcatcgtccagggttggaaaacatgaattaattacagtcccattttatgtttaagtggcttactgctaaatacagttaatcatttttttaatagctctgtcttcatggtttttatatacttatcactcttataataaargattatacccraactctgtaaatttaattgttttagccttcaagagctatagttagtaatataaccaaaacaatgacaaaactactaccagtcaaaaaaccgtgctcatttgtttttcactttcactttatgatttatttcacatctgtgttaatttgatgcmttgttttttaattaaataaattcttggtaactccctaaattgatggcaacaattagatamttttgcaaaactaagagttgatgtgttctaagagtgggaggaggctttttttaaagtgttttttttttttttttcagagtgctataaccatactgtttaaaatgctttgtaattgcttttaacatagtgacttctggggcactccctgctattttctttcctgtgtctttcaaaatagaagaaagcatttgatactactgagccaatgtgtggctcatgaaggtggatgtgtgccttaatgtttatgcctagtaattatatacatcaataagcaaaagcagagctcctcttggggacgacctcacaaggttgtagtgataattaacacaaaccaygtgaagtattgtaccagaattttctcattgccctttctctggggtcttttatgaatatatcagcaaaatcatatttaaatrttatggtgttgttccttcaccacttagccattcctgcttcctactgtttttctggcttgtgtcaacattaaatattagataggaggtgtctgggggactggcatttatttgcgttaacatttttagtgatgatcttaacaaagtgaaccactcccccaatcctcttccctgactctccacatgaacacacaaaatacagttcatttatctgttaattatgaagatgttctcttggaataaatcacacctcttatttgggaccttgaaaagttcatctctagcttttcatttctttctttttaaattctctttttgaaagcacaggatttaaaaatagaactaccctcaaacctgtatgataatggcccatctttgaatgaggtttttgattaaacatagaagggaagactacaatataaagtaaaaacccatttgaaatctgcagatggtgttacattgactgctgtgtctcatatctctttctgaaaatgaaagtagcaacaacagagaaagcaaggattagatagacgcagtgttcatcttagggacaaaagcctttaaatctctaccatgatgagaaattgtggaggtggtcatagtctttggggcattataaagcagtatattagtgaaaatagataaataagtagaagggatagattgtggcattaatttccctaagggggatttgcaaaatggtgaggacttgkataattttgctgtggggaatgtggggcaaagaaaataatatgaatgaagggttatccaaacaagaatgccagctgttctgaatcacagcagaaaatgcaagcttttccagcctgacaatatcttccctaatccttgatgaaaatgctatgaaaacaaaaggccaataagacaggattaataactggaattttaataacattaggggtcaggatatggttacattctttaaagaatcagctgtcattcctgccatctaacttgttaaatattccagtgtaccgtttattgtgtctgaaataagtttagtgggaatattgatagggaagaattaattttgtcatagtttaagaatatttagttatttaagactcttactaatgcacaaactcatttgacattttaaattgtayatgtagttcactgcacagttgtcgaaggccatgtcaaatggctaaacttacttgtttacttatagaatatactattttcaatccattaatcaattgagagaacattaataatgtgtttctgggggaaaggaaataacagcaaaattctaatcttaatggtaacataattttagaggatataaaattaaaggtgcaccaatatgtggttttcaggcgagattggcagtgacaatttgtatttctttgaaaaatcttttaccaacaatttatttctactaacactgtatttcaaatgcattctgtttacaagtttggtgcagtattggagttgaggttttttttgttttgtttttgttttttttttgagacggagtctcgctctgttgcccaggctggagtgyagtggcgcgatcttggctcactgcaagctccgcctcccaggttcacaccattctcctgcctcagcctcccaagtagggagttgaagttttaaattattctagaagaggtaaaaagaattggttagcatgtgcagagtgactgaagagatccactgacaatatataaaagaattattggaaatatattatttagagtttgctgttgcaagattgtgtcatatttcttatcatatgggttttgattttttacttttagaagtgtgtttttttcacttgggtgtatgtgctctcatcatataagccatttacacctaagcatagtagtatgtgaaggggcatctgagggtagatgtctgtcatcataatttgtgtttgataatttgagatagtcttcattgggtgatgactgacttgtttagtagttagcaatttacatggggctttcaccttaggttgctgaattctcttgttagctttttaagtgaatgagacaactgttctctttattgagcatatttaatacataatgagctcaaaacatttcaagtcaccctacccagtggcagggcttttgcctgctatcttacttttcaaacttttaccatagctctttaagagccaactctcatttcatgcacagtaaatcgcaactaaatttctgatgtacatccaaaggttgactgtttttttactagtatggatgatagttcttataaggccataaagggttggaaaagcttgcttccatcagaaacatgaggaagactatcataaattcagctgacagtggaaggagccctgggcatttttagtgtgctcagttagctgtagagggatgttctctcacctggccagataggcaaggtggccggacctgatatagtagagctagtatacttacttacccaatgtgcccagcacagagaaaacccttttcatattatgaactgtggctagaacaccttatagcactttagaatgtgttcacagatttttacaaacaggagtgattctgggacatcttcaaccacttgcrttggaggaacacttcagaaggcatcctgttaccagggatttgccatatgcttccttatcatgcccgcttgagccactgtgttggtgtcacccaaatcaaatgtcatctaaacttagtcatkttcttcctgattctcatatactgtttattcactcatctatgcatcctcagcrtctgtttcagacttctggtttagtatttttcttatgagctcatagagtacagggaatctttcttatctgttatttggatctacgtacctggcacaatgccttaatcagaataggttctaataaatgtttgttgaattgatttctttgttttaatatttcagagaaactgcagccttatgaaatggcatgccataatggcattttttttctttccttaaaacacaacataaaagatacataagaaggctagaatgtactctttttgaaacttctatttagttacaatttatatggtcacttgttcgctgctagtgtttgtatataatatatgacaggtttcctgaaaaattcagttgttctaatatcaggctcattttttatgatcatcttgaaataattctgtattgtcaaatagagtgaagaaacagagaggaaagtagagaaggagaaaattcacatggagaaagagttactctaaaagttaaattaattttgtatttttctatcactttctatacagccacagttttttttttaatggactgtatttgtattatttagttgaatttttcttgaggaatatacatatgtatatttacacttgcaggtatgtatgaacctccctaaaatggatgcgtgctatttttagtaaatatttttatttttattttytcttcactccagctctttgagtccagatgttgatccagttcttgcttttcaacgagaaggatttggacgtcagagtatgtcagaaaaacgcacaaagcaattttcagatgccagtcaattggatttcgttaaaacacgaaaatcaaaaagcatggatttaggtagtgagtacaatctccatgaatctttatctaaataagttttaaatgctttcaggataaaattgatggtcccaagcagatgtctgtttactytgagcaatagagaaaataaatgtgaaatgtggcaatttggcaaaaattagtttttctcccagtttgagataacgatattactcataagtggcatgtttacataatatgcaatatgttaatatatatgttttcttaagagaatggaaacaaacacatatgcatatcatgctatgtccatgtatctttattttacaaaatgaaatgttttaacactttggctatttaaaaccaatttcattgaaattgtatttggttggttgtgggatttttgaactagaagagaaaattttggagagaaaccattatctcaatccatgtctagaatttggttacttcatgatgtcttcctttcattgctgttctttaaggtttatttattggaagctttcatattttgataattaaggcatttaatcaaagtaataatttgagagtatttattatagaaagtatttaggagcaaatgagaggaggaaaataatcatagttgttcaaacaccaatcaggtagtgtctctttaaatccaaatccaccaaaaaaaaagtaaaataattaattatatttatacactgaatgatttaaaacctttgttaatcaactgtaacttatgctgttctctggtggctgtttgtattccaagactaaaagcattaatttatcatacgcataaagaaaaatttggtgatgcattgccttggctaattatgatatgctaacatataacacacatgtctgtgaaatgaaatgactggcatattgcatggagacactgctttttyttcctccttttttgattatgaatgtttgcttgatgtttcatagtatttgcatgaaatattagctgaggatcgtcacctaactaaaaagatctgggaatggtggaagcatggtgggctatgggaactaactgggctaactattatacatttaccttttaacagtagctgacgagactaaactcaatacagtggatgaccagaaagcaggtaagaatggacagttagactgttgccatagaaacgatggcccacatagcttatcacaattatagagctgccaatcatatgccatgtaaacatacatattccagtcttacgcagatgttttcattgtgagaaattgaattacataagaaaagaaatattttctgttagtagaaatttatcagtggtgtacttactaaatagtaatatgatttactgcttcaaaaaggctagaaacaacctagattttcttaattatattcatgtaaggatgttttatcccaatttttaaaaaatcaaaatcctgcaaacgtgatctgttatggtagagtcctaggtttttaagtcagctatgtgatgtctaggttaacatccaaaaagtgattctcagagtggtgattttgatttgaaagataatagtgccaatataaatrtttttcattgtaggacaacgtccggtattgctatcattagtcattcagaaaggcatattctttttttgatgctggaattagcttataattaacctgacgttggattagactatataatgcatatggcttcatatcttaactttgtgagcttgttctaaattcgttacttctaaaatactgccaaatcattccatagaaacaatggattatattgaactgggattgcattatagtcatcgattttgctttttatgttattgtatgacagtaatcacaggaaggtcttttaagtgtagttaacgtgctttgtataattgaccatttatgacttattataagtttggaatagtgttttaatctgtatccagtatgatgtagttacactacttagcactaattagcttcaatttgcctttttaacttgcagtagtaaattagttttagctgcttaaaaaatgtgtatcccacatatatatatgtaaaaattattgtaaacatggttggagttatattctttggagtataagatagattgtaaaaacgacatctaataaatcataagattaactgtattgcacggcagttaaccgtagccttatcccttactgagttgtttgttgttcttatgaaacctaaagtttattgaagcagagctaaagagaaatgttatgtgatagttcacatatgtaaaatagtagttagtttttacagttagcagtataagcaataaccccgatccaagtaaacagtcataaaaaccaaattgagctgctcaggtaaaggacctgacttcatatacaatgtcagttaggtaaaataagaaaaatacttaatttaaccaactcacagctactataaggaaaaggacagtttattgtgatctacaacataatgatatccaagttataactcagtgcgttagataactttcatggaaagtcattacataagtttcaaggcagattttatagtctaatcaaaaatcaaactgtgctagattctagagaaaaagaacttttttttttttttttgcactttgtgcagtctattctaccaaattaaattagaaaatattggggcaaaaaattattacaaagatgtcaaaatacttggtctgttgattttacatctaaatgaataaaatacctaaagtagatattttattatttccctgtcccctaatattagacagtgaaaagattttcacttatttttctttcgtcacttcacttgacttgagttttcaagaaagattatgattttatagattagtccaaaggtttttgggagaatcatagtggcattttagcattgaacatctgtctagcctagccataagcctttcataatgaaaattgaattacatttccctctgccccttgcaaaagacatcctttcctttctttttttttttttttttggcaagagggatattactaagtaggaataggaaacagatctaggaaaatagtatgattatgatttccctctttttttttccatatttaggaatcttgtatcatattttggggataaatatttctcctcaaattataacaagggagaacaggtataagaagagaattggatttctaatggtttcattcttgaagtatagagattagcaaagtatgctaatgacctaaaagatatgtgtaaagtaagagcttaaaatattgttttaaaattaagacaaaagatactaacttttatgatgtaaataaaatcttttccatatattttatgtacaaaaagactttttcaattttcattactagtaaaatgctgtttgtattgttagggaatccttttaattttttttctaaagacatttgactgaatcaatgtgttagggattttaataacttcgctgagaaatcctaacatatcattcaaaacctttgttatagtttcttggtcaaatatagtactaaagtgtatgttactcatattataaatcgaatgttagcaagctttttctgtaaaggaacagatggtaaatattttagatctctgttgcaacttttacattctaccattgttgaatgaaagtagycatagacaatatgtaaatacatgggcatggctgtgttccagtaaaattttccacatttgactcacagtttgctgatctgtgttacaggttcagaagttgtagataattgacattttgtataattttttattrtaaaagttttcatctatacataaatatacagagagtagttcattgaccttccacaaacccagggcccaccatccacaatggtcaacagtttgccaaaaggttatttcagagtgttatgaatttagggaaacaaataggtaggtatgctctgaattgcacttacaaaattatcgtttatcgaattatactttgaccattgtttttctttccaagtttgcctgtgtttatgcttagggacactcaatttyaatgaatactcatgccatttctgaaatttattatttaagtttttattgctgtcagtacactaagtaaaatctcagctaactttacacaaagaaaagctttatataaatggtgtttttatgagaattttttctggaagcatgaaatctttattcatgatatatactcacatacaaatacatacacacatacacatatccttaataaactcaagaaagcaccaaatatttgcccaatacatgtgtatggaagccaaatatagctggtaaattatgaaagttgatagacatttattcacaaaaggatctttccagtgctaattctaggaactataaaggtaaatatccctgcccaggaatgatcttttcccattcttttttattccttcatttcttattatgtaggtttttggaacaaaattcatttttcttcccatgacatgacttttatgagtaatttagaaaatgcagttgtcaaaaattgtagtgctgcccagagaaaaagtaagatggatctcattcaaagaaataaatctcatgaacttttgtcataaaataaagaaatatagacaaacctgcactgagaaagctaaatatgacatctttttctttccagcacaacaatttgtggaatattatttcttcattagaatcatgtgtttgccttcctgtttgtactacattttaaacatatctattcttacccaaaatagcttcatttaacatcagtgaatcttaaaaaattaaattttgttttgagtctttcagtgtaattttaattctattttattttctgagctgtgaaaagcctatgtcacaactatttgtcttctgggtaataacatgatcaacatatgggctgatgaccccatgcagagataaactattttgtttctcctaccctctatttttttcacctgtctttttaactgtatatatgaagaaccagttctataacctggattgcccaggtggtggtgcagagctggtatttcagtcatccggaagctaaattagtctacctttgagtgtcaggtcaggcagtgatggatgaggctgtcttacctggttaaagaaatcagttttgattgccttccacaacttggtactattggtattatcttgggtccttctgccctagatcctcaggaaatagagccaaatttttaattcccggaatttgtccctgtcatcctcatgaaatgttctggttaattgctaagtcgtctttcttctgtccatcacctgtttttcaaacatattgttcccaggcctagagatagaagtactcatatccagtctctccttttttatttccctctgagagagagcccttatgtaatctgtttccgttcaaagcttgtgttactcttcctatagaatatccatatttcccagggttgggtttctrcctgctgccaggttgccctaactgttttggtgacatgttggcccccgtggtcttactccttatgcagtgttgtgggtctgcagtttagcaaggaagagacttgacaatgcacattgatgtgcatgtctagcttctgttctaaagaattttaaattgccaaaaaaaaaaaggttttaattaagtgcaaagcttattcttggttgttgaccttagccttctcctcatcttcccttgcttttcaaatgagcttccaggttattctggttcttttagattattcctattaccggagcaaaacgatttgacaacaatttcatctgttgaaattttttttaaaaagtaaygacttagagtttttcctaatgcaaagagagaaaatagaccaaatctaatataagtttgggaaaaataaaaattagcaactattacttcatttattctttgtcttttccatctgcattccagaactcatcattgagcaaataattgttatgtacctgaagttttcgacagtgcrtattcaggtacataattttcactaattcacactaacattttttttcttgtaaacctcccaggttctcccagcagagatgtgggtccttccctgggtctgaagaagtcaagctcrttggagagtctgcagaccgcagttgccgaggtgactttgaatggggatattcctttccatcgtccacggccgcggataatcagaggcaggggatgcaatgagagcttcagagctgccatcgacaaatcttatgataaacccgcggtagatsatgatgatgaaggcatggagacctgtaagtttataatggctgaaagaataataattaaaattagactctatttcttaaagtgagctccagggagccctggagttttctaagattcttcagggkaatctctgagatctctgaggtctaataatctcttatttcataataagacgatattatttgccctttactcacattctcttataagtatacactggggttttttggaggccacatgtcctgtgatactgcattagattgaatgcagaagcagatatgagaatctgtcttacaggccaatattaaactaaaaattctgaaaaaatatttaacagtgccattgttctcacttcttttggaatatatatattttttggtaaaaaatgtaatttctgttaacacgaagttgcttgtttttaaaaagtaatattttaaaactttcccagttttaattcagtacatgttgctagatataatccacatataaaaaagttatttggagtgcttaataattttcaggggtgtgaagtcatcctgagatcaaaatatttgaaaaccactactttgtagtgtctcaaataggatgtctccattgagtacctgtaataatctgtgatcttaaaaacattttttttttctttttttgctttcaggaattactcattctttcctataactaaactagcaagctatatttatgtgtgtttattttgaaattgcaaaatatttaaagccaagattattaaaagtcaaaggttaatatgaatgttttccatggtttattgaataaaaaataatttatagataggtacaaatatatccttccagagagttaaacatttcttatattaaagtaaacattctattaaaaagtaatggaaaaactctaccgatatatttactaagaagcaaaagggcttaggagtcctaatagtgaaaattgttgattatcttatattgctcataactactaatttaccttttagtgttttaacctcaaatgtgactcaaccatcaaactattgtacgaatagttggagggaccacagaataaaactaaggcagagaccagagataatttgtgtagattgtaaattacttgcaattcaacatttgagtggaccacttctatcacatatacctaagaaagactttcgtgggaagaagagttttaagtaataaagatcacattttgagaatatatacatatacatataatgtatatgtatatatacgttaatatacattgcttatacgtataatgcttatacatataatgcgtttgggaagatgaatatttctgtcataatgtaatatgcgaagcataacttagaggattgctacacttctctccacctccacctgattctccatctaaatccaggcagttttgtcactatgatcagattcctcacaactgggcctttccaggcccagtttttcccttttggcggcctctccaggcccagaacttccttaggtcagcctctccagacccagttgcagcctcctggtgtcctctccaggcccacctcttcctcccggctgtgaatatatgcagcccattcttgcaggatgaggagcatatttactatttttgctgccaaacctggtctccaagatcctgagtcatataagctttcgaccctattgagttttttctctttgtaataatggttccttgccatcctaatcaatattacttgacaattatagagcttgcttctctctgtcttgggtgtatatttaatcaaaaattactatgctttggccccttgatatatattttttaagtatctataatgatgcttttgaacttttttcttgttctggttaaaatgttatttaattttccttaaaaaatgcagtttgctcttataatatttcactcatttcaaatgtaacaggagatagaatacatatgaatataaggtatatttttaattctgtagggatagcctccagagtgtcccaccaacatggacatctgattttgtccctatataaacttattttttaaaaaacaaaatgagaaataacagtatattaaagttcattcatgtatctgtccttcagagaaaaaaagtgaaatgaaacacatggataggcaaattacaatttgcaaaccaaagataaagttctggacaagacctgggaaatacacgtgtggcaggtgccctaaaacacgctgcacctacaaccaccaaatgttgtatttttcaaaagtcctgtttttattattttttgcataccagtcttctgaactttgcatatggcaaatgaatggcaactattgtaaattccaaacttttccaattttggttgttgaaatcgtgtttatagggtggaatgaacacagaagtggaattcaggtgacttgcatcctcctctacattcttctaagtaatttgggattttagtcaaaacttcaactgcttgagctttaatttcttcatttgtaaaactgaagatttggactagataattgactttcaactggtgtgttgtgatctctggtcaggagcagtacctcaatgggtttggagagtgggaaaggccaccagtgtcaccttccccccaccaccaccttcacagttgttttactcacttctgtacatggggatcctttgtaaattttagtttttaaaaagggtgtttttgagtatttaggaaaaagttgtaaaagttctggcttagatggtttagatggtttccgaagtccttcctagtttaacattccatgattctatgtaccccctcactgccctacttctggcacgctaaccccctcaccttttgcgaggcccatgtggaaaacaccccatctatttccatcttgcattaccaaacacaaagcttggcaaatcatagaattaaataaatgtctgccaaatcgatgagtgggtgagtgaggtatcccacactggaccttgtatgcactagatcttcaatacttcagcaaactctttgtttttgtttaaaaaaaaattgtctatcaaatgtggtgttactgctggtggctgtcagcttacataaaactgaagacgcraaggcactttctgcctccagctttggaaagaaggctggctcagttagccctccttcggcttcctaaccacaccattttcagcgtctggcttgtggacctgcacagcggagtctctggacttgctgtctctgtggctatgctcctgcatttttgcccttctgggcttgtcccttagctatgtgtcccctggctgcatgtccaacatcttctattgtctgtgctaagtgggcctcaggggaagtgggttctttcttgtcccgatggtccaactcagttacagctgcccgtagaaattaaaaagccacatcccccttgaacctggatctgaaaagaggaccctcgtctaggcagatggtctttttgtcacatgggacatttcctgaggatgcagtgcaccctggaaatgcgtggctagagactgagccattgtggaaaagctagttatggaggtcagcaggaacagagagctccttgcaccgtgctgcaggctctgatttctatcatcatgtggcacttttcctctttacaagtaagacacataggcgtaggcatggttgattgcttttgtcagttgggtcgagcccctccccagtgactatattcatggcactgaacaggctggcctcttctcagcagtgtggaaatcatggcatgggcacagcaatggggccaagagactggggtgggatccatgtggtatctggtatctgtcatcttctgcagcacttacattcttcctgtggagatggcagaagccagcatttttgtgtctcatttaatccatctggcctctccatgttgtgtgcgtctgtctggatcaagatggagctttgtattctgggacccattatctccgaggccctacctgtgtttgacaggtcagggcattgacaatctgctccctcttctatgcaaattacatgcccagcctggctctcagcaagcgacttctcctccccatgataaatcagtttctattgctaccaagaaaatgcatgcagtaagattgctttgttttcttttaaaaaatacattaattctactttttcgtaattaaaagttgccagaaattgtaagccctgcactcagttttgtaacagctttttgttaaggttgaggaagtgaaacagcaaaactaaatatctcctattaattatacctattgattttaagatatatcaagttcagaattttaaatgtgacaaactttgtgccttgcaaacatgaaggcattgtcttcaaacatgaagtaggtagcttgcataatttcctatagagctcttattaagagataggagaaaagcactgctccagaatacacataatttaggttttcagtatgaaatttgaagaaactgaatttacattattaaatcaactaatatgagagcttctaggggaattttgttattgttttattagctatgaaataacatattgcctttgatatctcattttctactctcagtattctacccacttctagccacctttcatcaccacctatttcagcaaaaataatgcaaactaagtataattttatcataagcaaaacacagtggattacagtaaatctattgtggaagaatttgggatcagatttcaaagtcagagtactttgtaaactgtttcctatttggttaatccattttagtggataattggatgttgatctataaaaatacttgttctgaaatgctaagaagaagaataacctatcacatcattttatgcaaataaaatgatacatatacttaacctgcagtttaagaaagggagcttcgattaatttttaggaggtttctgatcatagtatgggtgtatggttgtgaaataaccaaaggtattctctgcatttctttttctaggtaaaatgtaacttagcagaaagtgcaatgaatattgacatctgaagtgttttgaatgatagaatcctcatttctaacttttttttttttttttttttagaaagagtgtcactctgtagcccaggctggagtgcagtggcacaatcttggctcattgcaacctccaactcccaggtcctggttcacgcaattctcctacctcagcctcccaagtaactggaattacaggaatgtgccaccatgcccaagtgatttttgtatttttagtagagacggggtttcaccatgttggccaggctggtcttgaactcctgacctcgtgatctgcccaccttggcctcccaaagtgctgggattacaggagtgagccaccgcaccaggccccattttttaagaggaaatagtatctatatatttgactaagattacacttaggaactgaatcttagaatgcgtatcttctaattctcagtcctgtggtttttctagaatatgaaacacacttccaaacagaaagcccattgcgctaaaactactgcagagtgtgtacctaaagtctgatatttaggctattagttcctaagggctcggggttgggggatgattcaacccagtggataaatgagcacttgataaggagtgtggttcagttccattgtagtgtgtaagttagtgtgacactggggagggggtggtggtgtaggggtgcccagctgatgtggaattagggaggagaggaaagtagaggaggagatttccagaagagaggtattggccgagttgagtgttactgcttgagagtcttcaactggatgcacagagaaatatggaacatagggaatggggagccatctctgggctgcagtagttctgttaggttggtgtgtatggggcaggtgagagcatagtgaggagtgaggtttaagatgtaggtgcctgtcatcccagcactttgggtggctgaggcaggtggatcacttgagatcaggagttcgagaccagcctggccaacatggcgagaccccatctctactaaaaatacaaagattagccaggcgtggtgctgcatgcctgtaatctcaactacttcggaggctgaggcatgagaattgcttgaacccgggaggcggaggttgcagtgagccaagatcacgccactacactccagcttgggcgacaaagcaaaactccatctcaaaaaaaaagatgtagacagcaaaccacagactattttaaattacttgcatttcaaataaaataatatgatgggactctggggtagagggtggcttattgagatgggatgataagtagtaacgtcagggcaaggagctaatttctgtgatagtagtacaatcatccaggtgagcgatgatgcttggcagtaccagagcaaaggaagaaactgtttacgggcttagcgtctctcacacaaagatggatgatgatgatgatgtgatttctctcattagcacttccaggctcagaaacttggaatcatcatctcactgtgtcaccactccattaccaagctttcttaatctttccacatgtaatctaatctcaccccttacttgcagtctaggccggaccctcgttatttaatatcagaaggtattgctagtgtctcccaactgggcctcctgtctctagatgtgcccagtgagctctgcagtcaccttctgactctcacagcccctcaagtgtccgtgcttacccttgcctgtgccatgcggtgcacacttcgtgaggtgtatcttctttcttccccagccctctaatgtgtgtatattatactgtcatcttccttctccaagaaacttttcccccgacaatctagtttttcttaagctccagctgattctacacagtgcatccgagactttttagtataaattatttttttaacatcaggaaatttttgcggatcactcaatatagattatgtttcatggtaggtaagaacattcgcttttgggaagcaggcattctgattcctcacacacacaaaagcaaagtaaagcattgctagccattcactattttataatctctaaacatttttatgctgttaatttttgtgtttcactcaaaagagtctgagcagtggcctgaaatctctttctttgaccataaataatagtttgtatgttgttcaaacagacgttgtgtacgttaagctcactccttgattaaaataaaattctcagtggcaattccaactgtagggttaggaatgctgtcatttcgattgtgtagccagccctttcggtcagaattggtttttaaaaagccttcagcttcattttaaattgtccccatggacagaaaacagcatccactgtgggccgtcatttgaatgttaaaatcagttggacactaaaagcgaatttgcgaaggttcagaaaattgagggtgtgaccctcattgtgcctgctctgcaacattgtctagggaagggagggataatggaggtgacattctaccattatctgtgggagcattttacctgcttcatttgrgggggatgggttaaagagaagtttagaatgtcaagtaaaagtgaagaaaggtttttggtaataactctttaaaagagtgatcctattgtttttcttccttcacccacatatattgaaaggttttttaaaaatgaaatagagctayttttagagtagagtgtctgaggagtcatctatttgaactttctcccagttgctgaaaccactctacaataccactaataaatgtcacctgattccttcatagcttttttacctcctcacagtcttcatcatatcagttattattctcaccccatgtattagtctaaaagctctaaagtcttcctgtttcatgccagctttgtgtgtgtgtggtttcctttttttggttttcaggaaaagctaagtttttctgttgccaagagctcatcattctaatgttaaaagtcagagtccagaagagcagatcatgttattcgacaccatctgtgtatcactagctgttcatttcctacatctttctttctcttccaaagtcaaagtgttccaccaaaataagaaataaaaacaatatttatgtccccagcgttcttgattcctatgcaggagtttgcagcgactgaaagtccagtcctcatttagttgtattatctttttacctaacactaacagaaattggtagtggtcagtggatttactaaatccagtgaaattttctattttgaatgtctcattttaacttaaaagttttgttttaagaatatagcttgtgaagactgagtcaccctgtgtagaatttttacatttcatcctttatctttcaatataaattgtaaattgctcaagtatctgtgttcctattactaagtattcctaattctaaggtagttcatagttaaatgggtgcaacaaagggcagttcttcatattgttggctgcttattcagtccttcatttaattgctcagtgagtatttaatgatgcttcttggggcctctccctcagaggagagtattgttgagttttaaatacaaagtaatactatgatattttcgttttgtatatctctatttatacccattgaacaattcattttaatctagtagcaaatctaaacaaattatttaaatctagtaaaattgccaaagctacctaaaatgatatttactgctaaattatacacttaagacaaataacacaatagatattccacagttgctctaacacttgctttatgcagtgtaccttttaggatgctttcagctatatgtaatagaaagtgcaactcagaccaactcaaacaataaggaaatacattttcctacataacttgagttctagagttcttcagagagatttctccaaagacccaacatttttctgccccttctgctctgctatccatgagtcagctacccacaaaataattccataattcagctatccatagggtaattttagggctcagaggccttttactgtcttattgctgtctaacagaagggaatgagccctctccctaagcatggatatgtccattgagtccaacggggccattcttggtctgataaccttggactggcaagtctgcaggggtatggcatccataaacttaataatgaattcaccccttggagctaggttgcattcctggacacagagttctattaggaagaataaagggagaaatggattttggataagcggccaacagaaattatagtatcaacagtagcatcacttctcaatgggggggggaaatagactctaatgaccttgaggctttgagtcaaccttgactgtaaaatgtttgtaaagtttagatagaaatagattatttatggcagtagctgcagaactttgcacttcaatgaaaacccaaagtcattttctccatcatcattaacacgtaaatgcccgatcttttccaaacttgttggtgatccagtcctaacatgatacctttcagagttgagtgccttaatttgtaacatggactagaattttaattgagctccatttgcatctgttgaaaacatggtaattaggtatgtcttaattgcagaatgactctgccacattaaagagaaataagcagcttcatgctacaccttctttaaaaaaagaaacttgaaagtgcctatctttataggtaatcacatggaaacatagctgatagttcagtgcatagagcaggtttaaacaggcagaaatgttgtcaaaaatggaaatttctatttgtttggaaggagataatcatcgctctttgtgtaggstatctgcaaaaggaaagcaaatagtctgtcaaaatgagcaaaattaaagagaaaaaaatcaagaaatgtatatagcacttaaaatagtacattatctaaatgtaaatttatgattagttcttaccttgtaatttgctgtatgaacacaatagatcaagccatttattgctgatatattactagtacttttcttacttgaaaaattgtttatatgcatgttcgtttaagggaataaagatattttatgtacctaattataaagctagtattaaatgtacagatttattttaaaacctaaaatctgactagtacatcagtgactttgaatatgtatatttttttcaaaaattaagcatgtgtaaccaatttatttgagcttttgaaactacaatatttctgcataggagcaggataaagatttttctctatcaaataatttcagaatttgaagtatatataattcagtactttaaaagaacatcttatgtttgtacatatgaagctacatattgctaaatatttttaattagttggcattcaaagggattagttaaatcagtacacccccagaagagtttctgtgataatgtattatctaatttagaatgttcagaacaagcataaagaatcctccaatgtgcaagtgtcattttaaacagtccactggcttggggcaggaaacagaggtaggacttttaattttataaaatgaggttacaaaacctgaagctaataattgatttcatactactttatttcacatactttagaaaataagttgtgttacatacaccagaaaattattttgaatatgaaaagaattggcaacaaacgtgacttcagcatatagtgagttgtgaaggcactgccattattctgttcccaagccaagagccgacatatgccccttgaacttctgccaaaactattaggcagaaaactaacagaatcgctactgatagttccattcatgatttatgataatggttgctgtggaagactaaatcatttacatttattgagctcatttttctgtttatagtttcagacattgtagagggtcgtaaaatctattaaatgatgcatacagcactaacaataatagcatgaaaatataccagaaactaattagagctaaaccaaatatcatgagcattcctacctagtgttactgtagtcagattgtggctagtcttgtcaggcttgatgagagaacagtaagcatttttctaaagctagaggaatggtgatacctggcgattagataaagttttggtcaggataaagtcacaagtcagtttttaccaaaagtctttcatttatgcagccatttatgagcagctgctgtttgccccacagtcttcatttgaggagcttagagaatgggagggagacatgtatgtgatatcatatgagaagtgcaataataaaagattgtacaaataaagagctttggaagtataggtgaaaggaggtttccatgcaggaattatacaaaattcactagcttccatttatctagtttgagtataccaatagacctaggtttttatagctccagagaacttctgggaattgttctgtaattatttggtcaattatctcacatttgtggccacacccatatctcaaaaacctgaagtactggttcacaagcagatagaacacagccatgttcaagggcattaagcaacacactacagccctgcttgagctatgtttacattctttgggggagctctcatttgaaaaggctgcacataattagtaagcccttgggccaactgccaggatattctttccctgctctgtgtacaccacaaaaaattatagcctgaactcagtattatttgtaagattatggattttcactatgtccttctagttgtaactggcttcttctaataaacgtgcacaattactatttatatcttaatagcgaggaaaaggagcaaattttcttaaaagccaccatgtcctttggaggaagacaatggcttacaatgagataactcgcagttcagaggaaggctaacgtttctgaagtcatttatatgcttgggctgggtgtgactcacccctgtaatcccagcactttgggaggagaggctggtggatcatgaggtcaagagatcgagaccatcctggccaacatggtgaattcctatctctactaaaaatacaaaaattagctgggtgtggtggcgtgtgcctgtagtcccagctacttggggggctgaggcaggagaatcacatgaacccgggaggtggagattgcagtgagccaagatcacaccactgtactccagcctggtgacagagtgaaactccgtctcaagaagaagaaaaaaaaaaaaaaaaaaagtctgggtgcagtggctcactcctgtaatcccagcactttgggaggccgaggcggggagatcacgaggtcaggagttcaagaccagcctggccaacatagtgaaactctactactaaaaatacaaaactactaaaaatacaaaaaattagctgggcgtggtggtgggcgcctgtaatcccagctactcgggaggctgaggcaggagaatggcttgaacccaggaggcggaggttgcagtgagtcgagatcacaccactgcactccagcctgggcgacagagcgagactcagcctcaaaaaaataaaaaaaataaaaaaattctgagctttgttttttgcattatgataaatagctggctttttaacaaaaaaacacaactgtgttacttgggcgtagctataccaccatttgatagtctcttttcagatttgtgagggtttaatagcagaaatctaagatattgggacccttttagctggtcttattatacccacgataattgtgtattgctattgaaagtgctccttgctggtagagaggaaggactgaattttactgaggatatattaacttgatttggaggtcagttctttgcaaaagtttgggaagaggccgaaccattctgtttggctctttgttataagaaactcagaaataatgatctatactttctttgttgatgctggaaaaagaaaaatgacttaagaattcacggagtaattaaccttatggccccctataattctcattgtatttggaggagaaccttaggtgaccagtctcgaaagaaagatttctgagagtggatgttcatacgtgtctctctgcttcttatttaatagagaaatgtttaagctcttttggtagggggagacttacttcagttacttgtcgttctttcaactgcaaaaagtttggggtattgaagtgcccttggaccatgtgcttacgaagtgttggttcaaggaatggaatattgttatcactaagyagatcttttatctgcaaagtccagagaagtgcacttattgatttactcattttcatggctccctctacctctgttcagccgccatgatgcagataggcatgcaagattgtttaggattagaatatatagtagcatttacttctgatgttggccttatgcaaagaagagttacagaggctgtgcagatctgttgtagatataagccaaaataatctgctcttctgtgtgagcaggatatgttgggagcctaaggaaagaagtccttgtgctgacattgaatggtgtagtccagcaaattaatgaggggccagagtgtatctgcattattcttacccaagaagaaaggaagcactttgggaaggcctgcttattttctttcttttcatcttgcaaatatagtacacgggacccttagaggtctgcgctgtataacaaggtcttgctggcacccccctagtagtgtacaatctgattcttagagggtgtttctgtgggtgcatcagcatcccaccaggaagctgctgttttgctgctactgacttggcacacgatcttcacgtaggaggcatccacatcacatgttccattttaattctactcaaagttaaacagcattgcagtccatgttgctagcagggccatactgcagtaaaagtgtgggaaagtraagtccttgaatgtattttagctttattatttttgttgcgttggttyactgtgtccctatttttttttctttccttccaagtggaagaagacacagaagaaagttcaagatcagggagagagtctgtatccacagccagtgatcagccttcccactctctggagagacaaatgaatggaaaccaagagaaaggtgataagactgatagaaaaaaggataaaactggaaaagaaaagaagaaagatagagataaggagaaggataaaatgaaagccaagaagggaatgctgaagggcttgggagacatgttcaggtaagtcgttaccatcccaaaccagaatctccttaaacatacasgagtgtgagcttagcaaaaagtactaaaaactggacacggtagtgcacacctgtaatcccagctacttgggaggctgaactgggaggaatgctggagcccaggattccaaatccagcctgggcaacagatcattccattctctctctaaaataaataaataaataaataaaagcactgaaagcacagatttgaaaacattatctttgagatcaaccaaaattcttgtataatcttttcctacctcatttttactttgttatggatttcatgttagctattttcagactattttagcagcctaaatgattatatcttgccaaccatgtaaataattgttgagaggtaggagggacatgtctgtatcttagttatgcataagagtgaaagccccattgagacaaagggctattaaagcagtgtttgttcttttttgtgtgtgaacaatggttcattatttaaatttaaacatagagctcaagttagtggtagcatttaaaggttcattaataacaagtctaataaaaaaagttacaaatagagcttcaattaagctgcgttcattaatttagtacttattacttcggtctgtaaagatttcattaaatgtggtctctggctgtttcttgacagttgtttttgtgcccataaattatactctaggattacttagcatatcattttttacaaatcattgccatacaataaaagtgacaagttgttcagaagttgcactgaaactctcccataaaagttcatctaagatgatttataatattcaggcacttaatgttaaatataaagattgcttgattgttccataaattaaacccctaaacatatcaaggtgatggtttaaaattgaaaacatacagcacagccatttgacttttcaaaaagtagttatcctgcattatggatcccctctttttaaaaacttttttttaaattgcaaaatgtgaacaacagttttcattttcatagaattagttgatttacaatcctgaaattgacctccataactcagggaggtatagataagtcagacctggaaagtcgaggaaccatggcccagcctgaaggctacacagctcaacagatgtgttctgtagatgtctgattaagtgcatagaagaaggagagttaactctagacttatattaacacaaagcctggcctatgagcagtattttctttcaatgtgattagatttctgtctctcagtgcttcagaactgtgggattttcatagtttttcattagagtttttctagtttacacagggccccctcatcatgtttcttcattatactctgtgttcaagaatcatataggaagaaattgctctaactgccactttatttcaatttctgtgttagccaagggcctttttgttccatatgtgcagactgacagctcataaactggcacctccacagtgcacagaaataaggctgctgcccatcagttaacatggaaggaatctgtactactgtcttcttcaaattacagggttagagatgggagaaaccttcccctgagacttgtagcccactctctcttccaggggctctcctgacgtcttactgaaagctctaacggcttgttagttttcattcattggccaacatttatctgtttaagtgctctgttctggtcttggagtaaaaaatatacttctaatatcttagaattccattaattataagtgatctttttctgtaacctgcaactccagaagaaagaaaggcctatggtagagctttctatctggggccagaggagcagagtgtgggagaaatgtgtattgtttctaagggaccttgaagaacaccaccacacaactctcttttttctaggagtcctatcaagcattacatgatgctttctctagatcattatctacagcctgtacccataacctataatgaaagccagctttatgataaagaagttgaccctgcatattcttggaaataaaattctatatgcaggtgcaggggctgaaggtttttttttccccctaaaaattaggctgatattctcccagtgtttaagaatgactgttaagaaaataacagacattcatactttyttaggtatgtggaatcattggtttattggaatcagcccaccttggctggtgagagccaattgatcaatttttagaaactttgcaagctggttgtcaaacacagccattattaaaaattaaatacattatctaaaaagcaaaggtaattaatacttgaaatgcatcacttcctaattatttttgctatactttactatgatctctgcttttgaaattatttacatttatggcatggacatagggctaatactatataatgacgactgtgcagcttttcccggccccgtgtttagtgacatcatgctggtagctgaaaatttgccatggtggcagtgtttacaccaggaagtctatggaattccacaaaacagagttcttctcccagcagagcaacatagcaccccacggtgaacataaatacctttgaccagagtggcagcatcttgtctagtgcccctgggcatggctgggttctatcagattgcaaaccactgcgccagccctttcccaatgggttgccacatattgccccttgaatatgagttcagaataatatattaaacacgaaataagcttttttgttattgaatgttggctcttgatccttccttcacacgatgaggatagtcattagtctttgagaagactgttaaagcattgttagatttttcaaaacattcttttaaactaccttccttccataccttctggatctgattgtttgagatgaatataccctcaggttgattcttttasgtttccttctttttttttttctcctaacaacataggggactacagtaagatttaaaaattggtctcttcctttctctttgttcttttaagaaaactaggatgtggtttccttagcagtgctgcttttaaacagcttaatcagaacatgcatgtgcacatatatttcttagtacggtttgcaagagggttcaagtatggaggaccgtgcaggcctgaagtataaagtaggggtgtgtctgtgtgtgtgatccttttctttctatcttgtagctcagaaaacaaaaggctaagggacattcagtagtgggagtctagttttgtaggtaaatatagcagcacatgagcttgttctctttagtctgcctgaggaagtaataygttttcctttaaaaacaggctcacaggctctcctccctctaccatcctgtcctacccccatcatcctgttgcctccctgcaactcccactcatacactattcctaccccarcaggttgtctgtgatatttggttaaatatgatgagggtcaaatagataggccttgttttaaaaactctaccagaggaaatgatggtaccttgagtagatatttttagtcattggcatatacagacagcatggttttctgtttgacacattgaatggtagtcacaaagatgatttaattattaataaacagctctaggaaagaatgtgagtcatatgaatcactcttctgtttataaattatggagtatatgaactacaaaagccgccttaatgcaagtcttaaatcagaaatttaaatctataaggaatcaaataacaaatgcaaagtttttcctgtttgtattaatttctcctcatacatactacatcttttgcacacaaggagcttctatcaccttaattaaaatggctttgtatctaagaaacctgagtgtgcttacaaaacaggtaaacatgacttgtaaatgtaatcattctgtgtgcagattgcagagcaaagcggggagcacaaagtttgagtctgtgtatgtttgattctcagacactcggctrttcaaatttaatactggaggatatttctgagaattcttcaattgtatgaaattgtcacgaaagaggaaattgagtatgtactttaggaggagggagatatgttttttaatgttttaaatgtgttcgtttttaaaggaaagcagccttcttaagcaacatggttttgccttagtttttaatctccaaattgaaataaccagcaagataataaaatactgtattgtcagatattaagaagttaaaatcatgtgctcgctttttgtgagccctagagtaagtgtaatttgatattgctttgctgcaaaattggaactgttatcgtttgaatatcatagaattgtatgtactctaaaactgaaggttcttagacgtgaccttattgtacatgtctcagatttatttctagctgttgtccatatgtgatagctgagaacctatcactgcagaaagctaaagcaaaagaaatgttgcaatattaccattaaaattgaatcctccaattacatttaaaatgattacctgggtccccgaagcattgttttattcagttttgaagaggaaatagataatttagtttgtaaccttgtttggctgaaatcagatttattgctctcttttcctttttagaatatgatcattttcagaacacaatgaacataatcaggttttaaaaactgaatgtcgtagtttggattatacatcttaggcatttgagaaaagaacaaacacagattcttgttgctttcctcacctgtactaactgtgtgtctgtaccgtgtctctcatttagccttgccaaactgaagcccgagaagagatgaacaacaaagcgattcaaaacatgtcttgaacagcacatattgcacagttgttgttttttttaaacaaacaataaatttacttttaatgaattcttagtggctgttgacgaattttgtttacgacatcagcagtttgatggtttagtaatttccttattaatccatttggaacttttggatcttgatttcaagcttggggtttaaattacgcttgaaaaggcagagacgtgtttttttctctttcctttctttattggccccttttcatagtggaaaaccatagtcctctcactgctggcgtattcagaaatcatcagcacacacccattggatattagaatcagagttttcaagattctgtaaagggccaccacccatttggttgtgttgtgtaaccaccagtgactttgggacacaggcagatgttacaggtgattcagggcagaggcaaagaggtgtgtgggctggtacagtcacccatcagggatgagatgcaacggatagattcatgaccagatggaccagtttgaaagggcctttttggcaaaggtttcagtccctttgtggattacagagtttagaccaaaaatgggtggttggcaggggggtggtggtgtaggaaaataaatttctgtgcttagatggctgaaccagcaggttcttcccgtgtgaaaaaagcagagctactttggcatatagtaatcccaaggtttgctgagaccacgtgtcgagagagcacacactctttcataaatgtttctggaaagagtctgcccggccaagtgttcgaatcacagatccaatgctagtgcaggtggatctccaatggtccttactgtggtttgaagccttctctcttgtaagaagccttaattcacagtttcattattcatggcttcccaggatttgagacagagactgtatatttaattaactctttttcctgaaaatgttagcattgcattcttactgaaaataaacatgggttgggttcattggctcacacctgtaattccaggcacaggagttcgagacgagcctgggccacacagtaaggccctgtctctattaaaaaaaataaataaawaaaaataaataactgaagtcttgaaaaccatctgataaagggtattgtggattgggttgagtgcctgtgagaaggcttgacctctgctctgacttgaaagcagtttgcagttctaccctcgcccccgcccaagtgaaagccctcagttctagtaaggagacacacagaagagtgtttatttgtcatgctagttttttatgacttggrcctaattgccatggggattaatgtgaccagtttcacattggtacatcaagtggcatcctgtgcaatctgctgatgatttaaggaatacagttaaagtaagcacatagaaaacaatgcttctccaaatgaaacacagtgagattttacataattttatttgctttcttgtttgtcacctggacaaagaacagctctgttttgtgattatacaccctgggaggtttccttggagtgagttctgaatttgtaaatcctaaggacttaatgtatgcttctattaatttgaattgaaacagaggttcccatttttaacacaggaaaataaatgtccaactgacctgctagcaaagacaagttctaaggtagctgatatcatattcttcaagtattcttcttttcctggttagcagttttaaatagagaacctctgacatccacagcgcccaggctgaatgcagaggaagctgaggaggcacaaagcatgacggctgggcctctctcagaccttttctgacattctttaatgtttcttttccatagacctgtggcatgaatatagaatgcaggtgtcaaggatgacacctacttgatagtctctctaaagcaaaccttttcgcaaaagaaattcttgacagttctgagatgctaagtcaatttcaattccaggctgtgtggaaaatggaatcttttttctgcaattgatgtgaaaattgaaggctactgactattcactttctaataacacagggtaaataaatactatcgcaccattgaaaaatgcacttagaagacaagctcagctaatgatattcaccacaacatatgttggaaatattccttgtgaatgcttttacttgttaccattaaggttccatattgtttacattaaatataatagatcaagtacatgttactcctaaatgtacttgtatcaagccacaaattagtatataaaggtaattgttttgtcctgacaatcttttaaagaattcactgggggatctctttcctaattgagcgttgaatggttttcttctgacctatgtttaataatagccaatttagaagcaaaagactaaaatcagattaaattttggatcatagtgaaataaccaggtctcctattaacctctctgcttgcagttttttttttttttttttggatggttgatccttttccccacttgcatctcatgctttaagccaagagccaaaccattctggtcctctcttgcctcctgcaagcaattcataattctttctgcatcatccatgactactcttttcttcttgggggggcgggggggtgggggagatggttgaacctctgcccccacctccatcccatgctgtaagccaaggccaagctcccaaaaaaccattctggtcctctcttccctcttgcaggacattgccccaacaatgtttaattatttcttctctcttctaaatccatctgatccatctgtgtctgcctttttttttttttttttttttttggagacagggtcttgctcagcaggagtacagtggtgcaatcatgcctcactgcaccttgaactgctgggctcaagtgatgctcccacctcagccttcccagtagctgggactacaggcgtgcaccactgtgcctactactttttaaattttatatagaggtgggatctcactttgttgaccaggttggtctcaaacttctggcctcaagcaatcctctggcctctgcctcccagcatgctgagatgaggcatgagccactgcccctggcattgctcttctctctacaggatcattcacattgttttgcaccatgctgttacctcctccatcttagagaaaattctctcttagccctacttactctccaactacgatctcatgtcctcttgcccaccacagcagaccctttgatatatttgctgtctcttttttccgattctctcttgaacttgcttcaatgaatccttcaccccttccactcagcaaatcctgttctcgtccaggtcaccagttcctcttccttgggaagtcggggtccattttcatccctcatcgtggtccactggcagtacccagcatgttaatcatggctctcctttgagaccaactttgccagctttccctcctcctccctggcctaccctgtcttgtctcctttgctaattctgtgccatactctgtcctccaggtcttgtgccccaggtgctcagtccgaagtccttttgttttctctttttggtaacacagaattttgatattctcaggaaacagcctttgtgatccaaatacagcctataggcagatgactctcaaattcacctctcctgcctggacattttcttggaactcttcatttgtagtttaaccatcttcttgacacattcacttggagatcaaccagacacttgaaacttcacacgctcccaactcactgctggattccccctccccgcaaactgctcccgcgagccttccctttctcagataatggcagttctgtcttctcagttggttagatccaaagctttggagtgatccttgacacctgattttcccttatgccccacaagcagtttaagaatgtataaaagcaaaagtccattagctctgtttttggtacacatctgcaatcctacttttcagcccccagtgccgctgttactgtgccccagtggtccaagctctgtgtgccctcttcctggcttaggcagtagccctctcactgtgctccctgcctcaacccctgcttcctgcagtttattctcaccaccacatccagaagtcacttttccctcctctgttcaacccccagtagccttcggcaccactcagagcaaaaaccaaatccttagggccctacagaacttggtcccccaccccagcctctttgaccttgtccctaccgctctttccttcagtaactttactcttccctgaacctaccgggtccactagagccttttcccttgatcctgcctctacctggaatagccttttctcaggtattcctaggttcactcttgtacctttaacatctttattcaagagtcagctttttagagggtctagccaaaattgcaaactctgctccctctcaccctgacacttttctaacccactttttggcatcatttttcacatttgcactcctacctgagctatgatagatcccactcatttgatgtaaatatacattgacattgacagagaatgttaacccatttttcccctgctgtatccctggcagactgcatgatgcgtccatcatcagtgcccagtaagtgtaacagatgcccattgccaaaccccttcagtggccattctctgcctctgtgtctgaggcctctctgaagtcttggaaggcagctctgtgtttccatctgtgcctgctggatgtgcccaggaataacaccttggagcagccttcaacgccagtgtaaatgtaccccagtctccatggcccttgggtttatagcactaagtcataaggtctgcactcttcaccctcagaccaggagcttgttggaaatgtggaatcccaggccctgcccacatctgctgacattagaatgtgcagcttaacaaccctggggattcctgtgtgcatttcaggtcgagaggcagcagcccctaccctgctcccagagtttgcctgtggggttgtgttccccatacccacagtttcacaggctcggtaacatccctttgtgacagcctttcctccccactgtggcatctccacttctctcccaagtgtttcttcccttaaaccactgtcctgaatccttgtcccagggtctgcttgtgattaaatccagactaaaacagygttgagtgaatgaataaataaaacttttgagccgggtgcggtggctcacgcctgtaatcccagcactttgggaggccgaggtgggcggatcacgagttcaggagatcgagaccatcctggctaacatggtgaaaccccgtctctactaaagatacaaaaaaaaaattagccgggcgtggtggcgggtgcctgtagtcccagctacttgggaggctgaggcaggagaatggtgtgaacccaggaggcggagcttgcagtgagccaagatggcgtcactgcactccagtgtgggggacagaacgagactccgtctcaaaaaaaaaaaatacttttggaatcagcggtgaatagtgtatgctggaaacttctgttgggggtaattttgcaatttatgacaagtcttcataccaggacaatgctggcgttcccatctttggaaggcaatgtcactgccgtctctgcctttgtatacgtacatacctgtgactgcacacacagtccccaaagagcagcctttcatgctccatggatctacgtcatggtatttgaattattgttattattattttgagatggagttttgctcttgttgcccaggctggagtgcgacggcacgatttcagctcactgcaacctccgcctcccaggttcaagcgattctcctgcctcagcctcccgagtagytgggattacaggcatgcaccaccacacctggctaattttgtaattttagtagagatggggtttcaccatgttggtcaggctggtctcaaactcctgaccttgtgatccccctgccttggcctcccaaagtgctaggattacaggcgtgagctgccacgcctggcccggtttattattgaagttcttttattctgctaaaaatagccatagatgatttttgtaaattaaaaaacattaattttgattttttttttttgagacattcttgctctgtcgcccaggctggagtgcactggcgcgatctcagcccactsagcaacctctgcctcctgggttcagtcagttttccctcagcctcccaagtagctgcgattacaggcatgagccaccacacycacctaatttcgtagagatggggtttcactatgtatgccatgctggtctccaactctggacctcaaatgatccgcccacctgtgcctctcaaagtgctgggattacaggcgtgagctaccgtgcccagcttaattttgaatttttttaataaaaaaatttttttagagacaggatcttgctctgtcacccaggctggatggagtgcagtaacatgatccttgcaaccttgaactcctgggtgattctcctgcctcagtctcctgagtagctgggactataggtgcatgtcaccatgcccagctattttttwaaattttttactttttgtaaagacasggtctcactttattgcccagggtattttcaaactcttggcctcaagtgatcctcctgcctggcctcccagwctactaggattgcaggcgtgcaccactgtgcccagccatgatttaagtattctctacataagactgtcagaaaagataattatgattaccagattaaacattccatgttgggaaattccctgttttcaggctgaggattgtatagttgagtggtgatagatttaagcaaagagttcgtgttaaaattgccstttcatgtctgcctacgcctgaaaacgtcagagtctaggagttgtgtaagattctgtttctaaagaagtcaaaactggttttactccttacaagctttgtgggcagctgctgcagagcaaatgagcaggtggaaggcctcccttctgaaggccccagccatgggccacttacagacaacctctgcctcgcccactggaggcgctctggggtttccctttcactaccgctgctaggtatccacacatttctcaagaggcaccagggcccagcccatacctggggcctggaatctgaggtatgccttgacaggctgatgacaacctcaccttcttagtttcttctcccatgacatttataatatttatattgtgccttccatttcttttataatgacaatattatctaacaatgttagtctttttttaaaaaaaggaaatgaagaactttacagtctctgctcatacaaaggaacagatactttgaaatgaactgaacagatactttaaagtgatggaaaccaactacaaaatttttctaacttgctatattaaggtttctcaatttccactctcctggctaatttagaggatgatctattatcagtttttattccatttctgattttgtcaggtggtatgttggtcattctgactttttaaggcaaacaataagctatttctcatgtagccaatactgtggctagcagtcagcattcattcattgcatgttgatactggtggacactgcagagaacattgttttcaataacccctttacacctcataataaccctataaggtactaattttagccctgttttatgaatgaagaaactaaaacataaagktgtggagaagaacttaccaaggtcacaaggtaattggtggtagagtcacaccgaatttgaacaatggtcaacctcaaaggccgtgttcctaacactctcctgcaccatctgagccgtcttacccttccgggtaggttttgccacccctaaaacctatgtgggagccaagattgctatgcgacatggcattgctattgtgagtgctatggaaaaaagcactcacatgttactagcttggaaatgcagaagttagtattttttgaacctgactttcacgttttattcctacttgatttctatagctttctctgtctatggtctcttctcttcccaaaataattcttttttttttttttaattttgtagagatggggactcactttgttgccctggctggtctcaaactcctggcttcgagtgwttctcccacctcggcctcccaaagtgctgggattacaggcatggaacacaatgcctggcaccaaaataattcttaaggatttttactgctaatgaaaaacttaccagctgtctcattcctctccctcttcacagactctcagacctgtctgtgtaggtgcgatggcagccatccctgctccagaacacaaacgaggacgattttaaaacaatgccctctttcctccggctctcttccttctaggtggctctgtgctgcgcattccctgcctcttcctgttcccaccctcattttcccctttccttactgcatgccacsttgtacctctatcttgctccaccattgctgcctctgatttttccctatcaaaacaattatgaggtcttttccgcagactgtgttagcagtttttgcatcctctgctcattcctctgtctccttgtcttcctctccacctcagcccatgccctgtcagtgccgcccagctcacaattgcctgatccttggtgggtacactggctcacctctcagggctttgctccttgggaggctattcaagctcagcatcacctgtctcacatctgtctgggatcctcaaacctgacctttgtaaatttccactaactgaagattgtagaggaaaaaaaaaaacatcttaycgaattcctgctcttatagctgattttagctattaggaaaacatcccaagttgagcttttctattcctagaatttcagatttctttcctttttaaaaattttatctccttttatagtagtaaaaatattttccttttttttttggaatggaggtcttaagctcagtgtcaaaaataaaatcattttcttaattgagaaagtgatgacatctgtttaatttatctcaggatatcttgattctggaacaattttgagaaagtaaagtttagatcaactgcaagtaggtactctaacaggatggaaattttccttcgatgttctttctaggccgtagcaatagccagttgcctgatgttactttgagcacagtggcaaagcattgataatcacttaggcagaacacattcacataaagttttacctgccttgcacaaaaaaaaaaaaaaaaattcacctgggcagtaaaataaattctgagggttttatttttcacctggcaaaaatggtttctaatgatgggcaggtggattttttttttttwwacttggttttggagcaggtgtgatgattttagtaattgagaggtaaaaccatttgtttcatacattcaacaaatatttactggagtgcctactacatccttggcagtgttagaggtgttggggatttagtggtggatacaggagacgtggcagtcactgagtaagtaggtcctgctccagggcctcgtgaaagggagatggggacattgtgggaacttgccacaaatgggcctagcgcagactagaagccatctgccttcttctgaaaaatgacattaaaacaggtctgaaagaggttttgacttctttctctgaactcaaaggggaaaaaggagtgttttgcagcagtgggatttaaccttttttgatatcatctgtaagaagaaatacatcctaccttgcaacctcgtgtacaggtatgggcacagatagctaaagtaaacatttcacagaacaagtgatacctgcccttctcagtgtgatggagtgtgatgtatttattgagcagcagcatagggtagtggctaagaacctaaactctaaatttagatgtcctgagttcaaatcccagctgtatgctcaccagccttgtrtgtggggccagttaattaacctctttgtgttttacttttttcagttgtgaagtgtggataataatggtacctgcctcacagggttgttttgaagctaatgggaattaatagatacaaagcattttagaactcctcctggtacaaagtaagtactttgtgggtattagctgctgctgttgatactaatattctgcaattcattttttttaaatggtaagtaagtgccactaaatcaatttcaggtcttcagtgagttccaaaacaaaatttgaaaaacaccatttagatggtggaaatcctctcggyttgcgagggtgggatgaggaacctggaggcattggagaggcaggtggcctctcataaatgactcgatatggcttgactctgctcctaaagatagtgggtagccattcaagagaatagcttgataaagtttacagtgtttagaaaattaaaagattcctctaaccacagtgtgtagagtgaactgaagggctagaccagagtgatgtcaggaactgtgaggcagcttttgtaaaaattgtggccagtgatggaggtagccgtagggacagagacatatagatgtatttctcaggtagactctaggggacttgcttatttgatttgatgttaaaaaaaaaaaaaaaaaaaaagaaaggagaaagaacaataagaaagaattgccacagttttagcctggtcagctgggtggatagtcacacaccggctagtaaatactggaagaggatcctatttggaggacatgtgacatgttgcatctcataagcctgtgatatgtctacctggagggaactggagggtggaagagggggaagggctggcactgtagagatttggaaatcaaagacatgtcaggtggtgcttgcaaccatggcagtgtgagtgaacagatggtctgggaagtgcgtatagagggaaggagtaatagaaggtggccagagagagttctaaggcccctttgaatatcactggcgctcagggcaggaatggggcagaggaaggagctgttggtaactgagaagaggccaytgcagagagaggaggaaaaccaaaagagtgcagtcactaaagccattaaagcaaggatgtgtttttaattaattagaatgatgtggtcaacattgttcctgctgagaggtcagaaagtcctcctggtcttggctacatggagtgattagtcagtaggtgtcaactggacctattttgaagggttacccagcactctgtgatatacttgaatatttctatatgatgcaggtgtggctagcatctctgatgctaatgcttgttcaagttgagaacatcgcatatccctgttttaagaagcagagcttttttcgtggcactgtgatacaaacacaagcgcaaaacctgtgccagatttccatagtttttgagcaatagaaatgaccttttaggtgacattargtghatcctaattgcagattctcacaaaggattgtagctattaggatataaggaattaatttgtaagtacttaacaaaagttgcaggaaaaataaatttggtgattgattttgctgcctgtaggatcacttcttaccctccatggtgagagactgtcattcactgtctctgcctttctcttgtatgttgggagttgtcctgctgaacacgaccttcctagagctatctgtgggttaaggatcttcgtggcattagctactctaaattagctgcctagttccagtcttctctcatgcttacagaacaagaaaagtacttatagtcagtaaattgttttgtcaaagtccaagctttaaaattgcccccagccctgccattttttttttttttaaacaagatcttgctctgtcacccaggtcggacaggctagagtgcagtagagcaagcatggctcactgcagcctcctgcctcagcctcccatgtagctgggaccacaggcatgcacattcattcattcattcatttatttgtagagatggtttctcactttgttatccagggtggtcttgaactcctgaccttaagtgatcctcccatctctgcctcccagagtgttgggattacaggtgtcagctaccatgcctggccaaaattacctttttaggaagcttttcttttccaatattgtgacatttaaccattataacacataatcaggagcccccactatgtactcrcatacatttccagactgtgttttcccagggtttgttttttccaagattcgtgaatgcttctattcccatgacttccaaaaaaattgtaatatactatgatttgtggatatctttgtttttcagggcaacagtgtccatctttcatgtctatccaaagrgacataaagtccttggtatgttcaaactattaatgtgarctttttatttgtacatgcatttttaatttcgtgagtcactctgtgtatgatgtactctccggttattgcattcggaaacattttaactggaattatttctgaaagtgtatttcccaggaaagtgtagacttatatgtttttcctactgtgacacaattttgattttcttttatattttcagtaataaagtattatgaactaattattatttttaaaaaggtagaccatgtaaccagttagctattgtttggtaattttggtaatagttagataccattacagtctttaaatgggttaccactaagattttatctttcttaattttaatgaacaaacagaaaaatttatatagcatttttcctgtggaactcctttttcagaaggtcccacattcaaattagttttatccatgcaggtcttattatcttttattctcaaagttctatgctttactctttggctacactcctgtctatstgacagaatttctttaagcattatttatcttgtaagacagacattctctgagtcataaaagcaacatttttatccagtttccatttagtctggtcagcaaagggaaaagacctctccctttagaagtgtcttccaccgttgtctatacatacagctggtggacagccgtctgattagagagaaagctcttattaacagccaacataatagaaagtgcatgaagccatcaccaactggagagtacccaaatagcatcagaaacaatgaagagaaaatgaaaatcagttctgactcatggattgttgttttccttttgtcttcagtactgacagtctttgtcagctggaatagcagccttggcctgaatatctattggtgtttatttgcagttgtctcaattagttctgctcttagccttttgggagrcactgggctcctcctcgcactctgttggccactgtgggttggctttgagggtgccatcctgacaaaatcagttgttggggactataagactgaacaagttaggtattgatctgaagatgggagcatttccaaagatgttacaaaggatgtattattttctctcactgggaagccaaatagatgaaagcagacactccttgcttgcttatctccatgccttgatctgtaagaaattgtcttggttgtagcacagactcaaatacttgtggcttaaacaagccagagttttattttctctcattaagtctggggattggaagtccaaagatcatatggtcgcctcagagtgttgtcagcatcaccacctcctttttattcaaccatccttaatctgtattttattgttgttatcattttaaatcgtggtgaaatatacctaatatttaccactgtagccatttttaagccgtttagttcagcagcagtaagtgtgctcacgttgttgtgcacttcaccgccaccattagtttctrgaacgcctttcgtcttgcgaaactctgtacccatcagccgctatctccccagttccctcttcccccgtccctggaaaccaccactttactttctgtctctatgagtttgactacttgagctacctcatataagccgaatcggtatttatcttcttgccattgattgatttcacttagtataatgtcctcaaggctcatccgtgttgtagtgtgtgtcaggatttccttccttttgaagctgagtagtattttattgtatgtatatacgtcattttgtttatccattcccacgtcgatgcacgctagckgttgtaataaggctgctgtgaacgcgagtgtcttaacatgtgtttctatcctcagtgtcacaactctcagagttacaactctagctaagtcagcttctttctctggatcttttccagaagtgccactcatcagtttctgtgaaccagaaattaaggataacaatgataataaaatagctcatatttatttagtgtttttatgtgccaacacacagggctgartaattcatttcatcttcacaataaatctgtgaggatggttacattttaccaaagaggaaattgaggtttaaagaggttaaatgagttgcccytcacagccagttaacagcataatgctaggaagaggcagagctggactttgaacccaggattctggctccagaggccatgctcttaactactgtcttttatcttcagctcctgttttcaagggaagctggggaatgtagtttaaatcccgaataggtacatttcctctcccagccacatcagggttttactagtaaggagaaagaagagaatggatgttgggtgagcagcttgcagcacctgcctctctagctcactgctctgaagccmggtggcctcgggcctctgaaagtgcagctgctttgtaactctgggctgctgtccacccttactttattgtgctggccaagactaaccatcactggccagatcattttcatttaaccaaaaagacccacaacagaccacaaatgatggaaaatgctaccactgaaatggtcgtgggcttccaaactgaggtagactagagtagctacctggaaatggaggaggagatgaatgtttagatattcttgttaggaaatagtgtctgttacatattcagtgatgatttctgccagcagtgtgctacgtgttttaaaaaatgattgcattttatctttgctattactattttttatacagtagttttattataatttaatagtgccagttatcacacatcaaataccccaagtctttttgattttagagttaagctcttatttatttacttacttatttttttagagacagggtcttgctttgtcactgagactgaagtgcagtggtgtgatcataactcatcacagcctcaaactcttgggctcaagcaatcttcccacctaagcctcccgagtagctaggacgacaggcgtgcgccaccgtacccggctaatttttgcatattttctagagacgtggtctcactgtgttgtcaggctggtcttgaacttctgggctcaagcagtcctaagtgctggaattccagttgtgagccacaacacccaggctgagtgaggctgtttatcatggtgttttaatgttggttgtagtgacctaggtgtctttttagtcttgtgggtcttgtttgttggtcagttggttggttggtttttaagagatggttttgctctttgcccaggctgttctcaaactcatttgacctcagcctcccamgaatctgggattataggaacatgccrtggtgcctaactctcttgtgattactttgaaattatcccccaaagtattcttgttctagcatgttagatcttgtcttctgggacttagatggaatgctttgatacttttatatctgatactttcaagcccatccaccatcagcatgtactgattgttactctgtattgagaaataatcacatcatgcattttggtagacgtttaagagtccaaattacatttcccacatccacgtattttatagtctagttaaagattcttacatagtgatctttataaagttcattttaatataattttagtataataaataatgagttggtcaggtatgagctcatgcttttaatccaagcactttgggaggccgagacagggattgcttgagctcaggagtttgagaccagcctgggcaacatagcaagaccttgtctctacaaaaaacttaaaaattaactgggtgtggtggtacgtgcctatagtcccagctactcaggaggctgaggcggcagaattcttgaacccaggagtttgatgctgcagtgagctatgattgcaccactgcactccagcctgggcaacagagcaagaccctgtctctagtccaacatgttctttgtgcaaaggctaatagttgggccatcaataacttattttaaaatataatatagtttacttcatgaactcttaatgtgtaaatctaaatgaagaacctagtcattgaaagcagtggaggtaaatcagagagagataagtatactgtagtagagagaatttgggatttagactttctagccttccctgcccaacccagctagctcagccccatcctgccccactgcctctggcatttaaacatatcagcctcagttttccttctttccgcgttcttcacatttaattttaagaactaaatgaaagaatgggtatggaaggcttttgaaattttaaggcagggtacatctgtctgctcatgttgttcactaagttcctcttcacagggttttctacccttaacttaattatgcctgaattatttcctcaatagagtctctgaactcctttgctaaaaaaagatatataggttatttctacccrctgagatttgtgtatatactgtccccagtgaagtgagttttgctaatacgtcatgagtatacacactagtttagacaagatagtttccacctgcagccagggaaaagcaacataatgatatcctgcaaaagcagctctgactggaggagactcagaaaatgagactgaaggcaatgatgaagcattgccttcagttccaggattccgtcttggataaacaggatctgcttcccccagaactttacccttgcttgtgatggccagtgagcctgtctagggactgagaccacacagcaggcagtgcagacgtgacagttctgagaagatggaaatgggatgagaggaattccaggccagtgcacaaatcaacaagttgtatatttggacgcttgttgaactatttggtcaaataaggaagaatgtggwggtttgacatttgccgaatttcttgtcccttttacatgagcagcattcagactggagatgagacaacacatctccgtgttctgaccccttgctgcttcacccaccccaggatttcagatggtttcttaaccacagttgagtcgtaaataatatttagtgctgtacatcctggtagagagaaaccacagcacaaagagtgaaggatcttttctggaagagagccattgacattttttttggtggctcgccatcattttctgtatgtgttttttaatttttgagtttttgtggaggtggggtgtcactatgttgcccatgctggtcttgaactcctgtcctaagggatcctcccacccctgtctcccaaagtgctagtattgcaggcgtgatctaccatgcccagctttctctgtgtgttaaactctccaggatacaggcatgctgcacagatggtgactttaagcaaatatgtgacctctagtccctttttcttcaaaagggcattgtgacacaggtagatggcgggtgtttgcctcttgacttgaacctgctccctytgtgggaatcttttctttcctgttctaagaattaggtttagtttccaattcttagcagtttktccacagagccctttattgggccttaaaaacatgtcagctccctaatgtagaatctgaatatgcgaattaacttaaagataaataaaaagaaaatctgcacctcttaatttactctgtagagagcattcgctaagaaatgtgaatcaaaaggaattgtttcctataatcaacagaaaaaagtgctgacggtcaccttaactttacagataatgagatctttagggaagctttaatctttcaaagtttccagaagctatgcaaagagcctggggcttccccaccaccaatcccaaaactttaatgatcacattatttgtctgtctttgtgactttcgtctgctctatgaacatacaagggtaagaaaatatttgaaggtgtttccgttgctgtaacgtatgtatgtgtatcacttcctgtcagtagttgaaacatagaatttgaatcacaatgcatatttaattgagggtggatgtttataactcaaacaaagatatccttaccttgtgcgtgtgtttgtactacctcataagcatttacaacctggatagccatttgattaagtaggcagatggcaacccgaattattatctttgttactgaatacctcctgttgtttgtcctcctagagaaaggtgtgtagtgaaatatcattccaccttttcctttttcttccttcaagtgcccttttaaatggatgtgtttttgtgacttaggtctcattagcatttcttatggggactgccttcagggcagtaccacttactaaattgttcccttgctttaggaaaaggaaaaccatggtaaccagatgtagggtatgattatttgcctctgacctggcaaagtgttgggtttaacaaaagaagcttaatagaaatgttcaaattgacccttctcatcacttgagctgcttaaagctcaatcaatctctcattattatcagagttatttgagcaaaggcagcagtgatagtatttttcataatcactccttgagccaaatgtaatttgcaatttgtagtattgtattatgaaacaataatgcattaaaatgaacagcacaagaattaggaatatagtcataaagaaaggatccacagaartagttgtgtgaaagacactctccaaatcattttaagtggacatgaccgatttcaatgccaaattaagcatttagaaaaatcagaattctgtgcttttactatatttaaagtatatatatagtatgtttgtatatattttataataacgtcaatttagttgggrgaaacagaaatataatgtgattattatttgcatttgggtatttggggttatggggttagtgtggtttgattacctgggtaggtataatttgaaaaaaataaagtgcatcaagccaaggtatatcttttgcaaagagggaatattttgccgcagaaattatgtcttcttgtctatcagctagttgatgtccaaaaagcttcagcatcataattaagatatgctttcactcatcttctttcattttactagaatggctgtaagtatagattatatgtattatttcagtgatttgtgtatttatcttgtgttttgaaggattactgtgtttgcttttatttctcttaaatctttatatttgagtcccacagttttttgtttatttgtttgatttttagatctgtggagtttgtggtgattcttgtaaagtcaaaattgattttgtgctcggttccctttgtcccccctatttccaattcctcatctattgctttaatatttccttgttccatatggttctaggacttctgaagtgtcaggttacgaggcatatcagtgcatccttgattagctaacacaggctatgctggagtaggagtgcacttataaggacatttaatgggagtcctgaaagggatatgttattcattaaggttgcattgcacatttaaagattgttctagcttggttaagtagaaggtgctttttctttaaaaaaaawaawaataataataaagttacctctttttcccaagatgccaagcaatacaaatttattttatttaaatctaatcagattggcactgatgaaaagtacacaatcaaataattattctcaagtttgtgaatttccttttaaagagaacctctgccaaactccaccaacttaaaacagcatcctgtcttacaaaagcgctatcaagttgtcacgtaccctttctaaggctcctctctcatcattgttgattaccaagatgcttttttgcctaaataggagctttctgcttttcataatcaacctcctcttcgctgattcatccagcattgccacaatctactgctgagcaaatcagtactctttcatggtagcgatttcttaaaatgacactaaaatatgtaagatcctgtacaggaaggacatattagaagtgacttattttcttttcctttttcccatttgtaaaatggaggctgaggtacaaaaaatgtggccagaatccatgagcatgtcattacaaatgataactgcatgcagtgaattccttgttattttaccctctgaatgggtttgggcagtttgacgtgcttctgctgttgcctgacagtatttgcatatgtcagcacagatgattttgacatttggagtgtcactgcatttagaaaggttggcaggatcctgtgaatgggtatgtgggcagtttttctgatcttttgcaatgattaggagcagttcctgaccttgccttcaaatccctggccttcngagataagttmtattcaggaacaatgtcctttggacctaatttccaccggcaatgcaagatttactcattgattgatggtggagagggtagcctcgctctgttgcccaagctggtctcgaatccctggcttcaagtgatcctcctgccttggcctcgcaaagtgttgggattacaggcatgagccagtgcacccagttctatctcatgtatttaaacatagatttattaaccagctactttcagtatgagagcacagagtcactgtctttggttcctaaagcttatgaggtgtctggctgtggtaaaaagtgtcttgggtatgaattctagctttgctactcactcactatatgacctracaaatccttcaagcccctgtgcttactgaggtttcccctaagcatgaggatgataacacctgtcttgcatgctggttgtgggaatcaatgagataaaagcacataataagaattcaataaattctagctaagtgtaattaaataatcaaaagaacattcaacaagtgcataattatgtctcacttaggaattacacaaagtgaacttcataggtcttggaatttcattttctcttaggcatatccaagttcagaccaattaagaccttttaaactagctacaagctgaactgaacccttgtcctagcttgcagtgggatttttaatctttgattttcagaaacatgtggacatacatcttcagtgcatatggacaagagtgtagtaggacaatctacaaagatatatggctagattttttttcctttgaataaaatctatagcaattacctattaggactttaagcaaaagtaagtttgttattgtgttagagaccagggtaattggttgagggaagttagttctgcaccaagaatgtggaaaaagcacaagaatcaattaaaagtttcccagagaaacttggatcaaaaaccatttaggtgatgtatgactcagaggaatagaggaatgatatgaaaagttcatgggtttgttttgatttgagtgaataatgtgctctggactatgcagagaactggattgagacacaggaatgacacaggacagggtatgtgcttttgctgtacaggatcttgaggccagctcattgggcagctggtatctstcaaggatctttaggacaaatgacagcattaccacagctggccatggtcaaagacaggttatgcaatggctgtacaaacacatggtcttcaaaaacatcaggaaagttccagaaagaaaaaatgaattcctgaagaaagggacagaatggatcatgtgatagtgcaaatatgtagaaatgagggtcagacacaaggcagaatactgaactagtgactatattgaccacgccagggcaggagttgggcatttgcagaggatatgtggcttctggtagctgacattgaactcatatttgattcattttaaattctcttccccagccaagcagtatcacataacctacaaatttctttgggtaaatagacatgcggtgtagcaaagacttcttagacatgaagacctaggtaattagcagtgagaaataacagatttctaggtgacatttcagtggggtgttttgaagaaaaacttattttaaagactattgctaaaccttacaagataattggttccggatattctgttcatctatttttaaatatggcagcagatttttaagacttttttaaaaacactgtatcatgtttcaaagtatggtattaggaaaaacacattcattacaaaattaattgtatttttatttatcgcaggatgctatgcattattattccgtgtaatttttttctaaagacctctaattttggtagcagcagaaatattactatttaaatagtaaaatatttcaatagtattcatactgcagagagaattatgttgctttgctgaaaacccaaatgatggttttaatagcaaggaaacttgccagtagttacttttcaatgacayttatttcattataaaaacagtagaatttgttgtcatcctttgttgtcattttgtttgctttttgctwtccccattcatcctccagttcaggttttgtccatcattgttgactgtaatggtacatatggctgatctggcagacagcagtgatctcatttgtaacgcrttattgtaaaacccatttagcagattagtttgagattacgttagctgaatgaagacattgctgtgtcctttatgaagaaagccatacatttaagacatgttagaatcaattctgctctgaataagacaggattagctcactgcatctttctgtgaaggagtttctggtggagtgtggcatttttaaaagtgtaccttcactcctaatgcagcactacctctaagcaactaagcaatttttcatttatctcaacattttaaaggtattttctttttatccctctacttattattattattattattattaagatctggccagatgcagtggctcacgcctgtagtcccagcactttgggagtctggtgcgggtggatcccttgaggccaggagtttgagaccagcctggccaacatggcgaaaccccgcctctactraaaatgcaaaaattagccaggtgtggtggcgcacgactgtagtcctagctccttgggaggctgaggcaggagaatcacttgaacctgggaggcggaggttgcagtgagctgagattgcgccactgcactctagcctgggcaacagagcaagcctatgtcccccaacaccctcccctcaaaaaaagacccgcagggacaatatgggaaaccgcatctctaccaacaaaaatacaaaaattagctgagcatgrtaggtaccatgcacctgtagtcccagctactcaggaggctgaggtgggaagaaggcatgagcccaggaggttgcagtgagctgagattggattgcaccactgcactccagcccgrgtgacagagtgagaccctgtctccaaaaaagaaggtcgttcttctattttaatatgacttaaggcatgactagcaaattcttcctgaggtaccagtgtaggtggccactttacctttcagcctgacacctgctgggtagtaaagttttctctttgaacgtttgtgtgagtcagagcagattgcaaaactctgattctgtgctgagaatgggtttggtcctggagcaactattarcacagtatttcttcagctatgctgtttcttggaaggtggctcatctgacattcatccatggcttttaaaagataacatacaaataattgatatcttccaggtttttgagcattttgctattaagtgattgtcttcataggttgattgccratttcagctgtgaaactgtctttgcgagtatatgtataggtgaaatttttcaatgactccctccccttttcaggaattaagcaactataaattaggaagtacagtaatattggctattagggtgaatatgggtatagatacttttttttcttttttacattttagaatggctagtgtattttttatttacagttgatttcatttgtcagaatattacagctgtgagtgatccatttttgtcccaattataaagtaatatgctgtgattttatagtataccttaaagaaatcacataatttattaactaaagcaattactaaaagaaatgtccaattctgacctataaacgttttacatatggtttctttaattttcatacattcatcttgaatctgtattctttttttgagacaaggtcttactctgtcacccaggctggagtgcagtggcacaatcatggatcactgcagcctccatctcctgggctcaagcagtccttacacctcagccccttgagtagctgagactacaggtgtgtaccaccacacccagctaatttttgtattgttagtagagacggggtttcatcatgttgaccaggctggtcttgaactcctgaccttaagtgatctgtccacggcgacctcccaaaatgctgggattgcaggcatgagccactgcacctggccaaatctatactcttaaaaaaggaaagtgcgttataacagtttggtaatacatttacaaaaaatagttattccagtgattagggggtggtctaggaaactaattaatattttaataccaaacacagtgggaaaatatgcaatccttaggtatgaatcaggaacctactctttaaaaaatgtcatacgtacttaagagaaaaagatgaaggttgattgactgagttcatatatatatgagactatgtgggcaaactgaaaccttcttaacaatgtaggaccaataccattttctacaaagattttaacatagctaattaactcaacattagcttttggctgaaaatatctacactgttttaaaacwtgcaaaatcaaccaatctaaatctttcctcaccattactaaaggagcatatgtacactatttcttaaagactaaactgtaccttttggtacagatagagagtagattgttctcggtgtcacagcatggtgtttctcaattatggtgcagagttgtatttctatcttttgggatgtaggaatgtgagccagcacaatgtcttaaaaatcagtaagtcaacatggcaacattgtatcatttgaaagatttatgaacagaaacactaaatggttcaaatggtttaccttcggaatacctcattataagtaaaatgatgtattaaaatttgaacttatacttttctggaagttaggatttgtacatcttatacttggagatgcctcagtgttgcagaacttccaggaygaagtgaatgccctggctttaartgctgtctgctgacactcagattaatccatcccgccttatgctgtcccttgaatttttgccgttatgatatcttcacccccaagtcctccaaaccttttccttccctggccctgtatatcttgctggacggtaactcctttcttccagttgcttggctaaaaccctggaatcatcagtgactctctttccctaacgtccatgacctccccatcagcaaattttattggtgctgctgtgaaaatatgtccagaaactaagcacttctctcactgtcctccattaccagctggttcatcaccatagcctcctgaccgttctccctggtttcaccttttcacctgcagttcttcacatgcatccagggtcattaaaatgtcaccagtgctgctcctctgttccaaatccttcagtggcttttcatgtcatctcagtaaaatccaaaatccatgtggtctgccccctgatgctgctcttcttcatttcctgctgccttctctttttctctcccattctagccctatcactggaataggcaagaatggcccttgccattcctcaaagacactcagcctgcctgtgtctcagggccttggcacttgcctgctcctctgccttgctgactcatgccaatgtggctggctccctctagctcagatctctgctcacatgtcgacttaggagagaggccatcaccctccccgtcagtcctggtctccttactctgctttgctttcccccttagcactgtgcagtctgatgttgttatatgctaattcgttacctgartataagcagtagaagctctatggcagttgaaatgacctaatgtgctctgtttactgtttatagcctgggtgtcccaaataagccctgactgcatggtagatgctcagtacatttttgtctgatgaatgagtgtgaagttttagttgttgacttctcctgagatgtatcagtttttaatattttttcatttattcattcattctgtaaagcccatcattatgtgtaattctgaggcattattgatatattgacaaaaatagtgcaaagtcttttatttttaatgttttgtatttattagttttaaatgcatagcatgtattttataccttgtgaaatgtggtcagattctggatttcagttctggagaattttctatttttcttttttgcaactgcagtgatcaaaaatttaattttaaggatagatttgctttataaagttaatttacagtcagtttttgattactgtataataatatatgtaatttttaaagtagtggtggtggtgttttaccttttttctgttttaacattttaagaatactttcctttccatatttagagacccctttcaaacatagtgttactttaatcaacagatgagatatgcccacatatactttaattcatatgtagacaagtattggaaatcagatttgtattaataaaaaaatcaatgctatcaaccaagccattaatagaaataattttttctcttttatgtcaactttgggacccttttctcctctctgtttctttctttctttyttttttttgaaataaggtctccctctttttcccaggctggagcacagtggcgcaatcacagttcacacagcttcgaactcccaggctcaagccatccttctgcctcagcctctggagtagctgggattacaggtgcacaccaccacacctggctgattgttttggtatttagtagagacgaggtctcgctatgttgcccaggctggtcttgaactcctgagctcaagcagtccttctgcctcagcctcccaaagcctcagcctcccaaagtgctagaattacaggcgtgaaccactgggcctgaccctctttttcgatatgaaattgtcacagtacgccagattgatgttattcttcagaaagaaatactcaatatactttaattatttctgaatgcttagttgtgtgactgtctataaaatatttcttttttgaaacatctggtgaccagtgcattacagacaaagattgcttatggatatagagtgcatgcattccaggcaatatggtcttttatagagaaaaataacagagcagggaaaggaattgataccaagtttgagtatcaaactgggatattttggatgccagaagagaataatgttagtgttttcttaaagagctcagcacccatctgcagaaacttgtgtggactgtttttcaataatgggtttgttccgtgtgtttgtttttgatcagatgtggatttataagtcatagatgccacattcagcaattgctttttatcacatttaggagagtatttgatgagaataccttaaacctttcaatttaattaaagtgcagtgtaaatgatctgttgtactttaaaccttgcaaacatggcctttgtcagtttttaaactatgatgaatgtttccaataagcctggctgtgaaaataaagaatagttgtttatggaaagattattaactagatgattgtggattatcattctttagtcctaagaaaaacccactccaatgcagatctttcttcctctagcatctaaagtattcagcacttagtcctacagatgtattaattgtttaataaggataaaccacaactcttgttgtttgtttttgttttgctaaaggaaaaactgctattgagatcatttccctcaagagttttctctgggaagttctaattaaaaatgaataaaataatctgattcaaaatactagtcctgacccaaactactgactgcagaagacacctgatccctgttttgaagaagctaacattcatttcattgggtatatgtcattaccacaaacaaaagaaagctcattttgtatatattgacaagttagaattttttgttattaacaggtttggcaaacatcgaaaagatgacaagattgagaaaacgggtaaaataaaaatacaggaatcctttacatcagaagaggagaggatacgaatgaagcaggagcaggagaggtagacttcagttacttgattaaacctccttagaaagaggttctttttttttttctttctactttcttcttttttaatgtaaagattttacatttaattactcttcatatttcctgtatcaacccaaatattgatggttgtgggtgaatatattgtaaagagagayttaaaaaaaaaaaccttatatgtatttgtgacatcaaagtggattttaattgctttagttaagatcttttgcataggaaatagaacagcatattagatgaataaataaacattaatactgaatttatgattttttaaaataacacaaaaagtacttaaaatcctgcctgatatatggatatttagtatattataataattttaaagaaatactcttctgaaaataaaactccgaagttttatatcacattttaaatataataagaattcaggaggctgttattcattatgttgtttttctttcaaacctgacacttatttcttgattctccttctattttaccatcttcacattttgtgacattttccacttaagttttccatgtcttccggatagattgttacctattgttgaatcatttccatgttgagaacttaaagaccaatgaaaggaatgaaaagagttactctaagcaggcactcgaaaaccgtttttctaagtgattagaatttttctcattataattccagggggtgagaaagccatctcacacttttgttattagagtttacaggttcacagtgagcttctctctgtcatcacatttcattttctgagcagccacagctaagaggtactatgcctgttttactttgaataatctgggatttcagtgagtttctggtaccttgatgaaggttataatgctaagtactgtccatagctaggactgtagcccagcatctttaagattaagcccagtattcctaccataattctaaagctaggctgcttttactctaatacttaatgaatgaaataactaaaaatagtatcctacaacagttttatttaaaagagattagtgtttgggtattttttcattcatccttctaatacctctgaggtttttcttgaatagaatggttactctgagtctctgtagcttttcagggtagaaaatgtatgtgggaaaaaatatggattttaaatttatgaagcaagacggctggttcctcctcaatttttatttttaaaaaatcatttcaccttgctttgtaggactctttctaatcctcatcaattttgggattcccaaacttattagtaaattcactatttttgggtttgggtgcatagtgttccttagtgtgtgtgccatagcatttagtgactcagaagtataaacttctatcctagaagagtttcttctccctaaaggaggagactataccaggtaaatgtgtgaactcagattcatccacaggcaaatatgtaatttacttagagagtaatctgagcgacagaaacattatacctcccctatatcttgatacctgccacaggggatagatagcttcattaatcctgtactatttttcatcttctaaacatttcttccttgcagtttaaggtgactgctatgtttccatgcagaattctatcaacattttccaaaatacttttatgatgcttagtcaaatatttccagccaaacaatgatttttacataatggtttcacttgtattattaatttgcctaaggcacagttcacttctcagttttgcttttaatttccatctctgtacctctaatgatgcaatacttctgggaactaggttgatcataatgaatttacaatgtacaggaggcctaaaataaaaatctttcagggtcaaggaataagtgaatggtccattaaaaagtcaattaggctcataatttaagaaaattattatactttgactttgtatttcaataacaactttttgcaagtatgttttatttaaacttatggattttgtaatagagcaagtgaatgcaagaaacggactgaactaggargtggagtaggtttggcacttgtattttaatagggcaagcattcttccatatgtcgttctttctgttctgtctgtggtattggcagtgttctttttgagaatggaaactgcagcttccttgaaaaaattttgactggagtaatcaataaaaataaataaaccactacttatattctccttacaacctttccctcactgctgactagtagtgaaatacctctcgggatattatttaccactgtagctatttgaattccaaaaattattttggctaattccatataaaaatagaaaacccaacattcccccatgagttatgattgtccacaaaccagaactttttttgcctgtgtacatctgggaatcttgaatattgctcaagatataaatattgaaaaactaaaagggctatgaatataattttaaatgttttttcttcaatgttaagatctatttagatggtgacaatatactagattgttctgagccgggtccaagattaagtttgacttcattcttgctaacttccttccctttctgtcacttgctaccaacactgtgaggttgggtcttgagtaaatgccatccatatgggagaaatggactaggaagatcactgtatggatctgtgctctgctctactagccctgccctgcctcagactagagcctccatgagtatggtcttcttgagaagcggggagtctgggcgtgataccaagggggaagttaacaggttttccgacatgctatttttgacttctcattctggagcactgaacctaggtaccctattttttcagagatgctgttggctacattggagacagactgagaaactaagcaaaaatgtgaattcagtgcttcgtgcctctgacttgtgtttcaggcatgcctagggacagcgcctctactggctcatttccaccacatgaaaggtttaggctccaaactcaaaacagaacatgttccaattaagtgatctacgtaacttcaggtctacttagcctcccatacaaagccccgtgatagatttctctgtcgaccaagcatcacacgttggctttctgttgtttttgctccagtgatacctccatgtatttttaaatggtagtatatacactatgtggtacaggattgcccagtgttcagcagcagagaatgtgttctgtttacaagtatgtttgagaaacacttgtttaaaccagtatatgcgtatctttctactctgttatttctcaaaattctaccaagttcatgtgcattatgagtcaccaagataggaacagagagtcaccattctccaaacttatttattctcaaaacatcctctcaacccctcactttttgcttttcctggaatactgacatcccacaacattctgagtcactggggaaataccaagggcaagtaaagaccgttgactcctggttcagcggtgttcagcttactcctctaactggctgtggaaaccggagttgattgttttccagaactgcgagcaagtttaaagcagtgttgtaacctgtctctactttctggcttctgttttgtggacttatgaaagtgcgtgcttaccactgctcctcctttttcagttttctctttcccacctttctcacttgtttaaaaaatgtacctttttaagctctagttctaagtttattctaatactaaaaactacagaaaaatttgggagaaacccataaaattacaatcagaaaacaaaaatttatctgtattaacacactgttaacatactggtctgtgctaatcattttttttcctataaagtacacattttccacacctatgtacttttaagaagttgacatctattttcatttttatttattttgcatttttatgcattcttagaaaatcatattaaatgttttctggatcacggtcaggtctgtgtgaacagacaaatgggaaagagggacagaaagaaggaaagatgttctgaaacatgaaatattagctatgatatctggccaaatttcccaactctcaaataatattctcctcatgttattcattctattaaatgaggtttataatgttagctggcttgtattttgtagttattcagccattgaaagctattacaatattattatctatatctgcatagtaagttgtgcttgggaacatttccagggatactgaatgcttctagtggaaatatgtaaaagttaattaatttcttattaaatcctcccagtatagaaggaatatttataaatctccttaggaaacagatgatctgaaactttccattattcartgttctaatcatctttcaaagccttgtgttttcaataccagaccgttgaactatctgtgtccttcagtgggatactccccattcttggtgtgtcattttgcaagtttatgtggattttctgcatgccgtttcctctctttctaattttaccagctgttctcagtaatacctgctttgggtaattacttgaactttttgtcatctcagttggtaggatccttttcagcaagtgatacatgtttgttttcctaacactaatctttgcatttagatcacttattgtcatgcaaagattgtcttttaaaaattaaccttttaagagaaacattttttctatcctgtagcagcatttttcatgtttctttgacctcgtgaatcctttagaaaagtcaattctaatcaataggctaagtttcaagtttttttaaaaaaattttcattgcacaggtaaatgagaatttttaagaatctgttaacctgctttgtagaacttaactatttcgataaatacttgattgggtgtgttggctcacacctgtaatcctaacactttgtaatcctaacactttagcaagagcatcacttcagcccaggagttcgaggctgcagtgagctgctgtggttgtgccactgccctccagcttttgtgacagagtgagagcttgtctctaaaaaaaaaaaaaaaaaaaaarggaaaaaatatagatgaatacttgaggaaaattaagcrttaggcatactatatatctgaaaccgattttattgacagatactgcaaatgaagtaggaaaatgcagtttgctttctgatgagagctgtcctagatatatttggcttaagagcatctctctgcattggcaataattgtaggtgctttaatatccatgaaagcctgaacattacttgagtgagtatctgttgagatgtgtttgtgtctgttggttagggaaatattattctagtgttttattagtcagtataagacaactggttttgttgtttcacaatatattaagtgtatcagacagtatattagtctgttctcatgctgctataaggacatactcgagactgggtaatttataaagtaaagaggtctaattgactcagttccacaggrctaaggaggcctcaggaaacttacaatcatggcagaatgggaagcaaacacgtccttcttcacgtggcgggagaaaagagaagaatgagagcccagcaragggggatgccccttataaaaccatcagattttgtgagatctaagtcactatcacaagaacaggagggggaaaccgcccccatgattcaattatctccacctggttcctcccatgacacgtggggattatgggaactacaattcacaatgagatttgggtgggaacacagccaaaccatatcagatagtataagtctttttaaaattactattttaaaatgttttttccctctcagggatcccttacctttgttaagagaaaaagatttaagcatgttaacattaaaaaattgatgtaaggctgctcagaaggctgaggtggtaggatcacttgaggccaggagttcgataccagcctgggcaacatagcaagactctgtccctaaaaatattttttttaattagcagggcatggtggtatgcacctgtagtcccagacactcaggaggctggtgtgsgaggatgtcttgagcccaggagttcaaggctgaagtgagctatgattatactactgcactccagcctgggcaacagagtaagacccctgtctctgggcagggggaaaagacaatataatcaattgttaaaatagatgattacagagctttgggaaggggaacgaycagtggggctggagttagtagtgactgcttcatagagatgatagtttgggagctagatcttattcccaagaatatgtataatttagcaaactagaaaaattctaccctcactttcagtctctctccccctaagcacaaaggcttatggaaagtgggcagtcttttaactgcctggattctttacaagttgtgattgtattagtggttagcagtctccctgttaatgctttcttttatctctttttcaacttttaaccgttttgtattttaaaaccagtttcatctcattttagcattgagggatgcaagttaactttccctcccagctattctaagggaccactatrtatttcagcaacttgcattcttccctggaattggaaatgtacctttaaaacagttgttttcactcaagaaaatttttttcagggctcatttagaatatggaagtcctttcttctcaatcaacttttaccctaatatgacaaagatattaaaatcccacttaaaattggaactgttaccagggtaagaaatttagtggaatagtatctctcttttgggaattcagcataggcaccaaactggcagcttacctactgttagggggcagttgttagattcacctggcagggggaggatcacccaaaggaaggatgagttgagctgcagtatttttgaagtctgccatctgctgaagtactctgagggcccaataaagccttccatrgtggactaaaactgctttctcaacagacggttctttccagttgttttgtagcttaaatttcatttcgccatgaatttgggttttatttgatcaatttctgtaatactgactttttgagagaagaaatactgttggaaaaagatccacgaactgttgttcccagaatgaggcttctggatggcagtgcagtaagttgggggtaaaatgtttcccaaaagagttgattgcaagatcctgaacattgttttgaagatagtcaacaactatctgatatgtagcaatctgaaatttattaaaaacattttttctgttaaactaatattaktatattctatcttctgcagacataactttttaaattaaaaatcgttaaaagacagtttctatttcttgtagtctttaaaaaaatacaacatgtaaaaagagatgtgttgcagcatcatagctttggaaatggaggtatttggtatgtaactgagaggtttaaggacaccactggttttgcatcccaaggagtttggaaatgaaagtatttagtatgtaactgagaggtttaaggacaccactgrttttccatcctaaggagtttggtcacttcggtggttattcccgtacctggtaccttttctggatatataaagactagactttatgatcataaaaagttcctttcatcttattctactgcaattagtgctaaaagccatttattgtaaaagcaaaaatactaatgaatagaaatgttacaaaaacagaagtcttgtgtgttttatcttcatcgagcgtcatccattttaattagagaaaaggtggtgaacactgtgacaagagcctggaattaaaatcattaattgatgtcaagctgaagagagactgttagcatgaatttagtgacagcaggaaagaaattaaccttattactttatttagtatattacattattttgtgtattattttctatgcaggttcaaggcaatttcattatcataatggaacactttattttttttttacaaaaaggaaagatgtatttatgcttgaacataacaagttgaaatgataagttctttattaagttaaaaatgacttgataaaaggttttaattgtttgaatttgttttttcaagtttcaaggataggaaacagtataaatgttgtccatcaatgtcgggtggtacaactgcctgtgataatctgaacttcagaatagttctttttagaaccaggaaggacttactgaaatgtttaaagcaatagacatttatgtcttttgctgggttttggactaatcagttacttctgtcattgttgaggtttggcccgagataaatgggatagagaatgctgaacaacaatctgactgttcagaaaaatgagtgactcttacatcttggagataatttgtgacctcagggtcacaataaaagagtaaagggggtatgcttttatagccctggccatctggatccattaagggctcaactgcaagatactcaccatcttttcaaagtttccttaagaagtcatgttatttttatgaggacaccaaacatgttttcttcctgagccaaatattttcttactgaaatatgtatctccacagagtggaaatacataacatgcaaatataaccttttggtcrtgttagaaagttcatattctcactttgtaacawgacattcaaatatcaaagaatataataaattcatttgtgtcttttgttaattttgcttgtgaattgccactaaaatttatgaaaatcacagtgcatgcttagtttcaaaagtctactctaaagtgctatttgtacagcaagcctcgttagcattaatttctagaatgaacttgagaatgcacattagttcaggctactgaccagatccgttagccttttgyggcagtagttctacctggtggaccacacgtatgctatagttttattctaaggttttcaccaccagtgtaagctgccacattggaaagcagtgatgcaggttttagaactttggggacaacattattggtgatgacaagataagcaatacaaatacaattccttcattattggagccttgaaaaaagtcagtatttctggaaggtactacagatggggctttaacgtttattaggctcagtgactggtggcgattagtcataatgtacaaatttgggtaaaagaaggcagctgagatctgggctttataaatagtacttcatgctgctgagcacttcttttgagagattgacttgttagaaattgacygctaattaatattattttctgcgtcatttggaacaaaagaayattcaaatccagaacccatcagtaatataatgaaactgatgtgcaagaagtttggggagattatttaggtttatgcctcccttgaaaagagtgtgttcctattctctttctgttagctttctttcttaagagggatgcattttctgatgtaagtaagctggatttttcacttttagtgaattaagctagatgtatcatagagtttagtcattaataaatcagtctgagtccttctctttgatttttggaggttctccaaattcagaaatttcagctttatatttatataattatacttaggtctgttgtgttccttcaaacttcttcagtttgccaaacttcaagacttatgtgaatgcctagttaccctggatattacctatgattaagtgactgatgaatggtgaccaaatatcatagtatagtgggttgtcagataagtgatcataattgagtttcaaattaatatcccattgaatgtaagaaagaactcattttcctctttctgctagtgatttctggtcaaatcaagagtcaaaaagacattatggtgcaaagaataaaattatctcctaactcctgtcaaccttccattatggatagctagtatttagtggtaaccagcttttataatagcatccttaackgtcataattgctcttaaatggataartggygtaaaaatttaaaaactgtctagtagaattttagctaaatttgacattagaatttgagttgctgtttctcttgtgggtattctgtctgtggaacctacagtcttagagttactaggatctagaacagtcctgataaaaatttctaacttcctaatattcacttttgagttaagaaagtcattggttgtcacctcaggaaataaggttctcctagagagttttggggaacatgagaagcagttttcgttgccccattggggacactgctggattacatgtggctgtgaccagttctggtaaaagtcctgcttgatgacaaatagccccttctcaaatgtcattgggtcctgttgagaaacactgagctaggtgaatttatgtactttttatagctgggagagaagaaaagtcagacagatttgatcccctgtattcaaaattggaaaccaagagtggggtgatggtgatacactagatacaagaaagaaacaaggaaaatgcaaagtttgcttgtaatgctatgtgacaattttctgtctttaaaaaaacttttaagtttgtaataattttagattcataggaagttatgaatatagtacaaagaggtcctatgtacccttcatccagtttcccccagtggttaagttagataactgtagtacagcatcaaaaccaggaaattcgcattggtatagggtgtgtgtagttctgtgtcatcacctgtgcacattagtgtagccactcctacagtaaagaaacagaactatttcatcacagaggtcttcctctgtagctaacccytagccatcactaacctgttcaccaactccatacttttgtcattttgagaatgctatataagtgaaatcatatatgacctgtgagattgactggggtttttttcacattgcatgatgcccttaagacagattcaagttgctgtatgtatcagtagtttgttcatttgtacagctgagtaatgttctgtgatatggacacaccccagtttttttgttttttttgtttttaactattcacctattgtgagctattttgggtgttcccaatatttaaatattacaaataaggtaatatttggcaatgaacaattgcatacaggtttttgcttggacataagttttcacaactttgggatacgtaccgggaggcacaattactggacagtatgataagtatatgtttaatttttaaagatactaccaggctattttccagggtgacagtaccattttaaatttccaactgcaatatatgagaagccyggtttccctacattcatggctgcatttggtattgtcactgttttttattttaaccagtcaggtgtgtagtaatagctcatcatggtcttatttgcatttccctattaactggtggtggcgaacgtcttttcacatgcttgtcatccatatgtcctcttcagtgaaacatcttttcatgtcttttgccattttctaattggattgttttctcattgttgaggtttcaggggtttgtttgtttttttgtttgtttgattgtttgtttgtttgagtcaggatcttgctctgtcacataggctggagtgcagtggcacagtcatggttcactgcagtcttggcctccagggcccaggcaatcctctcacctcagctgggtggctgggattacagctgtgcaccaccatgcccagctaatttttgcattttttgtagagacagggttwtactgtgttgcctaggctggtctagaactcctgggctcaagcagcacgcccccatcagcctcctaaagtgctgggattacaggtatgagccgagaaggctgactgttttaaaaaatatttcctggatataagtcctttgtcagatacgtgccttgcaaatatttttttctagtctgtacttattttttcatcttctaattagagcttttcacagaggaaaagttttttattttgatgatgttcaatgtatatacttttaaagttttwtggataatggttttggtattagtcctaaaaacccttctccacgcactagttcctaaagaatcccttacattttttcttaagttttatacttttacatttacatttaaacctgtgacccattttgagttaattttttagtaaggtatgaaatttatttttccttttctttttgcctatggttatctcatggctcctgcaccattggttgaaaaaactattttattacattgaattgtttttgctgcagcattgtgtagttttcaacgtatctatcttacacaggtctacataaacgaaagtttggcttatagatgtgtatctgtgtgttttgtttcgttagggattataaatagcattgcatttttaatttcagtgactacgtgttcattgccagcatatggaraatacaatggatttttatatgttgatcttatatcctctgactttgttgaacttgctttttagttctgggagatttttgtagattctttggaattttctttgtagatcatcatgtcatttgcaagtaagaagcattttatttcttccttttccatctgtgtacttttatttccttttctaggcttattgcattgcctagaacttccaacactatgtggaattacagtggtaggagcacacatccttactttatcatagggaaagcattcagtctttctccattatgcatgagggaacctgtcggtttttggtagatgctcttaactttaggaagtttcactttatttctagttttctgaaggttttctgacatgatgggtgttgaattttatcaaatgcttcttctgcatcaattgatacaatcatgtaacttttcttctttgatctgttaatatgatggattgtagtaattgatttttgaatattgaaccaggcttgaatttttgcagtaaacaccatttggtcayggtgtataatttcttttatatattgctgaatttcatttactaatatttcattaagggttttttgctttcatattcatgaggaatattggcctatatagctttcttttctttcttccttttctttgctgctgtctttatctgattttggtatcttttctgaattcttttgaatatatgtttatgtattgtttttgctagcagaggtctacttcaaacatgaaaagaataactgcaataaaagattawattcagtctaaagtgttgctttatagaagtaagattttactgcatttaagtgtgtacttaaatttgtaagtatataaaggagatattttttccattaaaattttattgagggttttaaaattttttccaggtaactaagattgacttaggacataaattatatcaatatattataagttgaagaggacattgtaccaaatagtttaataaaatcatagtaaactaaacgtaacttcagtaaaggtgagcatttaaggtttgtttcttagttgtaatgtaggcaagttttacttcacaatttgattggatacatgccttctagtccttaatttaaggattctccatttctgtatgcatcccatgaaatgacagagtcgatgtcattaagctgagatcctcttttgtcactaatgaagagttatggtgtggattcgtgtttaagcttcatagtaggttgaatgtttatggtgtattaataatgagtaagataggtatatattacatataaatattttcatatataaagtgtatgtaacgttaaaaaaattatttcttgccttaaacaaattcatgagtaatatccaagtagatgccagaaatgatctgttccttgcgagtttttaaagctagttaataagtgaaagtttaaacttaagatttaaattatggccaggcacggtggctcacacttgtaatcccagcactttgggaggctgaggcaggaggatcactggagctcaggagtctgagaccagtctggccaacatggtgaaaccccatctctactgaaaatacaaaaattagccaggcgtggtggtgcacacgtgtaatccctgctacttggcaggctagggcacaagaatcacttgaacctgggaggcggaggttgcagtgagccaagatctcatgccactgccctccagcctgggggacagagtgagactctgtctcaaaaaaaaaaaaaaaaaagatttaaattatgactgcaatcttgtagacatgaacaaagggcatctcaaattattctttttgagcatccatagcattacttaacaatctagaatgtgtatgacctgtcatttataccactgatcttctatagctgcaagaaatcaaatatattttacaacatattttgatgaatgtttctatatgcagttcctaaaaaaggaaaggtttctcttatttcaacttygttctgatttcataggattcaagccaaaactcgasaatttagggaacgacaagctcgagagcgtgactatgctgaaattcaagattttcatcggacatttggctgtgatgatgagttaatgtatgggggagtttcttcttatgaaggttccatggctctcaacgctagacctcagagcccacgagaagggcatatgatggatgctttgtatgcccaagtcaagaagccgcggaattccaaaccctcacctgtagacaggtaggcgccaggggcaatcgtggtattgcttccaaatcagcttttatacagcttctgacaggggagtagaccattcatcaatcctcaaaccagaattgccttttattaatggcctttaaaaagctgttgtgtctaaaagtattgagtttacacaaattgaaacctaatggaaggatcagcagaggttttgatggcttttctaatgattccaacatatttcattttgttctgaagatggttttatacctgagaaccaacctctactttataactcaaataaaaagcaaacttaaaattatgactcttctacttaagtgatatgtccttttattgctaggagagcctctaggtgtggcaattaaatagatggggaatgacatgatttgttccacttatgatttagatggatcactttttttttaggcagcataactttatattatgaaagaatcggtaaatgagaagaataatatagtataacagattgcttattaacagccacagaccacaggtctaaattatgtatatcagtgtagcacacaggagtgcaatgttaactgtattttttaattgatacatgctattttacatgtttataggatacatgtgagtaatttttacatgcatagaatgtgtaatgatcatgtcaggatatttggggtatccctcagcttcagtatttatttatctgttatttgtgttttatcttattttatttatttattttttattatactttaagttctagggtacatgtgcacaacgtgcaggtttggtacatatgtatacatgtgccatgttggcgtgctgcacccattaactcgtcatttacattaggtatatctcctaatgctttccctcacccctccccccatcccatgacaggccccggtgtgtgatgttccccttcctgtgtccaagtgttctcattgttcaattcccacctatgagtgagaacatgtggtgtttggttttctgtccttgcaatagtttgctgagaatgatggtttccagcttcatccatgtccctacaaaggacatgaactcatccttttttatggctgcatagtattccatggtatgtatgtgccacattttcttaatccagtctatcattgatggacatttgggttggttccaagtctttgctattgtgaatagtgccgcaataaacatagtgtgcatgtgtctttatagcagcatgatttatagtcctttgggtatatacccagtaatrggatggctgggtcaaatggtatttctagttctagatccttgaggaatcgccacactgacttccacaatggttgaactagtttacagtcccaccaacagtgtaaaagtgttcctatttctccacatcctctccagcacctgttgtttcctgactttttaatgatcaccattctaactggtgtgagatggtatctcattatggttttgatttgcatgtcatttgtgttttaatggctatatatttacttaaaattttaactgaaacaattttaaacgatcttttcccgctctttcatttgtatgttcaagcaccatgaggagtttagttcacaaataatcatttctttttatatcagacatacgcatgttattgtcataaatgatacactcagcycatcatctctyatagtggtttcttataagtgttgctctatttaggaactgggccttgaacattatgaatagcaggtttcattaaaaccaggggctctcaagctttagtgtgtgtcagaatctcctggagggcttcttaaaacacacattgatggactctccccaaattttgattcagtaggtctgaggttgagcccaataatttgcatttcttacccatgtccaggtttgatgctggtaccattggtcctggggatggcactgttaagaaccctcacaaggctagagatgtacgggaaatacttcatccatagcatccatgtgttattggttgctacgttttgcacccagtttctattttacctacttccagttgtttttaatagaggtttgcagatgcaacaggtaactcttaggcaaacccaggaagaagtatttttaaaaatagcaaatgtgaagccagatcttaaggtgaaatgctatagccagagtatttggtttgttgctttgttttgcttttgttgggttttaggttttccttatggtcttatgaaaatctgtaggtctgtttgatattgactataatgactgaataatgtaaattaacataggaggcatatggtttatttagacccctttgctgtgatcacctagaaggttcacttgcttattatctaaccacagatatgtcaggatccaaagaatacaattattatcagtgacaatgacattttctttaaaagctcttacttggtttctgccatacttgtgaatgctgcttatagaaggtcaaacagcatttgaaggccatgaatgtcccattggaattgttttcctgggagaaaggacaccagaatgctggcgttgtcagttagtaacttttggaggaagtaaaaaaaaaaaaattagttgacatattattgatcgttgataaaagcactcatcattttcagcaccttccacatccactttgaaaacctgaaaaatagtagactaccacgtagcagtttttcacacagctcagaagtcccacatgacatcaaagccaggagtcagatgggttctgtcttcccagctcctgaggcccagaagtggttgctttaaaccccagtttaaatcatagtgccctacaagagtctaaatcttgcatgtaaatgtctgcaaattttcagtagcacttacatgctcagaacagcctctgtttctggactccagcatccccacttggagtctgtaccctgcactgtgctaaccccaaactgaaactcagcctcctaatttctgccaaaatgcactcagagaaacattctggaggagactttagtcatgaggatgagttacaccaagcagtaagtaactcagaatcacatcttagacattgctgtattcaaaagcccctctcatcctaactcaagcacagcctcagcagctgtcagacttacgatacttttatgcatttgtgccccagaagggtgattagactagataatttgtgagatgcttccaactcaggagagacataatttatatttttaagaaaaaggactatggaaactttagttttttgtaattattatttttgcagagaataagatgtccattaaacaaagattgatgttactaatccaaaaagttgggaattatcatacctgtaaagcacttcttcatctgcctttaacaggatgtgaatttggctgtgatgtcatggtatcacctccattgtctgttcytgtcaaagagaaagctacatagaaaagtgtttctcagacttgaggagtataggaattttttttttttatagaaagacaatctcttggtactgcagtattgaactaaattgttttgattataatgttacttaaatatgtgtaaaaataaaataggactaaactccttctgttgacaaccattatacaaccataaagccaaacatctttacaaattaaatacaaaaatggcaaagccattaccttcaaatgaacaacattaacttaatgtggccaataatgtttcttaaatctaaactcttgcacaaatcatgaatatggtggtggctgctccatggcaggttcatttgggtttgtttgccgacccccacagtcttgcccatcccttttctctgttgaatttctgcwgttcttttgtatgttcctgttcagcagcctttggcctgcagctcccacaggggcatcatgtgtgcacgaagttcagcccgcttctgttgtcattaaccggagacagtgaaaatagcattccatcgtgccttcatgtgtgtaaacccaaattcagacagtgaaatgacacgcctgtaagaagatctagaatatgcttatactaacgtttttgaaaagtaattattcaagtggaaacatgcaacttggaactccgcagagattatttcctgtatgaagaatagacacaatagagaaactcctgtcaactgactaaattccaccaaaatttgcaattggtgtccagtgacctttactattcaaatttttggatttcatgggaatgcaggcagttgacagtctgatgtgtagcctgcatctgttctgggattttcattgttcagtaaggaagcagtgttctacatttcactgcttaatcattttaattgatcttatagtcagaaatatggatctggtagccccacatggaaacagccagggatgatttattaaatgtggtgaatttggcatcaaaatgggacattttctcaatttccacgtattacttataaaatgctttttataagatagcatcatgccatgtctagaaatagtcccatgtctgtttgattttattataacatgaactgtaggctatagtcacagtgtcactgttactactgtttattagtgtcgtgggtaacattttgatttttcaccttggattgatgctaaagagaagcagatcctatccttgtgtttgatatgaataacaaggcttaaaactcacaaaaatgttggcgtaggccgggcacagtggctcacacctgtaatcccagcactttgggaagccaaggcaagaggattgcttgaagcccagcgtctgagaccagcctaggcaacaaagtgagaccccgtctctacaaaaataaaaataaattagccaggcgtggtgrcatgcatctacagtcccagctactcgggaggccagggcaggaggatcacttgaacctaggaatttgaggctgcagtgagctatgattgcaccactgcactccagtctgggcaacagaataagattctgtctcttaaaaaaaaaaaaaaaaaatcccagtttttttctggctagcagagtgcctagctaaaagtttcccaggctcccttgcattaagaggtgaccatgtgacgtagttctgactcctaagtgaggagtgtacctagagtggggacttcctataaagctagtcttttcctgagtgaaatggggctgactcattttgtcctttaccattttccctgattctaaagttgtaggctacatgaaggaagaggatagcagtctggtcctgtgagcagctcttctagttcttatcacctgtgaaaagtgaatttgttacgtgtttaagttacctgcaatcaggtttctatttcatgaagccaaaaaccgttctgaatacagatgcttctcaactttcaatggtgttcggtcctgataagctcattgtaagttgaaaataacatattggaaatgcattgaatacgcctcacctaccaaacatcgtgggttagctagcctaccttaaacatgctcagaacacttacattagcctacagttgggcaaaatcatctgttctaacatgaaacctattttataatgaagtgttggatatcttgtacaatttattgagtactgtactaaaaatgaaaaatagattggttgtgtgggtactcaaagtatggtttctactgaatagttagcacctttgcactatctaaagttaaaaatcttaagttgaatcatagcaagtccgggaccatctgtataatgaattgtgcacagaagagcccaaagggaatcattgtcttttgatcaagattgtgtatattttagagaactatcccctggtcaaataatttccacaatattttgtgaaattaagtaatgagcagtattctccagtgttgctcaattagctcttctgcctttcattttgttatgcatctaattaaagaaatgttaccaatcaaatgtctgccagcagctagtcttcttaattctttaagacactgctatcctctgataactcctatttccaccaacaatcctgctataaagtaagaagcagttgagtgtaacgtacaagagaatgaactatggagccagaatacttgagtttgatcctgggctcttcttttttttctttgaaacagggtctcactctgtcacctaggctggtgtatgatttggactcactgcagcctcaacctcctgggcttaagcaatcctcccacatcagcttcctgagtagctaggactacaggcatatgacatgatgcccaactattttttttttattttttgtacagatggggtctcactatgttgcccaggctggtctcaaactcctgggctcaagtgatccacctgcctcagcctcccatagtgctgggattacaggcgtgagccaccgtgctcttcttcctgggctcttctgccatcagctgtgtaaagtctctgcttcactttcctcatctataatatggggataataatggtacttgcctcattaggtttgggaaggattaactgtgttaatgacatakaaagcacttcacactgagcatggtctgtagtaagcactatttgtttgctgttgcaactgttacttaggaaatgggcttttactctcaggaaaacacatatgctttcagcatcgccacmtaggtgcagaaacaagcaaggaatgaaattgaaatcaatmaagacaggtttgattctttatacttaacatagatataggagtgtgggaatgcaattctgctgatgccacttccttcattaaatagcttggtctcctaagtattctccataaattacatcacatcatgaactgtttccctttaaattaggagttactgaattcaggataaggcattccagatggcttctataatataaatatttagaatagagtaaatgctgggtagcatgaaatgtcttatttgagagtgacaggtgggtcatggtataaggacctgacctctcaatcaatttcagcctttggtttggtaatttgaaggttttcattttgtacttgcatgaaattctttgaagttcctcatggtttgctttcataaaattcttactgagtctgagtttgcaatactccatggaaatagggcagcttgaacgtctcaaaccttgtctaaaatgttggcatttctgtttacatcaagttatatcttagagggacaggcaagcctgaatcatgatcttaagaactgtaaaggctaggcacagtggcttacatctataatccccacattttgggaagcagagatgggaggatcacttgaggccaggagttcaagaccatcctagacaacacagcgagatgctgtctcttaaaaacactaaaattatccgggcatggtggtcacacacctatagtcccagctactcaggaggctgaggtgggagggttgcttgagcccaggagtttgaggctgcagtgggccatgatcatagcactgcactccagaatcagtgacagagtgagacctcgtctctaaaaaataaaaacatttaaaaaaaaaaaccgtaataggctttgttctaaaacagtggtttttctaatttaagcatatgtagaaagaccctggagcacttcttacagatcctgacctcccctcatagatattttgattcagtagatgtagttgactacaaacccacatttttaccaagtaccccagttgactctgatgcagccatcctttggaaaatattactcttgggctaataaaaaaacagtttggaactccagtatgagttagtttgttactgttaacagtgaagctgtgaaataatttatcatttctgtcagacacagctttatcctggcatttataatgtccattgttcatctatgatcaaataatcattttgtttaaaaggtcatcttgcaggtgtcatattcctaaactgcattctgtccagtgtttgtgtttgtttgtttgtttgtttctttctttctttctttctttctttctttctttctttcttttctttctttcttcctttcttcctttcttccttcctttcttcctttcttcctttcttccttccttcctttctttctttctttgagacagagtctcactctgttgcccaggctggggtgcagtggtgtgatcgtggctcactgcagcctcagcctcctgggttcaagcaattctyctgcctcagcctcctgagtagctgggattacaggcacgtgccatcatgcttggctaatttttgtatttttagtagaggcaggggttcaccatgttggccaggctggtctcgaactcctggcctcaagtgatccacccactttgacctcccaaagtgctgggattacaggcatgagccaccgtgcccagcccctgttcagtgtttcttgacaccagaaagtttcttttcctataggttacacaattctaatttggaaagtttagtacactttaaattcttaacaaagaaatcataaaatcctggtcaataatgttttttttatttgcttgaagacaccatgcaatttgtatttttatatccagagaccagaatctgtagttaaatattctacagaaagacagctttaatggacatttgctgactgtcactatgcaatcatttgccaccaggagtgcattgtcctcaaatataatgggaataaaatacgaactgtgtcactataaatctaaatagcaagaaaatagtaggctagactccccctgcttgctgaggacaccttaatggaaacataaataccataatcacatgctttttgcatgcattttaccactaaagagaaaaatgtcgattttaaaagaaaagacctttgtgaacttgtttcccctcccgttaaaatcagaatccggttgcgtcaaagggaagcctggcaaacacagaacaaaactaattttcttagatataggcacttattaaacatgtgctcttttagaaatgttgggtcatataacaaagttgtatttgctactgaaaaagtcaaataccactttatttatgtttgcttagtattacttacctctgcttttcttgaaatgtgagaaagtaattctcgaaggtagtcaatctcattgtaatgtgagttctgcaagttggtgcctttgctaattaatgtgctccatccaacctgggcctgatctcagtgtccttggctgtctactaatatctctggccttggctagctccttctccattcatgttagcaactcttccaaactttgttggtcccttcagcacaactcagctccagacctctagcccatccacatctgtgcctgggccacttgcctctccttaatagctgaagatcacctttcctccttccaggccagctctctaaacagtcttccagatcccagccccaccacttcaaggcacctgctccgtcagtgtctcctctgagcccctgtcttcagcctctgcctttctactggaacttccatgtaaacatgttaatgtctaccatactgtttaaaaagaaaaaaattggccaggtgtggcagctcacgcctgtaatcccaacactttgggagggtgagtctggaggattgcttgagcccaggagtttgaggccactttgggcaacatggcgaaaacccatctttacaaaaaatttaaaaattaactgggcatggtggtacccacctgtagtctcagctacttggaaggctgacataggaggattgcttgagcccaggagttcgaaatcagcctgggcaacacagtgagaccccgtctctacaaaaaataaaattacctgggcatagtggcacctacctgtagtcacagctacttgggaggctgaggcaggaggatcattgagtccaggagttcgaagcttcagtgagctatggttgttgtaccratgttctccagcctaggcaacagaatgagaccctgcgctccaacctgggcgataaatgagattctgtctctcaaaaagaaaaaaagaaaaattccctttttaccatctagctatttgcttccctatttttctacttcacttctaattcagacttcttgaaggattattaatacatttgatgtagattgccatatcttctctcccacatctctggttcattcctctcgttgtatgatgggcatgataatgcttccccaaagatgcccacgccctaatttctggaacttgtgaatgttatctcaccaggtgaaaaggaccttcaaatggggaggttttcctggattatccttttgggcccagtgtaatcacaaggctttatcagtgaaagagggaatcagaaggggcagagtcaggaaggaactgaagctgctgccctattgactgaagtcagaggaagggaccatgagccaagggatgcaggtggcttccagtagctggaaaaaaagcgaggaagcagattctcccctcgagcctccggaaggaacttggctctgccaacaccttgattttcacccagtgaaacccatttcagacttctgacccccagaactataatataataaatgtgtgttgtctcaaggcaatacagttgtggtgatttgttgcagtacccatcgtgtatttgtttcctaattgcytcctagaagcatgattcaatgaaasttgagtsctttgcattctagattactctgtggcattcctgaaactctgttctctttgtttttgtggcactgytttcyccttcctttgaaactatcctttttttttagagacagaatcttgctctgtcacccaagctggagtcagtggtgcaattatagctcactgcaacctcaaattcctgggcccaagcgcttctcccacctcagcctctcgagtagctgggactacaggtaggtgccaccatgcccagctaattttattttttgtagagacggagtctcactgtgttttgtagacatagggtcttgctatactgccttgaactcctgggttaagcgatcctcccaccttggcctcccgaagcactgagattgtagatgtgagccactgtgtccttttgaactattctttagatgtctctttagaggttctattctactttttcctcttaggttttggatttcctagggaaatagctctggaccactgctatttcctatgtgtttttcttggttaaggttttcactaccattaggcatratgatgcctgatctcactagcccagttctctctttataagccccagatttctccagcaccaccagctgggaatgcacatttcctgtgcctatcagtcacctgatcccaactgatctaaaacagaattcatcattcttcattctaaacctcctctagtttcaacagcctaatctcagcaaacgcaatcacaacccacacatctcaagccagagcctttcttttgtagcctgctccccccgataacagtcagagacaaagccctaccaatttgccattacaagtaattccacatccttctctccttctgtcgtgcggcccatggatactgatggtcgtctcctgacccctctcccatctccagtcttgttctccacaagtccgtatttcacccagtacctggagttttgtacctgaaacaaaatatgaccatgtcattcccttgcttaaaataattctgtggcttattgtctccaagatgcagtctaagccctcagtatggtgtttacgggcctgtaagacatccaatctcaggctaattatatcagactgtgtcatattggttcacatcatactataggatcagtttaaaaggataaatccaattgcatctaatacatgggtgaattacgtggctctttggtgttatacattttgcaaatgttaaattttggtgagttaaaaacaagcaatcaccatccattaagctattctaatatagttagagatgcagcaatgaaattaaaggctgaggtgacataaaacacccaacaaatgaaatcttgaaagtaatgaagccataaataaggtcatggctaattttaaagacttcttgtttaattctttttgttgattaacattgcccgaaaccacaatttgtttgtagaagtaatgtgtaatgggggttgtttatttatgtatttattttagccttagaggaagtttaaatattctgcagaaatgtggggataaatgaaagctgttttakwctttggtcgttagcaggcaaataatcctccagcagagtatctgcatttttgttttaatgtctttcccttcatagaccactgaacttttaggtctttaaagagattttaggccattccatgatcaaaatctcctggagctgcctgggatttctttcaattttagccttctaacaaaagctccaagatcctgcttcatgtgcaatttggcacgataactcatctttttattttgacctaatcacttggttctcctgtcctttagacagtacaaacccatggcttcaagtaccaatcttgttggtattttgtgatcttaagtttgtgttattttcttccttgctcctgcataaggatggaatatcaatcaactattaataaaaattcatgaggatttatgtggagtcccattgtgagatgcattttcaacttcttgggagactttatcgagccctaaatccgcaatccagttttaaattaacttcccagatgttctagagcttttccttgggtaccctaagtccttggtgtaaataactatttgattactttctttctcttgttgtttcatktcttcttccattttttccccaattggttgattttgtgtaactaaaggagatgcagtagttgattttaaaagatacctgttttcttttccaatcaagcaagttgagatatccttagtatttttcattaaaacaggtgtgtacatagaaatgtgaaaattataaactttctgtatcgttacagaacagaaagtaactagataattcatttgttctatggctatgtaataactattttgaatatgcatttcacattgcataaaatggactccaatgttagagtgaattaatgtagattgttgtatatatacatttctgtaaaactgacagatatttttaaactgaattttctgtatcagtttatgcctttcattactagttctattccatagactatatagggggtcttgggttgactctttgagaatacagggatttgaaaatatttgttcctaaaacaaaatgctttgggaccaggtagttgcctccaaggtgattccttttggtgaggtgggtggatgtctcttgcagcttaactgtttttacagactataaatgtaaattaaatatcacttacaggcaagaaactgatcttagcctgagactgcacttccttatcacctttgttttaactgaaagtcctgattgtctccgagagaggccagcctggccctgctccggctgtggtaaccttgccagggtttggggcctgaccaagtgtggagcaaacgacagagcagaagcccatggagctcagctcatgaccaaagctgcagagtgtccagatgaaatggtgaacaccaagttcatgaggccagaggattccctgatgtgcacaaattcggacaaaagcttcagtacttggaattgattgataatgtccatctaagtagaggaaatgatataaagtctgaattagtgaataattagcgaatatrttgaaagatatgatattccgaactttaaagtgtatccagcaactcagatgaaatgcttacactgcttcagttagtaaatctttattttttaaactctattataggttgtttttaattccaattttgaaatcagatttgcttacattttgttttgatgtgattcatgtgttgattccaacaccattggaataraaagtagttattctaagttcccctcaaatgaatccccctaaaatcttatttatactacaaatgtatatagaaaaatgtrcttaatagtggaaaagtacgtttctttataaattttcaaaagctacaaatagtggcgtgtaaaataattataaatcacctctgtgaaaaatactgctttagtttcatgttgacttcatataattctggaattgtgaaaatatatttaaaaataagagtttgtcgtcttccatgaagaaaagtgttatttaaaaggaaaaaagtttgccatttcagaacttactgatgatcatgacctggaaacagttccctccagataaatctgcatgacaaccacctaacagatatctttttcctcttttctctggcctctgctttgattacttaacaggtcattcattaccaggcagaaagtttgaaaagcagtaattttttagtcttctgaaagttatataatacactgaacctgtatcaggtacttagaaggcagtgcagtggtaaaataaaaatttaactccaagtttgtttttaattctattattacctaggatttttaaagaagggaagggcaggatgcaaatggaattggggtgtgctgaggttgtagaggaccagttgagcaaggtacagacaatacaactccaaggggtgctataaaactatagcgtggattggaacacttccggtgattttttttctggcagttggcagccaagtgtcttgaggaatgagggttttctctgtatttcacaaagtcactgtgtggtctgtggcagaaaggagggagatctaaaaaatgatttaaatcgtaaattattagaatttggttgcaacagaatttgtgggggagggttttgggggttttgcaagctattagcataatttaaaaaatacctgctttgtaacaaaaactaaagctgattgaggttacagacttctagttattcttttccttctatttcctyctttcctttggtctgtatgtttcagccctgtgaaatagtcaagggtttaaagtctttgcacaagcccagagttcttgtacacatctgtctgtcagtgtatctggcagcctttgtgactgattactcacttccccacaatttgactgtgggccaagaattgtggtaggtgcctgtggtagggatggaaatgaataagacctattcacccctcagggtcaccccacctggtatcacatagcagaccacactcaatacattgtgtacagagtgataagaattaaataggatgctaaggagactgactcaggttgaggaaggatgggcttctaaggggtgatgtgcttgagctgcatcctgaattcctaaatgggaaagagctaaatttttatacacacacacacacacacacacacacacacacacacgtttacctacctagatgttaatactcacctttcatcactatttttaaatgttgattacacaattacaatgacaaaaagagagatcatagatgttataacaaatgtaactttatcttaatttttttgtttgtttttgttttgtttttgtttttgtttttgagacagagtcttgctctgtcgcccaggctggagtgcagtggtgcgatctcggctcactgcaagctctgcctcctgggttcacgccattcttctgcctcagcctcctgagtagctgggactacagcacgtgccaccatgcccagctaatttttgtatttttagtagagatagggtttcgccatgttggccaggctggtctcgaacgcctgatcttgtgatccacccgccttggcctcccaaagtgctggaattataggagtgagccaccactcccggccttaaaatttttttartttgtttgtattcatcaggtacaagtgcagtgttgctacattggtatattatattgtgggaagtcagggccttcagtgcacccatcactggagcaatgtgcgtgctgtacccaccgagtaacttctcatcatccagccccctcccactcccacgcttccaagtctctgctgcccgtcataccacactctgcttctgtgtgtccacattattaaggtcccacttatgagtgacaacatgctgacctagttttgacagacaggggacctagttaaggtactggatttatatcttcctggtaaatattaaatatgatgaacactttactgtgaaagttcctagatacctcttgccctgaaaagccactggcagacagctgtgtcttctctgagtggtcgtctgattctttgaaactttctatgatatttcagcaattaaggattgcttagcctctacactcatggtgtcctgaaacctcaggtagctgaggccttaagacctgcgggataatgagggagagccaggccatgaagagatgctgcagaccctccaaggtagcaaccagatggcttctaggcctcaggtaccgtggctcatcactgtgggtggtgattgtgactgtatggatcagttccagagtaggtctgtcagaatatcaatgtctttaatatagttttaagcatttgaagaatttaacattcttggtttggccattcatgactgtgaatgacacatgatttacagtattgctagggcctgtaggctttgctggagcatgaggggttaaagaactaatgtgagtcaaggacagtatctgttgcgcacctacttgacacaaactactttactaggccatttcagatacacagacaaatgtcgtaaagtaatgattgagtccacaccttccttctgatatttatttgtaaggaattttatttgcatctgggagagttccattagtctctctttgtaacagacaaatctaaaacctactcccacagtttcttgtaaagaccagcacatctttgaattgtcttggttttttaataagatttccagcttttataccagatcaaggcaaactggatgtaaatatagcgttatccttgctgaacactgttgcagaccaacaggttcacagtttcctacatcctacccrtttataactgaaacagtatgtcagttgatttttaaaagtgcaggtggttttctgatcgttcactatgatttcctttacagcaagggcatgagagcaccatttccccacttttatatctagtccgttcttgaaaatgtgtaacaaatgactatgcatatatatatrtatagacatacatacacacatacacatatatataaarttatatatatacacacacataaacatatatattcacagaagttgtgttctcagaataatagtaaaataaacaatgatgcttcatgcaggcactggtgataaactccactgtgtcgggatgatccagggctgagacacagatcagcaagggccgctgccatttccctttcagatcactgtagagacaggtgtgtgcagacaggaagcacccttttccattaactgtctctcctgacccctctctggactctgccagcgcttgcccatggccatcagggttaagtttgcctgtgtggcttccaaggagagcaacggggaagggagaggaaggacgaggagataacaagttggttggcagcccaggcaaattctgggacgtcacaggagcctcagtccttaggagggagtgagtcagaggtgcttctgcatggaatgtcacactctcaggagcacacacctgtagggacctcagctgcctctgaggggcctggctctgtccccaaagcacagcagctgggggcaggcaggcagcaccaccacgcagtgactggtgttagttgacgtgaccacacgcaggtaatttaaaagtgcagctctcccctccccctccccagcacaccctgactcccttccctgccttctttttcttgctagtccttatggcattatgatgcggcataaatgcactttaaaaatgttatcatccgtctcctccaactagaatgaagttgcattttggagcggggcagggggtgttgtctgttgtctgtttcattcactgctgtattccaagttctaccacacagacattcaaatatgttcaataaattaaggaatggataaaccaaactcctcatcagcacagcaaagacagtttatgggatgtatgtgtgataagactgtaagctgtgtaggagcagagagagcctgtttttagaaaagaaacctggagtttctgtcagcaaaatgcagttaaacattttaagtgttaaagtcccttttgcttattgtatgttaaacttataattcttgtaggtttcttagaacttgtatagttttgagagagagagagagggggaagagcaaaagaggatttgatacaacaccataccataagatgataaggtaagatgtgatgtaggtatttttaagagcacaggctctgaagccagcttaagttcacatcccagctctgccatttaaccttctgtgccttacttcttgtatctgcaaaacggggataataacacttacctcactggggtttttttgtgagcatgacatgaatgactacatgtaaggcactttgaacactgcctggcacacagagcagtcccataaatgttagttgctattgttcgtatgatgccaccactaccatcaccgtcgtctttgttcttgagttctaagggcatttcaaagctaaaaggtttgccacagagattgtttttgcatgggtatgatattggattctgtatcttatttttarcatcttttatgtgtaaacaccacttaagttagatttgtcacctttgtatttcatgatacaactgatgtctgtacctctttaccttacatactgctgctaaaatgggcatggttatggacatttgattaatttctgtaattaggaagcgtcttaatctttagtaatttggtatagtatttcacttgaatagctaaagattaatttccataacaggagactaaggtgaaagaggtttatgatattagaggatgtgattgaagatcgtgcaggcctcaggcctggagtcagattctctcagagcttgtgatgcaacctgggtaattctcactcttaagagagaactgctttcctcctggaagtgtggaggggaatgataaggccgtcttcaatagctgtatgatatatttaaataaaatctgccatagaattgcataatattagtattataaatgccttgtatcattatatgataattaaaataagttctatgttaataaatatgtagtgtactattattgatgtttgctttatggtaaacaggaaacatcttgagtgatttttttttttttatttccagcttggaaatgataaacaaaatctgaaaaggggcttacttttttttcttttattactgagtatgtctgtttctggcacattttttccacttacctgggtcaactacatacatatctcctaaaatgaagtctctgtatacccaagggtagctaaatgcccgtcaaggaataaatgaatgcatttgagttgttttaattagctaggtatgatttaaaggttgctgaaatcaaaaagccttattcatttttcatcaataatcacttaccttaatatttcattagaacctgctgatttgcagactccttctgggctttgattcattatgactgcagacataatttaactttctctctttttctckttctgtattatgctctttcatctctgagacactattaagatgtttccagcattcagaaggctgctaattgatccaactttttttttctttttttaactgtacttaaagctaagagttctaggctgtggaaagctgtgtgtgtgtggagggggagcagttttctttaattctttaaacagctgataataacrtgtaaattttctatttcatatgttccaagaattaggatggacttattgtatgcagcaggcaggaagtacatagtttggccacattcttaagagtatgccatcaattggaaagaacaaagcatctcgtgtgtggcatgctcaccagatgagattgctatccatgcatataccttattttcaaaatatttctctagttgctttagatgcagcctagcatgtggcctcggatgtgcagcgtgcctggtggactcaggtagtgactgctatcccaggcatctgtgctgccacctagggagtatggctctcatgcggagaagttgagagatgggccctcagattaataggatgcttgtgcagaaaagagccattcttcttcttaaactgtgcctttatatgaatgatcagatcagagccagagacagaccatacagggtgggggacatatggttggaacttcttaaaagccaaaattccaggcacctgtctttaaacacagttatatcttagttttttgggggagagtagctaatctaaaacttaaaaatatacccagcacggactggaattctgactggctgatgctggcaatgagaaaagaaaatagataaatgtgtaaataggtatttttcatttcttccagattatgaaatgctgcatgtctgtcttttataaccatgttaaatggtttgtatgaagtgcatattattaactttcactagctgtgccagttttgatgccgagtaaaaattcctaaatgttaaggaataaatttgtgtccttaaaagcttggtaaatgcaggctgagcatgctggctcatgcctgtaatcccagcactttgggaggctgaggtgggaggattgcttgaagccaggagtttgagaccagcctgggcaacataatgagatgyctactgttaaaaattagaaatgaaaaaatttggtagatgtagatgtatatgtattcagaagtgtaagtatattcattggactagaccttttattaacttattgatactttccaggaaacgtaatgctggtctcccttaccactagatttctgtttcaaacacaagtctaaaaaaaattaaggagccaccaatataaatatctactgatggagaattaaaagaactcttatgtgttaagagattttaaccaccatttaaaattatcaatccccggttaactaaggctgctcttcacattttgcttacctttggaatatttattgatagtgctttctaacactttgtgtgtgtgtgtgttggagttaacatggcttgctttgtgtgagtatgaattttaatactattctttgtttatgatgatctkcaggattctggaagaagttttcagtatagactgtctcttcattgggccttaactttgtgatctcagcctgcctttgcggcttcacagccatttttctacctgtgygtgcaggtgtgtgctggtgctgggaggtgctattgtagacagagcatgaggcattggattcagatcctggctctgccacttacttggatgttgggcaagttatctgacctctgtgagcctcattatattcatctgtatttccatttttttgtcctattgttagaccatatgtcagctgtgtcctgatttttatatttagagaatatgttcttgccatgcatcatgatctgtgttagaagctattggggttgaaagagaaaaacagattcaatttctgatagtaatgttcttccagtcttttgggagataacagacggacttaaataacaccaccagttttattgaccatgctgtttattttaatagctaggccagaatggtttgattgacttttgaaaaatctggtatttttttttaccatatggacaaggccatatctggagtgccaagctaataagccttcttttctctgccagtgaaccatgaaagttgttagcaaaatgttttatcttgaattgatccattttccaagctcttggtgatataaacacccatcttaagggataaaatgcagattatctttcatcagtcattggaaatttgttgcattaaagaactgtaggcaactggtatgtgaaatgatctagaaaggaatgtacctagtgtggttggggatgcctaaaaatgtgtaggactcccgtaaatcagttacttatcagtacaaagcacaggtcacattattttgaatgatgttgtaatacttgaacgtaaaaaatgggagtatagtagtacttaattgtaacatttttcttaaacagttaaggtttaaaggaagatgaccgtacttttccgattattaacaaaaggtccaatgtatacaccattctgagtcagaataccaccaatttctgtgtctagcaatgaaacaatgtaaccagtattagttgtctttcaatctaatcagtgaattaagtattcattccatcccaagcctccttgttaccatcaaaatatttgtatctttcatttctctcctctttatgttcctgtttttctttatgttctttagcatgtatttgaagcatctttttaaaaattctttttcctctgattctatcatcactgtcctttctgggtctgtttttgtgttttttgttttgtttgttttgtttctttcagagtcgctgtgtcacgcaggctggagtgcagtggcgtgatcttggctcattgcaacctccgcctcccaggttcaagcaattctcctgcctcagtctcctaaatagctggcattacaggtgtctgccaccatgcccggctaatttttgtatttttagtagagatgaggtttcaccatgttggccaggctggtctcgaactcctgacctcaggtgatccacccaccttggcctcccacagtgctgggattacaggtgtgaaccaccatgtctatcctgtctgtttctattgattgatttttctcctgattgtggccacatttccctcttcctttctatgtctaataattttttatcagatgtcagacattatacrttttgtattactgagggcttgggtttcatttttttttttcctttggaaggaggctcttgctctgatacccaagttggagtgtggtggctcactgcagcctcacactcttgggctccagcagtcctcccacctcagcctcctgagtagctgggactacaggcatgcaccaccacacctggcttcattgtattttgtgtgtgttggatctttcctggcaggcagttaagttacatgctaatcttttatatttaaattaccttttaatcgcttttagaccagttgcagagtaactttcattctaaggcctaatttagccccatttccaaggcgtagccctccttgactgaataccctgggtattcagtccatgcagtctcctcctctgcgtgggtactatcagggtgcccacagttgttcatcttacggccgcctggtatttattcttttcacaaaagttgttcttgtctgggcttataggattttcccttactcatgcccagggtgggaatcaaagactgaagagggcccgtgctgatttctggagctctttctctgtgtagttctctcctctcaggtcatctgtctaaagatgctgaccaccttagcctcccagattcataattctgtcccctcaactcagggtggctgcagtgtggtttggttttgctccctgcactgcagtgcccagaaagccaaggtgatggtggggcaccccttctttttttccttttctcaggggtwacagtcttagccatcttggtccccagttcctgctgaaaatagttgtttcctatttttgactagttttctagttgcttatagtaggaagttaattctggactactgtatcttcttattgctggaagtggaaatctcttaaaatatatttgaacaactgttctgccaaaggcttctaccatctctttacctcattcttactcttaaaccccttaaaatgggcttcagcccctctctactgaagaarattcttttcaggtgacaaaattgccaaatctggaggccatcasgaaaatgtgtccacatttgacttataggacacccttcttccttggtcactagtgctctcctgtgtcttcactgctgatccccaccttttggggagttcatttgtccctgttgtgattctcacgtgcctacacccttgtctatgtttctccctgtcacgtcttcagctgtcactggtatgatttccattgacactgtagtagtgccgctctgtggcacacaccaagcctggctctgcacacatgtctctgggcatcctgacagcatcacgaactcaacggggacagatctggtggggtctttattatccagaccgtggctgccactgtgtaccatctctctgctcttttcaccagcaccctgtccatctcctgtgctcttcttgcttctccgtccttagccctcatacctagttccggagtgttattgattctatttctatactttttctcagatcagttcttctccacacattccttgttttgttttgttttgttttgttttgttttgttttgttttgtttcagggatgtattaccccttgtctggcataatgaagtcacagcatttacgtgtccacacctgtctcagcccccttgatccctcttagtcctgtctgttacctttctaaattctagtcagggtggcctcactcaccctctccaaagaacgacggcagaatcaagtccaacttacttggcgtggcattctcattctagggaagcactgctgactcaatccccagtatttatcctcattgaaactagtcacctagggctctttcccatcccatattgcgtcaagcattttcctacccccgttacgtatgccttctcatcagtgtggaacgccctgctgcagccctctcctgattctccaatgccatcttttctgcaaatttagtacttttagttggaatgaatctcttcctatcctcagatctgacagagtttgtatgtctgctaagacttccttgggtgtctaaacaggattgttaaaagctatctgtatccgctccactttttgcagtttgtacttttccctgtgttctcccgacatcttctttggtgatgttgggaagtcattaaggcacttcctgagatctgtttttaggactcacactgctgctagaaaacagtctcatacatagggctgtggggtcactgtgtacaaggcaagctctcctgtaaggaaataagaacttatcttaaggagataaggataaggaccatgccttaattcacccttatcccctccaaattcatgtgtacatttttggagaatttaaaggcagtatgtaagatgaatgaatgaaaaatgatgacttcaagatacttaataactcgattcatttatttaagaagattcctttatatagcatgtgaactcagcatgtaagaatgattcaatttttaaaattagattgtataagatttttagtaacatatcaatgacatgggacagaatatatcactttacaaatctattattacactgtaattttttgctaggacttctttcctcaaaaataaccataattyagaattgataacgttgcatttttttcttggtgaatttcttaagccagtggtcatgatataatatcctcctgatactgctggattcaagaacaggtatcaaaaggaaacaaagtatgtaggttattttgaggcccttcagtatctctgttcgtctgtgttttcttcctgggccgttattcaggcaagactgggcactatgtttaactaggcgcaacattttgctgatttcctttaaatgtttcctgagtaagaaatatattatcccttaatcagcctcttttgagatgtctgtttatagtaaacaaaatcttacttcaattagtttcaaattctaagcgaaactactggtaattcgacattgtctaaagtaacatcctgttactgtactgcaatattgaagttgaggtgcaatagaaacagatattaagcttattaccacatttatcaatttattggtattctttaactgatcagccacataggaaaactaatactgacaaggaatttttcttttctcaaacttaagcactgagaatttgggaagcttaacacctttctcttcttatctgtaaaactagataactgtatacaaataaataattatagtcactatcttgtagggttgttgtgcaggatgaatgatctaacctagctaaaacatttgtcatagtgactgcttgcagtattatacatatatttaattatggcgcaggtcaaatttgatgactatatacatatatatatatatttgagatggagtctcgccctgtcacccaggctggggtgcagtggcacaatcttggcttactgtaacctccgcctcctgggttcaagcaattctcctgctcagtgcgcgccgacacacccagccaatttttgtattttttgtagagacggggcttcaccatgttagccaggctggtctggaactcctgacctcgtgatccatccaccttggcctcccaaagtgctgggattacaggcatgagcaaccgtgcctggccatattatgatttttaaaaaatccttaaagtaagtagatcttcagacttcaatgagtagctcagttacttgaagaagcatttcgttttagcacatcataaaatattggacaacatctcggagtttattttaaatggaatttaatctgtaaaaactgcgggccatctatggagtaaacaaaatgaaataatctctgaatgtgatgtattgggcaatgtacttaatatatgttacatatgcataaggatgatttgcatctatctagtgttttccaggtcctttgttttgaatgtgggcatcaggtgggatgagagcatttcaaatttgaactgtcagtacgtgaaccaccgtaacattaattggcagtagtatttcataatgtgtgtgatctgttatagtggtaaaatagattatttttagattcccaatataaaattgttttctcactaggtaattataattggttctgtgtgtaacacaaattttaaatattgtatgttattagttaacaccagcgcaacacagatactaacaagatagaaatgcaaatggattttctgtttcttaaactgtggctacaaatggagaattggttccataaattatggttattatcattttttgagatgaagtcttggtctgttgcccaggttggagtgcaatagtgtgatctcagctcactacaacctccgcctcccagattcaagtgattctccttcctcagcctcccgagtagctgggattacaggtgtgcgccaccacgcccagctaattttttgtatttttagtagaggcagagtttcaccatgttggtcaggctggtctcgaactcctgacctcaaatgatctgcctgcctccacctttcaaagtgtttaaattatttttagtgtgcatactttttacaaggtctttacagtggtcatttctcatggagaggtagttcatacttttgttcgtgaaatattggttttcattaaactttatgttgaaaagcaaacctttagaatcatatatttctgccattttagagctggaaggagcatggtttaacaacccctcattttacgggagttgaactggtctgggggtgtggtgctggggatgaggggtgcagatgaaggtagtcgcctcctaccatcgtctttccttttacggatgtcctctcacatgtgatatggatttggacacctgcaggctagaggggccackgtccttaaataggagtgctgccttggacaaggtcacctgattatcagtagccttttaataaatttataaacaggcatgatcataccaattaaaaaaggaagacagactgatcaagtaaattatatatatgaaagcatgcataaaaacataaagctgtaccagtgtgttatgttccgctatgattataatgacccctgtatactgacctctcccatgagctccaggagtgaattcaaatgcgaagatgtatatgatagcaactttggaaagtagagtatacttgaccatgccagctggttatcataagtatacctggatttaggtatttctgtttaaatgatacctagttaagggtcttacttggacttaaaatgagaagagattttttttttaaaagagactcaatatgcacaatacagatagttataaccatgttgacttgagagttaaacagatacagctgtttgtgagtaagccagacaaatgtgatttgagtgttgaagtactgatgacgcctatttagaacctggtaagaatgctgtggtctgggacttctgggtccatttcttctggcgttggtgttgagacctcgctccctcctgaattccatgtcctccctattactcccacaggctcaagtggtggtagtaccctggagtgcatctgtggccactgtgcagttcgtttcaggttcttgtgaaacatcttgatggcccttcattgcagctgtgattaagacgtgttgccctgctctgtattgagagctcagtctgtttccttcttcttttgcctactacagtgctgctttccattcctctgttctgtgtttttccttttttctctttttatggacctgtctttgctttttcacttctgtgaacactagacaccctgtgccctcccgctgctgaggcccgccaggaccaccgggtctcccaccaccctcccctccaccggtgctccccagtgytcactgtccagccacgctggcctccttgcactccttgactaggccaaatgtagagtcctaggctgctagtgcccctgcccttgccatttcatctgctgggtgtcctgctctggatcttgaaatgactggcatcttcctgttatccaggctcagctcagagtttcctctttagcatggtctacctgatgtcctgtctaaagcacaagccaagccccaccacagacacgtcctctcaagcgcatggtccctcttgaatgctttttatacayagatccatatctcacattgccctgttcatccctgtgtttttctatttctgattctgccctcttaagtgtaactctaggagagcagagaccccatctgtcctgtaaagctgtgtgtctgcaagccccgaaacagcggctggcagacggtggctgctcagttgacactggtttcatggatgtgtgtgtgcagggtgtgggctcctcacccctgagcgtctctttgtttggtggtgcacgctcaggcagtttctgtctgtgttgtctgctcgaggtccttctctctatagttttgagctctgcttggtgggagggactgtttacctctcctcagaaaatcttgctctggagacaggaagggggaggttggggaaaaggaggctgactcctgggtgtgccaccaagaagacatctccaccaggaagcaaaacaagccctctctttatggtgcttcctgtttcttatttttaaagcaacttcttttcaccaaatccaaaaatcccaccttacctcaaggcagctataattaaaagcctgtctgtcaaagattttgctattcagaatttcacatgccttctgaaaaactaaaactcctgaaaattgttatcattgaatacaaaaatagaatgatccctttgactaaagcttaaaattatctgaatatgaaagtgatacttttttgtataaaacttacaaaacataggaaagggaaaagatcatccagcccccaaaacaataatttttaatattttagagtatatgcttagacacatacagttatttgcacatctgtacttactcagaactgaaaataaaatcatactctacataactctttagtaatgtgccctcttacctaataagtcacgaacatctttccagaccacgctgtattctcttacgagaacattttttaagtggctgcatgatctttcattttatggatttatctcgatcaagttgcttaacctctaagcctcggtttcttggtctgtaaaagggaatcataattgtgccttaaacaacctaaaggaattagacgggggtcatacgctaaatcactgagaatgttcctgtcacataggattgctcagtgattgttagctgctgcttctgtttatccaatttcctactatcttgtaacaacttaaaatgaactatgacagatgtccatgatctatcctatttcctgccaataaaatatttttaaactctaaaaatactcatattttttcattttcagataatattatcaaaagatggtagggtatttctacttaaggcaaacaccaattttttttttttttttgagctggagtgtcactccattgcccaggctagaatgcaatggcgcgttattggctcactgcaaactccacctcctaggttcaagtgattctcttgtcgcagtctcctgagtagctgggatcacaggcacacgtcaccatgcccggctacttttttgtatttttagcagagatgaagttttaccaggttggtcaggctggtctcaaactcctgacctcaagtgatccacccgcctcggcctcccaaagtgctgagattacaggcatgagccaccataccaggcccacaaacaccaatttttaaaaactttggttttagcagaaagatcttaggggaaccaggattccatctgaaagtagacttcagcccacttctctcagtctgygtctgcctctgccttgacacttcttcccctgagccctctgctcaaggcggaggctccgcttttggtactgatgtccaccaggctgtttcagaaagaagccagtgagcacccttccatcggccaccgtgcctagagctgttctccacattctctttttgcttatcctctcagcactcagtgggctgccagcctcaggatggtgttagattaaagaaatggcctatcagagcttagtaattcaccagttctctttaagaattcacatgaccttaaataaaatgttcgatttaacttaaaacaaatcatgtcaagcatgtaagcaaacaaattccgaaatggtgaactgtttytcttattttagattattttcttaaaatacccatctgtatttgtaatgaaggtctattctccttttaaaatatgtcagtgctcttaaactggtggcatgaggaagaaaaaaaagtttaaaataaaatatgtcagtgttaaatttctattctgaagttatgtatatttaaaaccatgtatattcatggctgtacagtgcagttattaagagctggaaaaaatgctgcttatttttaatcaggttgacacagtggatttattaggattttcctccattttatgagttactcagaatctttcttataggaggtggagtgagttagaagagagacgtattccttcaggttagagtcatcttccaagtgagtgtctattcccgtcaccactgtttctctgagattttaaagtgttcagcactgcatggttttttaaaaagcatttcctgtgattttcaaaatattttcttaggctttttttttaagggcatgtatttctctttcttagtcaaaaccgattgttggctaccagcttctttgtctgggacccctatgtgtgggagatgtttgggactaagggagtttgttagccctactgacatttgtattgtttaaktggaactagctattgaaaaatgctaacacaaaacctcagctattcttttattaatgtattaaaaattctgaccaaattaaaacaaccaggagagccttgttgagcctgaatctgttaggctatgaaatgcaccctgggttttgaggaagaagtgagcacatttatagccttaattactcatttgggatactacagtctgttgccaaagccagttatcatcagctttgattagaaatcaggaaagacagctgctgaaatgcagagtgaaaagaattgtattggattagagtggcgttcttttgaatctgaaagagaaggaaagcatctttgggaaacatctgaatatgcatttattttaataattcaatggctagaggtggagtacagtacattgtaagttggagtggttttcattattaaattaagtgcctttgtttagttcatctagattttcctattggctgctgcttttttctctttttgctccattttgatgcaatgttatattcctatttgtgggttgaaatatgtcagtattcataaactaaattcatggaccacccttcccatcatttggcctgatgaaacaccatttaccagtgtgaagccaagccaggagacgcatataaaatactgcatccaaatgctaagtttaaaaagacaacatgcttaattcccaatcctacgtacatggagaagtactactttgagctttattattttaacaatgtaatgtggggttataatatatatcagaataatgtcctaatcaaatgtccctgagtaaatcaaaatttcagagttatattcacttgtatatgttcatagtttatgtaatcaaaagatgtgtcaggaagatttacttcctgccttttgaaagctgtttgagatattgtatggaaatttacatatgagtatttcccccatccttaattaaacttgttaaacagcagcatttctcctatttctacaaaaaactatcatggttgttaaaaaatatatatacagtgcgtatagaagtacacctaacccttaactaaataaataagaatagttgtgtttatattcatatttgcaggagagtaaacatttatgcaaatacactgaagaaaattatcaaacactttgtctccatgtgctctagcttcaaagttaaagctgagaattttcacccagttatttaactctaggcagtgtagtgcttaaacaaaacaaagataacattctgtacctacacaatggatcaaaacagcttccttcatcctcactttggaccatctgtttaaaagaaactaaaaaccctcaggaagcaagcctctcatctgtggttaagagtttacagacacatgctcattctcacaacccagcaatgtgtatcgagggctgtrataggttttgtattagctgtaaaaggctagttgtcttgacctcagcatctgtccgttacagcttctctgttattcggataaatttaaacactctttttgtagaggatctaattttatggtattttaacgtcaactttgataaatattgggaataatattttccaagagctaaattattcttagtttccccatccttttaagaaccctaattctcactctccccctgcactcccttgatgaaaagagttgcagtcatccagacttattggagaatagacttgattggtgctaagagaattgtgaaggtctttagccccacattatttcttattgaatcccactaaaacttttgaaaatttcacattggtttaagagatttggacatctgttaacgttttccgtcttgagtactagcatgggtctaggtctgttccttcctgtaaactagttgttgcaaggcggtcagggttgcaagacaatttttccataataccaaacaggaaaaacaacagtagcgcaacaaaaggtttctaccttgctaaraggaaaagaatatttttataattaaagcttttagttatttgtcatatactcattatcggaaaatgttgttatctttagtcctgtattgacacaaatgtgttacgtgttctttattatagttgtggaaaactttagtaaaggtggtattaaagtagtcccggtcaggcagccctggaaactgaaataaatggaataagagtgggaaataaaaaaataagcttcaatatctgtgtttagcccagtaaatggtgtctattactacagatgcagttttcttttatggatatcactggacagacagtaggctgtgtagattgtgaaatttagtcatcatctctccagtaagtgctctctctccccatttccttagatcataagctgtaggttacccatattatagccgtcacataccccaaaactagccttgtacttcaatagatggttggattaggtataatctccaaggtctttttaaactctgattccaacatttggcattcaccagctatagagaagatgacattgtcctagtgacacccttttagttgtgcagagttttctcggtatctctgttaattcaaatacttttaaaagtgtttgaatatacttatatggttggatatttttagagagaaataccatgtttggaaacatttcagctggmaaatgcattgaactggatattgtcagacattttctgagaacaaatcaaaatcgtttagtacaatgtaaaatataaaagamatgcaaaagccagagcaattattgcaaccttccttcttcatacatatgcatacctgactcacattcagaccagtaagaccacaagtggatatcattagtcagaactcggcaagatccaatttcatgccagtcacattcacacacacacatttgtttgtttatgtcagtcattagaactcagtaactaaacgtcagtggtagttaatgtggcgttttataaacacatagatgaattggggaaaaaaagcaaattatccacaaatagccaccaattgcaaataatgccatatccatcacaaaaatatctatgagtaggagagaacacgacaagggcaaacaatttgaatgaggttatacaaaaagtcaatgtggtcgactctggaagcatgcctagaatcttaccaacctatgagctgattctcacccaagtcattgtcatgtttagcagcagaattgggctgactgcaaatctctccgatgcttcagccctgacattagcttttatagttccaggaagatttgttgggaatttcaacctagtaatttaagaagcttttatagttctataacataataattttacctttaaaaaatgaatgaagaaaatatggcaaaacttaataaattcacattaagcaggagaaagacctaactaaattagtaatctgaattgtagaatatttttaaaaaattaatagtaacttaattactgtcagattcatggagttccttggagaaattgctttggcaaatagataaggaaaatttacaaatagcacaaaacttggtaaataaagcaatttctaaagaatccgccatggactagtatttttaagttattttctccataaagtgcatgtatgttatcaatttgccttgcaaaatcatttttataagaaagagagstatttctgtttttaccaattatttgtggtatttgaaagtcattcatttacaaaaacataagaatgatatccatttactcattcattcattcattgagcaaatatatattggaggtcactgtgctgggtacatagtggtgagttcaataaagtccttgccttttctagcatgggggatgggagttaactaaaaaataaaataaatgaataaatattttgtaatacattatgataagagcataatcaaggtgctgaataatttctttgggaagatgacatttggctgagtactgaaggatgcaaagaagtcattcatgcagagaagggaggaaagagccacccaggcagaagggagctatgtggacaaagcaaaaggctgggagatgtttagcatgggccagaaactagaaggtagtcagtgtggctacagtgtgttgagtggtatgggaagaaatcagagaggtatgtggcagatgaacctaccgaggcaaagctaaaatatgaaattttattccggatgtcatagggagccatatagtgttctttagattgtgagcatagtctgattcataattttgaaacatcccaatggctttttatgagggaaactgattacaaagtagttgtatcagccaaagtagttatatcagtagttatatcacaaattgattacaaagtagttatgtatcagtagttatatcagaaattgattacaaagtagttacgtatcagtagttatatcagaaattgattacaaagtagttacatcagccaaagtagttttatcagtagttgtatcagaaattgattacaaagtagttctatatcagtagttatatcagaaattgcactaggtacttcaaacagatgagatttagtataggggcttggttacacaggtgttggaagtagaagaaaaaggcaacacagggtaactggagataataactgcagaaggcagctcccacatcacagtgcagagtgtaaagggccaccttggagctcagagacagacagtaggtgaatatccagcacagtgggcagccttgaggcagggaagcctgtgtgagggagctgctgctgctcctgggacagaatcatggaggcttgcactaggaggtgggatgggatagaaataaatagacgagagagcgattttaaacctagagcctataggacctgatgcttattgggtaggaaataaaaaatgactggcaagattctgacttgaacaactaaatatctggggcactgctttttgagatgcagaaagcaagagaaacaggcttagagcattgtaagtgttgagtttagaacatgctgagtttgagatgtcaagcaaatggttagatatgtgaatatggtggacagagaagacatgtagactggagttatggatgtggaaatcaacatgcagatggtatttaaaaccatggaaatggacgatatcatcgagggagagaatggaagagagagaagggctagttytgagcccttgggaatytcctgtgttgagagatcagtacagaagcgacaaggagcaaaggaaactgagatggggtagcaggaataatagaaatcaagagaatgcagtcctatagaaaccaagacaggaaggaggcagcagtccmctgtttctagcggacctaagagatgcttaagatgtaacagaatgatgtccatggatttagctacatgaggatatctggctrcacgcctgatggggtagtaggctgaagagtttacgggaggcaagggcactccattctgacacagagagtccaagggaatgtaaaggccaaattgtttcctcagttcagggcctacttggagctaggcaaaaaaaaaaaaaaaaaaaaaattaacatttgaggatgggccrggcacggtggctcaggcctgtaatcccagagctttgggaggctgagactggaggattgctggaggcccaggagtttgagaccagccttggcaacatagcgagatctcgtcactacaaaaaattaaaaaattagccacacgtgatggcatgtgcctgtagtcctagctacttgtggggctgagatgggagaattgcatgagcctagcagttcaaagttacagtgagctatgatcacaccattgcactcccgcttgggcaatacagcaagactttgtctctaaaagaaaaaaggaaaacatttgactatacctgccaggaggcaacaatcctacctacccttcccagttactttctctatattgtaatttggggaccaagttcttgtttgtattgcacaatattcctttatgattttcgtgttgaactttcttccaacatactgttctataaaagaggaacatttcattcacgtgtataaaagtcatcttgtttgaaaaatctcagaagataagttgttgggattttaagtcctgattaaaggtttgcctctcgtgaggtctaaagagaagcccacatggccgtgttttaccaggtttcctaaactgtttaggtgtgtgctgtgacgctgcagagcagagatgttactgtgaccttttcaagctcccctttctgtctgtcatatccagktccagtcatctttaccaaatagatagggtcataaaattgcaattgactggagtccttggaagaaacattttgtgagttttatcagtcccccaaatatctcatatctggactaatagtataatttagatattgctattgaatacctataagacgtggtatctggtaatattatctcagcagcattaacctctgactctgctctcaaaccaggattgggaaagtgaagtatttgcttaatgattgattaatatttggacctttattcgagttctgtgaagcgcctaacatagcgctgagtgtttcggcctattatctcttggtatgtaagttatctcttagtttgctttgctgctataattaaggagataagaacagaaagcctatttcttggtcaaagtgctatttttataggaggacaaaacatgtattgttttactttactatcaacaggccacactgctgatcactaaggttgtgtttaataagtatgttctcttgggccagaatgtcaaatatatccctaatgagttcagtgacatcactgagcgtgcttatgttccttgccaatagtcggcattgttggagcagatgacattagctgtcatctgagcacagatgcgaaggtcagggcgttaacaagcaagagagcttcaagagagaaaaaaaaaagatgaagatttaaagcaaatctgtccatgtcagagaacaatgagtggctgtttagggggagtggtagagacattcaagagaagacatttgcctcatacaagttttctgcacatctctgccctgtggaaattgcgtcagttagagatggacctgaaagatgatcatctgtaagccacagctgccactttgaatgtcgaggtttggaatatkccatagacagccctgacattctaaaattgattgaaattttgtgaccttcagaggtaactaatatatttccagtagtgtgacttctggaagtaatatagttcaggaaccaaaagttgattctttgtagttaatgaacaagttctttttttttttttttttttttttgcctaarattatattaataacactagtgtatgtcaaaaggaaaaaatatctcatgtatatattttttcctgwaagaatagagtatataaagctattttaataaattttgttgaacatgtatatatatgtggatgtctaaaacaaatatgacaaactgagaaatttttgkggctaggatgaacctccgyttttggatacaactggagtaacctgagtttcagttggggttttcttttttaagatacagggtctcgctctgtcacccaggctggaatgctagtggtgcgattatagctcactgcagccttgaactcctgaactcaagagatcttcccacctcagtcttccaagtagctgggactgtatcctcaccccaatgcccagctatgtttaaattttttgataaagatgaggtctcattgtgttgcccaggctgctctcaaactcctggcctcaagtgatcctcccgccctagcctcccaaagcactgggattatgggcgtgagccaycacaccaatcccagcccctagtttgtttttttaagttgccagttgtacaatttcctctctgctctccaaacttgttattttagaatagagagaaaaagagtttctagctttcctggtggttggtttgcattgagaaggaaaaggccaaaatatgacaagacatcctcagtattcagttgactaaaggaaaaataatttggaggaggtagagccagtccagacctatagtcaggtgactagtgggagtcgctaggtatggaaaactttcagtctatttcttctctagatattggccgtattgagatgtctttgtacattgctttttggcaaatatagacaaaatacttaactttaccagtgtgagtttagaacggaatctgccttcatgcagaggtctggagtagaggtagaaggggatgatggaagaggcacaaagttcttccaggtagtacctgctgctgctgggtggaccaggccctggtgtgtttctccctgctcaggaaatccacatgttgaggctttcctgatttctgtggctgggtaggtttatgttctatggtatgtatttatttattggttacagtctttgatttgtggttgctcaatgtattaaatagaaacagaaggccacattgtttcctcagctcagggcctccccagagctgggcaaggaaaggttattcatatttgayactaatgtatttgccttttctgtcrcacctcattgctgcccaagtgtataaatgtgaactaacgcttcagtatttttaaactgtccaaatgcaaataggaattcgtttgagagccacatgacaaaagctagatgaatagttctcacttaagacttttatgtaagaaaaggtactaaaatgcacaaattggatgaataaaatgaaagacatgtttctttgttgcatcagcacttcactcattctctcctttggttatttgtttgcttgttcattcattgcccagtaacaaaaacaacaaaaattgattaggtgtactgaaaacataagaaatatgaggcagaacagagtttgtgacctggagtttttgagcaggttgaacacacacacacacacacacacacacgcaccctcaactagagaagaattatgatgggacgtatgaacaagagcaaaatgatagtattaaagaggcrtatttaggcataacagttgtggaatgtatttaaaaagaagagttggggccagatgtggctcacacctgtaatcctagygctttgggaggtcagggtaggagaatcactcaatgtcagaagttcagagaccagcctgggtcacatagcaagaccctatcactagaataaaattctacactacaataaaaattctaaaattctaaaattagctgcgcayagtggtacacacctgtagtcccagcttactcaggaggccaaggtgggagaattgcttgagcccaggagttcaaggctgcagtgagctgtgatcatgccactgtactccagcctgggtgacagagcaaggttctgtctctaaataaaataaggaggaggaaaattttttaagctgtatttggaggagaggcatctcatgcagaagcagtcatatagctgatgctgagaagctgggcttggtgatcccattggctaggcgtgtggctgttgtgaggactgagtcaaagggacaggggacccagttgctggaggtttggaggctgaaggaaatgataaggaaacactgttatgatgtcctcatcagccctctactcaggagaaacagagatcagggccatggagtaacttggatataaagaggaaagaagtgtgatctcagacgaggtgtggtgactacaggaataaaaagcaaaaaagagagaagcttcaatataatcccagagttacctgcctcagaaacacacgtgcgtaataaagggacagatgaagagagtttcacatggtggaggggatgtctcagcttgcatttgggagcacagggtctgttttttcatttaagtaattttgttgaacacgattcagctcctgtgctgcttaaaatcccatatcttcctctgccattttcatcctaaccaatactttataccagctttattgaagtataatgttcatatcatataattcacccgtttaaagtgtacaagtctataatttttagtaaattcatagagttgtgcaactgtcaccacaatctagtcttttaacatttctatccacaaaaatcccagcagtgttctcaccccagcttatctgcttctgtggatttgcttcttctagacatttcatataaatggaaccgttaatatgtataattttttgcatgtagattcttttttatttttcttccagcttttatgttttggttcgggggtacacgtggaagtttgttacatgggcaaattgcatgtcatgggggcttggtgtacacattactttggcatccgggtagtgagcatagtagtggttacgtggtttttcagtccttaccctcctccctccagtaagccccggtgtctattgttccctctttgtgtccatgtgtactcaatgtttagctcccacttataattgagaacgyacagtatttgattttctgttcccacaytcatttccttaggataatggcagctccatctgtgttgctgtaaaggacaggatctcattcctttttatggctgcctagtattgcatggtgtatatgtgccacattttctttattcagtccaccattggtgggcaactaggctggttccattatctttgctattgtaaatagtgctatgataaacataggcgtgcatgtgtctttatggtagaatgatttatattcctttgggtatataaattttatatatacatatatattcccagtatatatatatatatatatatatataaaaaataattcccattactgggaatatatatatatattcccagtaatgggattgctgagttgaatggtagctctaagttctttgagaaatctccaaactgctttccaccagtggctgaaataatttacattccttccagcagtttgtaagcattcccttttctccacaacctcaccaacatctgttatttttttattatgtatgtatttatttatttagagacagagtttcgctcttgttgcccaggctggcgtgcaatggcgcaatctcggctcactgcaacctctgcctcccgggttcaagcgcttctcttgcctcagcctcctgagtagctgggattacaggcatgtaccaccatgtccagcttatttttttgtatttttagtagagatggggtttccccatgttgatcaggctggtgtcgaactcctgacctcaggtgatccacctacctcggcctcccaaagtgctgggattacaggcgtgagccacagcgcccagccttgactttttaataatagtcattctgactggtgtggagatcattctggttttgatttatatttctctaatgattagtgatgttgattgagcattttttcatatacttgttggccacatgtatgttttcttttgggaagtgtctgttcatgtcctttgcccatttcttaatggagctgtttgtttttgcatgttgatttaagtttcttatagattccagatattagacctttgtcagatgcatagtttgcaagtattttttcccattctgtaggttgtgtgtttactctgttgatagtttcttttgttgcgcggaagctgtttaattaggtcccatttatcaatttttgtttgtgttccaattgcttttgagtcttcttcgtgaaatctttgccatgcatgtggattctttaacttagcattcatctgttcatttaacttagcattcatgctgttgtatatatcaatagttccttcctttattttgcttcatagtatyccattataagatatactactttttttaattcattcaacagtagatgaatatttgggcttttcagtttggggctatgatgaatcatgctgttatgaacttgtgcatacaagtttttctgtggacacgttttatttcccaggggtgagattgcagagttatttgctaagtttatgtttaactttttaataaattgccacactggttttcaaagtggctgaatcattttacattcccaccagcaatgtttgagagttctaatatagtcacatctccaccagtactacttattgtctgtctagttttttttgagacaaagtttcgctctttcccccaggctggagtgcagtggtgcgatcttggctcacagcaacctctgccccctggattcaagcagttctcttgcctcagcctcccaaatagctgggattaccggcatgtgccaacacacccagctactttttgtattttcagtagagacggggtttcaccatgttggtcaggctggtctcaaactcctgaccttaagtgatccacccgcctcagcctcccaaagcgttgggattacaggcattagccacaacacccagcctattgtgtatcctttttattatagccatcctagtgagtgtgaagtggtattttatgattttaatttgcatttttctaatgatgttgaacatctttttgtttgattaatagcctattttctttcttttttggtaaactattcatatcttttgcctccgtttttataagattgcttatcttcttactgaattgtaagtcatttatagatctgggtactagtctttgtaatagatatatggtttaccagtgtttctcccagtctgggacttgtttatgtattttttatttttttaatgcccaaggttacaacaatgtagcttgtttcttaatttacttactgttgtcttttgaagtataaaagtttttaatttcgatgaatccaatttttcaactttattttccttcatcatgcttttgatgtcatatctaagaactctttccctatcccagaaccatgaggatttttctcttatgttttcttccagaagttttacagttttagctcttatgtacatgcctatggtccattttgagataatttttgtatatgagatgaggtaagaaactcaagttatcttgctcgcatgtgtatgttttaaccgataattaaaacagaccagtctggccgggcatggtgactcacacctgtaatcccagcactttaggaggccaaggtgggttgatcacctgaggtcaggagttcaagaccagcctggccaacatggtgaaaccttgtctcaactagaaatacaaaaattagctgggtgtggtggcgtgtgcctgtagtcctagctacttgggaggctgaggcaagggaatcacttgaacccgggaggtggaggttgcagtgagccgagatcatgccactgcactccagcctgggcaacaagagtgaaactctgtcctaaaaaaaaaaaaagagaaaaaaaactagtccagtctgcctggtgaactttcatttgtcctctggaacccatcttggatatttaagctctctgtggtactttccgtgtcctctcttctccactctgatacagcttcctcctacttatctctgtgtacatttgtctgttgttgaatatgaaatccagtattgtcatgatgtgtatatgtctgtgttccctactggaatatgagcttattcatcttggtgttttcaatggctgaaacatagtaggacctaaaatatttttggttaaatttgattaaatattaacatctctaaaccttgaaaatcttggtctcttttttttctgtctctctttcaaaatttaaaacagtcaagcatttgaaacaacaacaacaatgaaaatagagccagggaaccagcttgttcaggaaaaggaataaatcattctagctgacartactcagtagactgctttgtagctttttgagatagacatataaaaagggacactgatttgatggaacttgaacaggatgatggataagtgctccaggcctaatgaaatagcatgtctaagaaaacctggaaaccctcagatgacagcagacacgcgaccagttccacctctgctatttactcccagtcattctgcgctttgtttggccgagggtttcatggccccctattgattgcagagatgggcacttgtccctctgcccgccctgtgcacttcctgttatggcacctaagttttcctacttcacaggtgtgacaacaaccagtgctttagagagttatcttaaatttgctgcactggagtttgtttatatctctgcatattcaggtgagaatctagtctcctttctccgcagatatttactgaggatttagagtgtgtaaagctctgtgccctgtgcctgtggaagacacatgcacactcgagtgacacctggtctcttcccctgagggggagtttcagtatgcttaaaacactgatgaaagaagaagaaatattgctctaattcccccatgtacctctgcaaaatcttgtgagatttttgccagtccagctgagaagttatctttccatattgtcaacttaagcaggattcattgagcaatgtattcagatattgatcgtcttaactgtgtcttatgaaaagcttttaggtcaatctcttaaagtttgttgttttgagacaggaatataagggcgttgatgattataggatctggctcaggctgtcagaatgagacgacttctccctcctgaggctgacctgcttaggagtttgaaccatatcaaactgtaaggatcaagtacaccctcaaggtttaagaacaagcttttaaaatatccacctctattgtctcgcctctgatgtagtttaaaacatgtcatttagaaaagtgattaggctgggattagagccatgaagacctgggttagaatccaggggctgccacctgctggctgtgtgtccttgagtgtgtgacatggtctctgagccccagtttcccattcwatacaagcagtgttcacacctgtctcacagagatgttacaaaggttaatgaggaaatatatagaggctgggtggacctaccttgtgcataagaagttattaatagatggctgtcattattactgttttcagctatttctgtgctgacatgaacttgattatgctaagcccatacaatttctctgtagcagtctgtagctcatatggtatctcttgattgttttttatcctttagagttcttgttaagtaaaccacacattatggatatggtcaaatttatctctcaccctgttcgccttcccccacgtaaagagctaagcagtctcctgagatgggtctgtgtcccttggttatttttagaaactctcccaacaataaagaaacacactgattcaatagtatctaatatataacctgttttcaagttcccttaattgggatagtttgttttcgatctgggatcctgttaaatgtatgcattgcttttggccatcatgtctttttcagtttcttctcacctggaacgttcattctcccacccttcccctttttatgtccctcttgttggtggcattttggcggaatctgggccagttgtcttgtgtaacatcctgtcctccaaccctgcctggtggcttcctcctgccctgcgagccccatgaggtgatgggacagtgtggtctacaggccccgtgtgtttcctgctctgcctctgctctccgaccccacacgtccagcttcatctctcagaacctgcttctcttccaactrtgggacttaccgaacacagagggttactatgagttcccaatgagatgactaaagggaaggcctgaacaattccgggcccacggtacacctgcraaaaggttttcggcagctgaataggcgcaggagtgctgcccagagaggtgagaggagagccgggtgggccaggcgaggatgggagcagagagtgtcctgagygtggtcaaagctagcaaatgcttaagrgagcggttttgtttttggtttcctttcttggacttatcgtgctgtgatttggaatacagaggagcaatgtgactctgtaaactgaggtagcagattcagcagggctgatagagcaggaaagctccctttgaaggtagaaattaagtaaagtgctgatccagttctgagcatctggcaagtgctttctggaccttggggacgctcacagacctggggtaccttcacataggtgagaaccacactctcccttcaccaccagatggatctctctctctctccatttattactatcctggttatgccagaaagcttctgctgttgctgctgtttgtgttttcacatttactgcaagagcagcgaggtacgtacatagaaggttcctagatcttgaaggggtctcccatttggggcctcatgctgtcagtccctagtaggagggaccgctttctgcagggcaaggggaaagtcctaatccttcctgggcaggccttagttgtccttaagccactccagggacaaagactgactcaaataactggctgctggtcggtgctagctgttaatacatactttgtgagggcttgtgcaaaatgaaaatgctgggccccttattcagagcgcaagaaaaaatccctttaaaggtattaaaataaaaggcatgtttctttcttctgtggtctccttcccaacttgtcatgatgtttttaatttgctattgaatgttactctaagaaaaataaaataaacttttaaatcattagcatgaattttacctttcatctttatatagtgcaatgctagaggtttttaataaaatttaccatcttaaccatttttaagggtacagttcagtaacattaagtgtattcacactgttgtgatgaacgtcagttttaaagcaaatgtaagagcctttagctggtatgtagaatcactgaaatgacataactcgtatttcatagcttatacatgcatgtgtattgcattgtcaatagaatggtgaaacacaacacaaaactaactcagcggtttgtatctcatttctttacacatggacattgtccccacacccttgacttttggcttactgatgagtaaggaaggactaaaaggaagggtactacaggttgcctgatctttttctttctatgtcatctttggtgtaagtggttgactaacagagatataacacacttgttaagaaaggaacggatagggctccctggtcattcgtgttttatagaatgccattgccttctttctgcattaagagcaagttctgattgctaagagagtagattttaagtattctcaccacaaaaaaataagtacgtgaggtcatgcatatgctaattgatttagccattccaccacctatacatatatcaaaacatcgtattgtacaccataaatagctacaatttttacttatcaaaaaaaaaaaaaaaaaaggcaagtcctggtttgaatggaaaagagtggcctcctgaggctctcagcacctctgcggaactcccaggcttccctggtccatgggaagcttgcgctcatagggtgtcaagggtggccatacaaatggggctacaaggaaagcggtggacatgcacatcaccggatggcctctcccatgcaccatgcacgtgcgcctttaacccatcagacttcacttatcaaagataaaatagtgagagtggcaagacgggaacagcagagcccctccatgcttgggttctgtgtgcctgtcagggttgcacacccacggaggaggtcctgctcatagcagatgtttcacccagccctgcaggaagggaagatattggggatggcactgcttttgggagccccttaaatcaggccatttgaagtggccagtccgtctcccaaaggtggcccygctcccattcctwgccctttcctcacattcaatagctctcscgctgctatcccagatgtaatgcgtgggtaccaagaggtgggattgggtaggctttattagtcagaatccatttaactaattcaaactgtttggggaatcatagaaccatacctttatgaaatatgtagcacattagtccccactgtgaatatgttattgaaccaactatgtgctgagaagtgcacataatcttcccaactaggacctaagcagaaggtgccatcacccccatttcacagcttaggaaatggaggccccaagtaggtaaggcagaattaggcattcctccattgcatttcgggtgcctgtattgtggtttcagagctttgtcaatcaccccctattcagagggctgaaggaaaacttcactctctgccaagagtcaccagccctctttgaaacagctctkgtttgagcacaaaatcgcacaggtaaaatgcactctggggtgtgaggcaccaggtgcgatccaagtagagaaaagtgctcattattttgaaggttacaaatggatttcaaacatgggactgttcttttggttacttccggagatgaaagtgcaattttcacaacatactttttcaaaagctatcagaagcttcatattttttaaaaaygygggatgtcactccctatcgtctctgtggttcccttgtggttgaatattttaatcaggtgtttctgtgctttaaagattttttcatttgatttacaacttgtaggagtggagttgcagtgagtaattaggaagaatgccataaagaggacaaaaggaaggtgaaacccagcgttaataattyagtttcaataaccttaaaaggtttactgttcacttttaaccttgtatcccaaaaagcaagctactgcagtgaatcataaaaatgtttcttttaatttgcaagtcatttatctaagtaggcttacagggactgatgcgttcgtaaaacaaaaaggtcatgaaatgacagcagctgctccattccatcctggccatttgaggtcgcctagcctttgattggaaagatcttagggtttaaactctgtagagtcttgctttcaaaatttatagattagtacagtgccaaatttagtagcattttagttagtaccaggcaaatcaaaatagactcacactagtggagaggcaagaagagactagaagtgatttttgatggggacaaaatgactaagagatttacaggtgatatttaaatcctaacatcaaaaccagggggcaggctgaggttaggctcggcaaggaacttcgaaacacctgcaaactagaaattttacatctcaggaggcctgctaaattaacagagagatttttcacccagatctcattaccagccctattaaaacaatccctgttgaacattctactacgccattgcatagaaaatcaccaggtgcatgaaggtgtgctttgtttcataattaagaggggggtgcatacccccgctaaagtggaagagctaatggcatcttttgtggggtttcttcctcatctttaattaaaaaatatgtaccataataaatggaaccattttttttcctggagttattttctttctgctaatggagtttgtcagtattttgtttctcagtgtttcaggcattctctgcaacatttcctactgccaggcccctctgccacagttgggatatcagcctcctaagaccgccttctatgattgcccttgaaaaaagagggaggctgagattattgagaactccagaaaatgggttactagattttttcattttgattttgacataaagtgggcaggcccagctgaaaaagtgaactaataattcctatacctttaaaggattttgactttttagcgtgaacatttgaagtgagttcttcttcctgctctaggcctttaaatactatggctacttttggcccatcctgaaatcytgtgatgatttgaactatttattcggttttggttgatggacttggaatgcggatctgatcttaaaataggaatcttgatgggctattattttcaggtgccactgattatagaacagttaggttttcaccctttttcttcctctttctggttttgcatcccccaccccacacgacatccctcctcccccatgccatstcccatcccccatttcccatgccctcctcatctcctgtcctccatgacctctccaatccatctttccactcatggctgattcttctttttttcttcctcttccaacttcttcattgctgtcacgaccttctttaaaataaatttgaaaacttyaaaaaaaaatttgtttttctcttggagaagtgccccaaatggcaaagtatttcccgcccttcccagttttaccagtgatttgctaagtagtccgtctgttacttgggcacatctcagaattgagtaggtttgtggagggttgggtggggacggagtggttagaagctagtctgctttaaatggggcttagagatactctcttgactcacatcttcagggtgatcatctgtagcttgttttttcatggtggttagttaacagaagttgattatgagatttttctggtcctatttattaatttattcattcagcaaacaatgacagagcaccaagtgtggtcctgtgtgccaactcctccaactcctatactaagaatgaaaagatgtcatgtgccttccatagaattttccagaatagagtctaatgggttgagaagtcctgagattcagagcataatttggaaactacaagcatctgaaggttaaaagaccaacagtcaggtgtgcatggtgttccttccttgtcttgaatctcctttgtgagtgatgagtgatgtttcagggacgtaggggcgtgcaggaggtgcctgtggaagggaggtagtattctggcatcggtcacaaacatgagcccagatgtcatgtcttcagaggacagctcctgccccccaatgtgtccagttcccactgtcactcttcatgacttcattatattttttaaggtatccgtcaatatctgaaactacattacttatttatgtaccttttggtgtctacctccctctttagagtcgcagagggaggaatcctgcctgtcttgttcaacattgtgttcctagtacctagaacaaagcctgacctgcaataggaattcagtaaatatgaactgaataaatatcccacgattcaaaatccaaaagcatctcacccttaggccacagtcatgcatgactgcctctgtacttcatgattacaaagcttctcctcatgcactgctttgtctcagtgcacgccacgagcatggttccatgcccgtctatccctgtagtctgctgtctgctccaaggtgtggcacttgacacaccggccccccatttccttatccatgaagtgggatcgcaccacctgttacacctctgtaacgggcattttaaggatgacagtaataatgaattagcctttccaaaagcttatccttatacatacaagtattgagacttgtacaaagggagtgtttttacaagggtagaaaatgatatgtacccttccttttttgataattcaaggacaagttgcaccaaagctgtgagcagtatcagatatttaacactctatcttccaagtgatgacgtgtacgatctagttctcccttcctggagagagacagagacagcgcaagaacaagcaagtgagagcacccagggacagggaagcagtgaggtggacatcctcccaccgagatgttgatgtctaaggcaggccagagttactggatttcacactgtgtcttccataccaacccacsatttcctatcacccacactatcacactattccaaggaagaagaatgatgctctgatggataagcgtttgaggtttcataaccacagaagtcatttgtctaatatagttaaagagacaaatatttatataaatcaaagcatttctttttctgagaagaatgtcattcaatgaggatggggatggggacagagtttaaagatggcwtttgctaaaaatgtggacccaagcagtttcctytaaagtgtaattggctgtagtgttaatctttatgtccatagtcaaggaaatcaccattatagttttcacatgtgagggaagtcagacatgccttgtttacattactgccatttataaaacatttaaagcagctattctgctgaataaacattcaagagcctgaaggataagcatatcacttaaacttcttaagrctaaactttccaaaccatttcctgccagagggacccaacagcaaaattgcaaactctgtgccctgagatgagataggctgaattagattaagcagcttactgttgacatgtctattgatctgggttcagtgcagtttcctgtctctgccagcagtcagattgctgtatacaataacacagtgtcctggtttatgtgaaattggggactccaagcatcaattactccaggaaggcagtggcactaggagataaggttaagccgcttgcagtgtttaagacggctaaaatccaagcaacatatttgctgtctaaaatgttgcttacaaatttgacagtgttccatttataaaatttccaaagagatcatccagtgttgttctctgcaggtagtcgtacaaatagcattatgaatgcttattgttaaagtggtatatcccacttgctcaatttygtgcatgtttcctaaatatttgcatacaaatattgagctgggtagcaggacatcaagaatgttgtggcgccrtcttagaccatcagctgtgcccaaatgagggaatgcagttgatgtaagaaataagtgtcgaccatctgacttgggtattttcttttctctgggaccaatcaagtagattcagtcagctactctctttgtatttctaatacccatttatttgttttcatagagcaattatttttctaaatactaacaactacatatttaatgcaaaaagtgtatacaatacagaaaagcaaatgcaaaccacaaatgtcaccacccgatgacaattattttgaatttttggatgctaacagyattttaagtattatttttaaatacaccctcctccatccacctgtgccagcgtgtgacacacacacttctttgctaagcactcatttaactgcgaatataattcgctatcttttttgattaaaggaaatatggctttccttagaagattcttacctcttgcagtcctacaaacgttatagaaggatagaagttaagcctatgtttatgtacttctgaagagtgtaactagaagacatttttataatccatggagttggaactcttcaaaattcttgatgggtcagctctgttcatgcaagttgtccttaagtttcatgcttaaaatgtaacttcttatttctgtaaaagatgttcacagagcaaattccacgctttcttgtgaaacatatgtgctatgaattggattaaaggatagagttttgaaagtgacatttcagcttgcctatcatgacattttatgtatttttcaatacatatttatctcagaaatatctcccttactttattacaggtagaaacagagtttcacataaaacttaggaaatccctcaaatacagtactgatggaaaccagacctggaaatttgacaagtctgggcacagtttactaacttaattgtattttccgggctgacctcctgagattggtactgtcctcaataagcctttgcaacattcacaccattcttttccattttataccttccaagaatgaggcaaaatgagtgtatttaaagtgtatttagcgtttattggcaaagtttyaggttttatcttttaatgcaattttaattggttttattgcaggattgatgcaagatgcccggaatgccaataggtgagagggctctaataagcaaaatgggccactgcaattactgttgatctgacaacccttaacaaaactagcatgttacattcctgactgcgtctcacccttaaaagaaaccaggcctgatcattttagattttttttcaaggggcctagactcttcgaagtactgagaattcctctcatagtctttctttactgaaatgtcttgactttgtaaatttttaattatcttcaaaatgtcacttctgatgttatgcttctcctgaaaaagagggtcctctctgtatgatgctttcagatatccgttatacaatgatgaacccgatgtaaacaaccacactttaaaataatatatttttttttattttttgcagagacagagtcttgctacattgcccaggctggtcttaaacttttggcctcaagcagtcctcttgcctgagctcccgaagtggtggaattagaggcatcagccacttcttttcatttatatattggttgtggtgtctgcaaggaagagccaaagggaggctgcttttctctcccatgtgcccagaarcgggcatcaccaccccacgttgcttatgttgctcaaaaccataagggcctttgtggtcagtttagcttgtcattgatgatgtgcaaggaagaattattaaattttttgataagaatcacatgtatagccagactaataatggcaataacattattaggactttctgaaatcgcaacacccactgcctccaatttgtgaaccctgaagagctataaatttaggtactctacttaatcaaaagcatccacacatgagaattaatataaggccrgcacgatggctcacacctgtaatcccagtgcttgggagcctgaggcaggagtatcactcgaagctaggagttcaagaccagtcttggcaacatagcaaaaccccgtctctacaaaaaatatatttttttaattagctgggcatggtggtgcacacctgtcattccagctactcaggaggstgaggtgggaggattgcctgagcccagaagttcaaggctacagtgagctatgatcacaccactgcaactgcactctagcctgggcaacagagcaagaccctgtctctaaaaacgaaacaaaaaaaagaattaatataaaaagataccctgcaaaaaatcaaaataagttgaaaaatgtataacagaaaaaagtcaatcgtttgtcattatcacatgaaacattcatgaatcgtggagcagcactgcccacgtcacctcctgtcctctgctgccaggcagtggttttaccttgcctttatccctggtatcatgtagccatcttatctctgctataggattgagagccctttgaaggcctctctcttttatctttacacctcccacataaccaaataggaaaccaaacccttataattgtctgtaaacatttatgtaatcattaactgagtcaagttagaccaataggctttccaggcctgagtggaatgtaagaagtgagaatgaaataaaggttggcttcatctgcgctgtggttaggacatagttcatccccaccaaaactcatattgacgtttgacccccaatgtggtggtgttgggaggtggggcrtggtgggcgtgcttgggtcactgaggcagatcctcatgaatagattaatgccctcccataggggtgagttcttgctctggtgggagtggattagttcccagcaaagcagattgttaaaggagtccggcttcctcagtttctctttcttgctttctctcttgccatgtggtctctttgcacacacccacccccctttcactttctgccatgagttgaagcaggctgagacccttgccagatgcagctgcccaatcttgaaccttctagccaccagaattgtgggccaagtaaaactcttttctttgtaaattacatggtcttaggtattctgtgatagtaacacaraacagagtaagataatgtgataaaacacttgggcaagctttggaaaggcctaagatagtgtggagagcaaagagaagccagtgaatttttagggtgactgaagctgattttaagagtgaaatagatgaagaaagatgaaggggcttcgagaagaatgttctgatgatgcctctgagccygaggtttggtggcagtgttggtgaagataagttagactctcctggatgtttgcaaggcctctgaactggtttttaatcatgagtttctttttttccagttcatcctcaatgtaagggttttctgaccaggttgaactcctgatttattaatggcttttcaagctgctccacagaactccatccacctctgcggcctttgcccccctcagaaccccccctgccccaactgaccttcccattgttccctactccacgaggggctgtagggcgcaccaggtacagtcctggtcttgtctgccttgtatttttaacattttatggtgacacattgggagttatttccctaagtgagacccttttctgaatatatctgtgccctcatagcctagcagagtattcagacttttgaatgatggaaacaaagctgtgrgaaaagagcagaatacaaaataacaataccaatttgagctagcagacattgctgtcaggggtcgggctagaaagatgagaaaaactgaagcctgcttagagaggtgttgacaaccaccagatccagaagaatgacctagataacagggcttcaagttctgacatgattttattagagatgtttcagaaatctctactggagaagttgtgggaacacaggggaataaagtcacggggatgggggaggagtcatgatggtaagtgttgatttccccagcatggatcacctgatagcatcatcagttaaattaggataatagcgatttgagcatacttaagttagtagatgcaagaatgggaggagagggcagaaatacacatggaagcaaaatagagcagaaatatatgggagcaaaaaaaaaaaaaaaagttgagcactctgagattccaaagaagtaacatcttacgtgatataccaaaaagtggccttttctcttgatggaaagaaggaagtgtagtgtccccaaataccagaaagagccttgggaagatctttgggataaccctgggaaggtggagatactgatatgctcacagacagtgagactcctggggagaggaacaggcatctctactcctttttctttttctttctttttttttctttttttgagatggagtcttgctctgtcacccaggctggagtgcagtggctcgatctcggctcactgcaatctccgcctccagggttcaagcaattctcctgcctcacgctccccagtagctgggattacaggcgcccaccaccatgctcagctaatttttgtatttttagaagacgaggtttcaccatgttggccaggctagtctcgaactcctgatytcaagtgatccgtctgcctcggcctcccaaagttctgggatgacaggcgtgaaacatcactcccggcctccattttytaactagaactttgctcccttcctctgtcgtttctgctttccctttttcttctgccttctctctgcgtatgccccactcagttctgagcatttgtaagtgtatcctcactcccttcccgctggcctaactgtgatctgaaagaggaaacacacactttgtaggaggtgacttggcagaggcaagggcctaccagggcttggggtcacacgggccagaactgggcccaaatccttatgcagcccccttctaatctttacgaccctagacacatctccacatctcttggttggaggtgattgctctgccctcacagaaatgcaagaatgaagggtccagggaagagagcgaatgtttatcggtgcgtttcatgagcctgtcacaggctgaagagctgtgtatctgttctcaattctcacgtcaacccggtgaagtagattctgttaatccgtgttaatgagataacacatgcaaagaccttgacacagttcctcactcctcctaagcccataaacatgtcacctgtcctcccttatgattggtaggtgtcacctgaacaggtgaaaaacagtacgttcctttaatattgggggcacagggtcataggagagtgtgcagccaaccccttaccaccacactgtgttgaaaagtcaagtcaggaagcaattgtctgtattcctaaatgaccattgtgcactgaattctagttttcctagaaattacatggttgaaatcatcccagacaccctatttcctgagaaccaagtccaggcygtggctgtgatgatagtgatgtggtgaacttcctctaggagaccacagagttagagtcactcttgttgaatagtctgagcaccttcccaggtatcaagtttttgatcattaatatctactatgtcaatcaggagagaatgatcrattatttccactttgtaccgccggatgtatctcttctccttgtaagtagaaaggtcataacaccttgagctgttacgtatactccacaggccagcaggctccagtgcagaaggtggtgtctaaaagaaatactccccatcgccactctgcccaccaaatgtctcaaccaacatccacacgcaaagtatgtggggcaattcactagtgaaagagtggttctgatttatgttaacatgtcatggaagaattaaaccacaagcttactgaataaaagaaaactcaaatattcctcatactcttccaattcctcttctctccaccacctgcactacacacacacatacatacatgtacaatacatgtgtgagtgcacacatgacctgtttttgcattgattatgataacagagaagataggtgtttatatgttatatgttgggaagttcttagtcctggcctcgcattgagcacatttcataaagacacagtatcactcacatgttcacattttgttatgaattctaaaacttcctagccttgcaatgtatggctaattttataaatttacagcatataaaatatattagaaattcaatgagtctcatctccactaggtaagatttttggtaactgaggattaactttacatataaatattaaagtggtgacttattttggatttctatccataaatatcttacctgatacagttttatcattataacaactttgtgataaaaataataatgttaatgataactaataatagctaacatttactaaatgckttctctcccaagaatttgcatgcattttctcatttggtttctgtagcatccctgtgaggtaagcacttttttaaaaaaccacattacagtacacagaatatgtagaaacttggagaagtgactcagccaagaccccatagctagtaattggtgggaaccaagatttgaacctatgtctctctgacccgtttctttgctcttggttaggaaaactgaattgaggaatatttttctccatttataaaaggtgttaatttttgactgccccccacaacacactaatatctaacattaattttaatatcatttatctcacagaagacagaatcaactatacttggcktcttgaagcaattctcttcctcgctcaaactccgttactgcccctgatgacatctccacatcagctctgccttgttcatgtcgagaatatttaatagcatgacattaaaagaatccttggggctcctgctcctgataaccaaatcaacctccaactacatattctgctagatttttgatgagaaatttcctgtgaaatgaagtttgtttctcattcaaacaaccagtgcatttttcagtgaaagtgctgttcatctcttgacccaagaaatagaattaaaggaagaagggattctaggtcacccaagtagaaagaaaatctgaagtcatctttttccctctagttaaagtttactttgtcttacattttttattcctagtcagaatattatatgtggaattttagtttgcatgaaaatggtcattctcaaatactcttttcaccataatgtatctattagacaagtatatttctgaaagcttaaagaacttgaggtatttaaattcttggagtaattctaacatgtctgtttatttatagaggtttcaaacatttaatagtcattgaagaactgtgggctccctttttaattttttcaatgacatcaaaaccctcgattgttaaatgtctgaaaggaactcagaatgcttgccccacaccatgctgatagctacctggctgcctaggaatctgatggccctcggctccttgaggttcacaaagactgatagctgggtggtacagctcctgtttcctgaacgctcaccctgcatgagcagttctaggggaccgttgggtcacgcttaacacatttctgtagccatctttgcctacctctcttctctgcgtccttaaccctctgcaaaatgatttcacaagaaatcaactatagatgcctgtgccatgaggtgtgatctattagtaaacagccttgttaaaaacgtactgaaaggctggcattcccctggtggtcctggcaaggattcataagattgaagagacatgttagcaacattagatgagaagtcactaatagtgctgttctcttatagaacaattggataactagttatgcaaagcctctataatttggttctgctgcccccattcaggccacctgcagacagtcttcacttaggcaccatccttattgccaattacttttcttcgctgaaatacttcttctttaatgaatgttattatttacactttgcagagtagttcatgacaacctgatttgacttgtgtccacgacagagacttttattttttagaagacatgtaagaaaaaaagtaaatcatgtgttcatggttatgtctctaaaaaatgcaattctgctgawgtgtagctaaagcagcctattaattagcaaaggcacttaaaattgttttacaccacagacagtattcaagctttgagaaataaaaaggtgtgttctttgcatgagaagttcaggcatatattatccagagagagctcattacttttttctcttttacagaaagttagataacagcctcttttgacagaaaaatgtcwattttctgacaaaggaccggaggcattcttcttaaaatcagtcattctgggttttctaacaaagcctcgatgttgttcattctaaagaaaattgtgtcaccttaaaaactagattcatgctgggttttcctatttaacatagggattaagagatttaaaacgaaactcttggtaaatatcagttggaatgtccataaagtttactgtgtctcttcattagtgggcggttttggggatttgtaaaaagggtgaaaatatcatcttggtaaaagaaaaggtagwgtacacatttaacccttaaatgattctgtgccttatttgtgtaacttgctttgtcctgaagtgagtgaaacttgatccatggtgtcccagcctgcagtgacctctgacactccatctgaggaccagggacagttgttctactcccaccattggaaatgcttttgccagaaccccacggctggggtttcactttttctgtgtcctgactcgtttgcattcaattactttaatgctgagagatgtaggaaatcagctccatctctcagcagttagggtgagggttgcttattgaaaacacttgctgctgtgcttatttttaaaatatatttggttacctttttgtccccacccaagagtgacaaaacaaccaaccatttgaatgggagctaatcagaatactgaattttaactcatcatgagcccctgtgtgagataaaggaggaagtatttgaggcgtgaattgctgatgtaggcttgataagtcttgttttcctagttaaattgtaagcagagaggcctcacccatcccaaccaaacacacaggtgagcatacctgygtgccagcacacaccatggcagatggtggcttaaagctgggcacacagtgacagctaggtgcttgtcagttgatgaagctgtgtaatctagagtccaggattgatcctgtgaaattataggtgatactgcttttctctggctgtatgggacaagacctcgatctagtagtgaggtaggaggtgagactttactccagaccagactgaagactggttgaaacagaagaggtgagagcacctctccataagacacacctaccagtgccatgttggtttaccattgctatggcaacacctggaagtttccactgctttccatggcagcaacctggaagttaccaccctttttctagaaatttgtaaataacccatctcttaatttgcatgtagttaaaagtggatataaacatgactgcagaactgctccgagctgcttctctccacccactgcccagggagtagctctgctctgcaggagcagtcagggagatgcaacactgcgtcctcaataaagctgtttccttctatcaccgactggctctggagttctttcctgagtgaagccaagaaccttcccgggctaagccccagttttggggcttgcctgtcctgcatcaataggagctgacaaatcttagtagcccaaggaaggccataaaaggggctcactccaggcaaacgccgcccatttcctatttcctaccygtgctggatttgctgaaaccgtcaccatagtgaatgacatctgagacctgtagtctggtttcataccccaatatgctgaagatgtgcaatgaatagctaggggcgctagagccctggaccagcaagcagcctgtgccactgactgccactgttcttgttcctcctggcccagcagccaccttccacacctgcactgggacctcccactgtgcctctcctcccttccatggacttaagtgaagaggtggtcaaattatgcttgactgctgtgatttatacatgtgaaagggttttttaaatgatccatgtggatctgcttttctctggctgtatgggacaagacctcgatctagtagtgaggcaggaggcaagaccccacacmgccacaggtgctgcccctcctcccaacatcagcatcggtcctcagccatgaagtgctgtagtttagtggcagcagccatcagatgcgcagccccaggggatggggggactgtatccggagcatacgctgtggtggtctgcctgccgccaactacaatggccacagcaggaacaagtcaaaatcctaagatatgtggctttttcttgaccccagaggaagctaggaaagtgaagaggcaggaggaagtgcaggaggtgagtccctgcccatcttcaggcccagcctctgctgccgccatccccttcctctccagctcccaggctttcaccacacacatcgcttcaccctctccctggccgcccacttcctcttcttagagcctggcattcttctttcaaaattcaagtccctctgcttgccattgcrtctgacaccttacygcactcatacaggattaaggtttgtggatttgacttctgaaaactgataaagtgaacagaggagtgtttttcttaaaataattttttaaaaacactgcagatagatttgaatgctttattaatttgttttctaacgcatgaaaacatttttcatttcacccggcctatctagcatgctaagagaatttaggccagataggaatatttatcaattgagttcagatgtcagcataacaggctaaatacagtcagattaggcaagttcaacaaacaggtgttaaagatctcatttcctkctgattctcacctgaaagtcccagtgacctcagcatcagatgtctcttagttgagaaatacaaaatcaaagattttttttccagcaggtgtataacacacctaactgatttcactagagccctgaggctgatgttggtgaaatgtgcttatgatgcaaaggtttacagtgtgttgttttccaacttttttgatgataatcatccccagactcaaattactccctatagttgctataatgatgcaggcacaatcgtttggcttaattacggttgactgtctaaaactaccttcccctggagtcattgaaagttttattggagttctttaatatgattataaaaattaatggacttgtaattaggtataagagaagcacatccaaagtttgccaaataaacaagtgttctacttatgaagtcacacatttctgcttatgagcccataatatagataccacgaattcaaaatcttatgctggcttgtgtttacatcaagaaagatgatttgaaaatgaattcagatcctcttattgtaggggggaatgtaacgtaagcacacccttaggatgatcctgtatggcagatgcatctgaatatgtgttccaagttagggcatccaggagtagccaacccagagattcattccttgtctgtgaagaacatctgagcccccatcctgttctgttgaacacaagctgtatggaggattggggccctgagttttgggttaaatgaaggttgcaaggtggaggtcgttaaggggagggtgttaagtgaaaacgctgtatataaactgcatgctgtttgcaagtggttgtggttttcctacccagmctgccaacactgcgccgtgaggttatgctttccagcctgccaccactggaccatatgtaaggtggttatcttgtccagcccactgccactggactctctttcctttatgtaagccactaataaaaccccatgtgtcattcgcttgctctgggtctctcctttggcctcttgaacttggtgcctttcctattgaggttaatagaggttccacacrgtacttgcaactttctttgaaaagggaatacgttatcattaacatcaatactgtcaacactatcagtaaatgttgatgtrcttacctttctacataccttccatttgctaagtgagatctaggcttagtcaacacatttactattcagaaacctctaatcaagtgatagaactctgacttatgaaaattataactacaatctagctgccactgagttttaatcataacatgagaggcgtctttgaggcatttagaaccttctttgaaagacattagatatctcccaaacttcccttgcacatgaacaaaatgtcttcacattatcccttattttattacttgagtgtrtcttctgctgttgcaaaaccaggcattgacagatcaatagaactcaggtgtgtggattcctggtggtacttgtctctgaatatacagtcggccctctgcattcatgggttctgcatcgatggatttgaccaaccacagatcataaatacccggggaaaaaatgaatgaatgattgcatctccactgaacatgttcagatattcttttccttgttattccctaaacagcacagtataacaactatttacatagcatttgcattgtattaggtatcataggcaatctagagatgatttaaagtatacaggaggatgtgggtaggttatatgcaaatattacaccagtttatataatagacttgcacatccgtggattttggtatccacaaggtgtcctggaaccgattccccgtagataccaagagacaactgtatttggaaagcttcagaagctttgcagatgaatgcagaaggctgggagtcagtgggagctttcctaacctcagaacagccattcatttgatctgtgtctagaatgagagtttctctgtgtgagctatgggtgattaatccattttgccttcattmttcagtggtttggcatatagattgaagtgttttgcttttctatttattggcggaggcaaatagaaasagagctctctctctctctcttgcagtgtacccacactccaaagtgccataaaacgaccttcaaaactaaaccatcatattttcttggcacaggcagagcragaaactggggatggggctgcagctggcagtggggccagggtgctggagtgggggtgttagcaaaaggtaactgtgcccatttggttgtgttcaagtgcagacctcagtgaattgaagttctagcctctcaggatgccagacattgtggctgcttctcaatcacagccagytcagtacagccattgtcactgagagggtttactgttgtatttttttctgaatctgagccatttgtgtgtcacagtaagggaaatagattcatgtattgtgcctcaagtattgccaggaaagcaacatattaagcacatacttagacccttctttttccttctgttattaaattggagataaactcatataaagagtagattctagaatgtaatttggctatattgatgcatataagaaatgccaccctttgcaaaatcaacagggagtaaaaggaagagaatgttttattgagttctcagatatgttgagcaaagttttagtctcttgcctggttcttgatcatctgtgtgatgtggtgaagtcacttagctttctgtacctctgttaacatgcctgtgtcgtttatgcagtgtgacatttggactagaaatgatgctttcctcttccaaagagtggctctcaatctcagtgggctctttcacacctcttatctgtaaaaagttgaaagtatacgtaatgaatatgttcagaagtctttaaaatattttcaccaaatgcagtgcctcatgcctataatcccagcactttgggaggccaaggctggaggattgcttgaagccaagagttcaagaccagcctgggcaacatagtgagatcccatctttataaaagatttaaaaattagccgggtattatggtatgtgcctgtaattccactacacaggaggctgaggcaggagtattgcttggtcccaggaggtcgaggctgcagtgagctgtgatcacaccactgcactcttgcctgagcaacaaagagagaccctgtctctaaaaaaaacaaaaataggctggttcgatggtagtgggttatcagaacttattaatgttagtgtcacaaaagttggtgttaaccccccactgctaaaatctgactggctaaaaatagtaaaaatgaaaacaaaaaatgatactttgcaagccccctgatccttttytccaagagcaatggtgcactggggyggggatcctgtcattcagtgtttcctccctggtatccagcacaaggtcagcagaagtgagtgctcagtgaatgtttgcgaaacagaacgacrtttcttccctttagtttttacgataatggaagctctgtatcctgatggtgtggttggtacatgaatctcttgatgtgttaaaattcattttattttttaacataccctagagttgcttttttgggtgaacaactcyttgaattttaacacacagaacttcataccacaaaaaaagtccattttactgtatgttaatttaaagataaaattttaaaacatggctccccttttgaaagagtcactttcagcactctgaagagatgaaccaacaactgaaacttctctctccaaagcattctatgcccttagtatagatggcttttcatttccttctaattatagttctctttgatttcttcataatttatttaaataaactttttaygctgagataaggatctgcgtttgttataaaatactgcttttaaataatgagagaatactgttcccttccaataagtttttcagtggaaataaaatgatttcttagcctttcttgaagcagcaacgaacagaagtattagtgaacagcattcaytgagtgcggtatgccacactgctagctcagtaacctgccttggttccctttatcctcagagctcccccaaggtacatgactgcatctttcttcgacagatgagaacttaaagactcagagtggcccatagtacatggtgatagagatgggattggaacccagttctgtctgtctctagatcccatgcctttcgtattccaagaggcctccctgtaaacagatacagtttataaagataatttggcaggtgcgtgtgtctgcatgtatacacaggcactcacacatacattggagagaggaaaggcaggcagtggggggcagggggttgccaaggagctgccagagagtttgttcagtgtcttccctgtttctgaaatagcagaagctgatgcaggaacagctacattcattgagatgcctgtgtcgaccactgcagccagctgaaaaaccatctgctcttatagccctggcgtctgcatgtgagcttttgttccataatgcagcaatatccctagagtggagagagccagtagcctagtaactaatgctttgtcccctccttttcctgttgtcacgactctgtgtctgcagctagtcctctattttttactgtccatctagtgagtggctggaccatcactgatgtgctgttgatgccttatcagggttcagtaagtactaagccatgtgatggatgggcagagggctggcaacagtttcctctttctgctacagactaagactccttaactagagatgaggcaaggaaacagatagaccccatctgctgccacagattcatttcctgacttgcatttcttgcctctcctgmgggtttgttaactcttcagtctttggcaaaagttccattgggcagcaaccacaaatatcagccatcccccaataagtttactgtctgcaggaaaacgaagattttttttttcctgttattgcttaagaggtgttggaagtcagcagtctcgggtcttgctctwmctgcctctaattagctaggtgacattataccagttacttaaagtctataagctatattcttccatgaaagaagaattataaaactccctatcttacaaggttgttttcaagatgaactgagataatgaattgaagccacttaacataactagagatcaattgtgattatgattgttatttgtaaccaagatctacatgatcatagctcacaaagatagttcatttataaaaatccactttctttgaccatgatcttcacttaycaatcatgtttcatggctgtcaagatgatttcctctactttaccaaaytcaggataataacacaatatcctggaatcactaaaccgtttttcatggatgtggtattctgtttttttggggtcgggcagttgtaacacattcgaatartctttgttgctaaagaacctaggagaagccaggtagaaattgctctaacgagggacttgcctcattttatggcccagttactgatttctccggttctcattaatcacttgctcagaagggaaagcttgcatcctttattcttgaaagtaggaaggaggtgctcttgctccacaactagtaggaagtaaatgtttgatactcctatttttttaaattctattcatgcttttattcaggtttttcagatttgcttaacacagcaggccaggctttgctgaaggtaaccggggttgggggtgccgcccatggctgtagggcaaaacaaagctccctggtcaccctcatgaaaccatggccatgacctcgttaactctgagctctgccttcactgaccagccactggggattgtcagcttagggcaattaccycttagtcctcacaccagctccacgtgtgagatgcctgtggcttctccaggctaagccctgtcaccgaaccaaactgggtccatttgcctgttcacaacagaaagccaaacaccaaagcactaggtttttatagcaagcaaggttaattgtgaattgactgacaaggagacaggaagatatgctcaaatctatctcccaaagctggggcctgggttgcattttatgagcataggataatgaggtccgatctgattggattttgagatgaggtgatgctgggaggcacgatctgattggatcctgtcatggggtgatgccagagctccatcttattggatcctggatcctgccatgtaatgtccacttcttaattcagtcccattccttggtcccagtgcttaggttctgcccatggttgcatgcttggatcatctagggatgcccaggttttgtgacctttaacctgagagtccatggcaactgaaaagcaactcacagcttggttgcataaaagttgaaccagattggtctgacgttgttacagctgttccacaatggagcagggctcctgagcattaatgatcacccatcgtgacacagtcccaaatacatgggaggcctggggttaaatctgactgtttgastttccctctgtatttgcctgttttctgacacctttctaaggggttgactgtttggggcaatttttgtaatctgtaaaggacatcagggtgcacttcagttgactgttgtaaaacaaaatgacaggtagtgaaaattttctatcaaaatagaataattttaacttttaaaataaggtggcagcattcattataaatattctaaaatgcagaaaagtataaagaaaaaataataatgaccccactacccactgacatcttctaggatcatccttccagttatctcttcacagacacacacacacatacacacacacacacacacacacacacacacacacaattagtgatttcagataggcattcttatggatttttaattaactttagttaaaattggtacccaggttggaacttagtgaaatatgataaatctgtcttttgctgagtcactaagtgaatgttgactgtttacagaaaaaaagacaaaaatgtgaaactcataatcaccagcattatgtgtgatttttatcttctttttaaaatagctgcattatcctgaatttaatatggttccttaagatcaaaaaatgaagtgattttaaaattggctagaaagtatctatttgcttggcttattgaattttttacaactttaatttctgaatcttgctgttatcattgttaatgttagaagctgcaatgtgaatagcaaggtcygaaaaccatttttcacttttagcttcttattaaataacagcagattcggccgggcgcggtggctcatgcctgcattttgggaggctgaggcaggcggatcacgatgtcaagagatcaagacctcaagaccatcctggccaacatggtgaaaccctgtctctactaaaaatacaaaaattagctgggcgtggtggcgtgcgcctgtagtccccgctgctcgggaggctggggcaggagaatcacttgaacctgggaggcagaggttgcagtgagctgcgatcgcaccacttcactccagcctggcgacagagtgagactgtgtctcaaaataaataaataaataacagctcacctcctgcagtaggagcaaaggttacccagcaaaatatagtggagaattcaaacgaagaactagttaccttgtgttaaaaatactttaaggtaacctggaggcctgaatttattagctcacgcagcatacacctagtctaagtaagagagaagggatggaataatttttatgtcccaaagtcattaaatgcaaattaatgatgtctrcattgttgaagttttgacaaaggaacacatgctggaagcttggaggttgattgctgaggaggtttgtttggtgggaatgggcgggtggcctgtgtttcttctgagaggagaacgtgtagtcctaagtgttcattctgaactaggagttcgtggacaaaaaccagtcgggggaaggtttcattccaggcctggtccaatcagttccctcagattgagtagttaacacatgaagagcatctgtgaatactcagaagccaactcaatcttgagaagcaagcaagcatttttcctaaaaatagctggtatttggtcactgtgatagatcgtttaagattatgagctaagtgtgtgtacatacacacactttaaatcgggaggagaacacagtttttgaagaccctgcattcttcatattaatttaacttggttttgagctgaacattgctcgtgtagtgggtgcagatgggaaggcacaggatggcaaagcataatgcctccctggcctccagataccaccagccatttcgtgaggtggatggacagacaaagcttgcggttcatagtaacgccagtatcaaaagaattagcatgggaggcacctcgtgggctgtcacccagacacaggccttagggctggtctccttcttacctacattagcaatcagaacagaaaagggcactctgggaggccaaggtgggcggatcatgaggtcaggagatagagaccatcctggctaacacggtgtaaccctgtctctactaaaaatacagaaaattagccaagtgtggtggcgggcacctgtagtcccagctactcgggaggctgaggcaggagaatggcatgaacccaggaggcagagcttgcagtgagccragatcgagccactgcactccagcctgggcgacagagcgagactccgtctcaaaaaaaaaaaaaaaaaaaaaaagaaaagggtacaaagtatttgtaactcaaaagacaatacaggcaaaactaagtaacaagaaatactactgtcatgaaaatcatttctctcaagcattgttcaatttaagatgggagctaggaccatcctgtctggtatcaaaaattgtcatcaacataagaaccagtgcaatataaggagattccaagatattaagaataaaggtgatttttttaagtgactctcaaatgagagtgctctttaactggagttgatggggtattaacaagcggagcttaaagcactctattcaaaggtattatgtattatgtcacaaagtggagatgtggtcattgtacgccacgtaaccctgcagagcacaggaatacagaactctgtctgggtcacttatttctagaaagctatagacaaaggagctcacaggccagcaacagaattgattaaagggataggaagagtcatgatgagagcaaattaagtggcagaagtatgaataattgggctaagaaagggtgaagtaagtttaaagtaaaccaattctattatagctaatatttcttgaatgcatattctgtgccccaggcactgcataagccctttacgtgggtttagttttcacagcatttcactttcacagcaactctgtgagttaccactgttatccacgtgtaccgtaccaggaaactaaggtttgaggtaatggttaaggagcttggcctcattttcatagctagcgagtggcaagattttcaggtttgcagtgatacactctgtcctgtgctatttgatgtcatcacatacctcttcctaaaatttggattgggatgtttgtgcccatccacatgactctaaatacatgttttcagtgttgcctctatgtcaccttctgtcccttctcattcttctcggaacatgtgatgccttatattcttagttatgtaaacatcttgtctcttaaactggagctgatttcttgaggatggagaatgtgtttcctgtccaatacataagcactccagaagtgtttgcctttgatgtgtttcttttgattatgtctgtttaaaggatttttctctgataagcacctagcatgttactgtgtgttgtcagttactactcgttttagtacgtgtgtgtgtgtgtgtatttgtagcaggcrttctgtgcatgtgcattgtattcattatatgcacagaatgccagttctaagtgccaggcactacttgaacaacaaagaaaagagtagacactttgctcagtgtggtgaagaaaatcccctgtcagccctgaggatcctattacaagtctgaaagtgggcatacaaaaataattaagtttgtcttgaagttaggattagaaaagatgaatatttattaaagaaagcataaacattggattaattgtgttcaactttttgcamcttattttgcagctactccgttaattattgattgcagttttccttaagagacattgtttggcatatttatttgtgaagtaaagcaatttggattctcctattaattttacatagagaaattamgttggtatatcttgagataggaaggtacaaaatcaggacaggcttattctgccaggcccaatgtggcacatctgttttataagtaaacagaagttgaaattttatcttagataaagttcatcaaattttacttttgctaatacatgtaatcacctcagctatatagtttaagtattcaatgacagtaaactagtaagtattcttaataaactataaactgttaagtatttaactataactatctaagaaactcttaagtatttttaagcatggagattgatccccttcagggactatgaataataacttacacatttcatcttcagtccatctccccattatccacctaacactgccttgaacatggaggggaaaaaaaagtgttaatttaagaaaaaaaaaaaaaaaaaagctttggcatattccagggtattcatagtgatgtcttgagttattttacgaaacagttccaactgatttccagaaaccacagttgatgcataaattccctaatttgtttactttagagagatcatctcaagtgcagcatctgttttttgctttctctgtgcgatcttggttttacatcaggaggagtgaggcacagggacgtacaagagcggctcgggccacacaggcagctcctgaacctgctgtgtgctgtgtcaggagctttctgaaacagtggtgggtgtgcctcctgttactgctctgggtgggcaacttccacgtctgccttttcaactgtttctcaaggataaactccatctgccagataacattattttacaactagaagaatgtcacaactcaaattttgcttagtatgtcttattttggagaagcagctttcttctgtgaagctcagagcagtaacctaaaattactctcaatatgtagagggagagccttctggaagtgcagtggttatttatgaagcttgggtgggggagctccctgccatgttccagtgaaatcggagagataaaattttaatgttggaggcttttctaccattttgcttcttctgcagtccttgcagaagsagctgctataggaaatctatttccagagccctgtccaagcccatgcccagggtcacaggaggaggagcaccccgtagtttgtgatgttagtagaaaattcagggcattgaaaaccaggaaagtatcaacagcctccatctctgaaaaatagccaactgaattttctctcataaagggtggcccacgctggtcctccagcttcacttagagctcttgtaaagatgggcaggaattattgtgaatataaattcgagctgaagagaagagagggaagtgcagaaaatccaattaactgaagcgaaagtcatacagaataaactacccattgctaaaagaaataggttttaaattgaatgaatctttagagcagaattgatcaaatatgtccttattgtatgagaagatgcactttgcaaataatatttgtcgggaggcatcatctgcttgaggatgtttcatcttcttggtaagaaggccgttagaagtttggagcctttttcatcattgttattaacttgcaggggaaaatcttcctattccaatattcattaaatggatctctttgtgtatacaaatagtaaaagtagttttgaaagtactataggtaagcaaggggaaaaaatgcactgtttgtttcttcatagaactgacatttttatttagggaaaaatccatgaatttacaatctctccctttctaggtttttcaacatttcttgcaaattgtatgtaaatgaatgcaaataagcaatcctcactagcaagctgcttagaagtgtaaaatgcataaaattaagatactgagagaaacgtgcatctaattaaggtagcatgtaaagaaatgtttaaattcaaattagatacttcagtggaaagaatttacttgtttaattcaaaaggtgttttgtataattctgagaagcttgtccttagcagtacttccatttccttcaaagctccaaaaatcagttttaggagcttgccctggttcagttaaactttaaaattgggtttaagctaagaattggaatgtcataaaaatacgttctagttttaatgcctttacctcaaaaacagacttagagaggcgggcatgataatttgagagtgagagtgggtggatgtgtggatcactatttctatcccattcatagaaatggcacgtggtacttggatttcatgggttcttagaaagcctggagataacacagatcacaggcatctagttatccctggatcttaagaacattctaggagcaagacaggaaggatgccggcctgtgccatcaacagcccctccacactctgacgtccaggaggtcacctttactctttggggccatgtgagtccagtccaacctccagctgtgccagggacagaagaggaggagaggaatttggtctcagtttagaagcctattgtttaagtagatgaaaattttttttacgaagcattaagcaacaagcaaagtactgaagaaatataagatctgtgtggagaagacagaaactgtcttctaaggttggtgctgtttctgtctcagacacaagaaccaaaagggcagatagaaaaacaagcagggctggggacggtggctcacgcctgtaatcccagcactttgggaggccaaggtgggagggtctcttgaacccaggagtttgagatcagcctgggcaacatggcaaaaccctgtctctacccaaaacaaaacaaaaacaaacaaacaaaacccacaaacaagaattagctgggcatggtgacatatgcstgtagtcccaactactcaggaggctaaggtgggaggatcacttgagcccaggaggcagaggttgcaatgagccgggcactccagccagggtgacagagccagaccctgtctcaaaaaggaaaaaaaaaaaacaagcaggaaagtggtttttgctagttttcagaatgcctgattttgaagtgttccactgacctccacttcttttagtgagagtycttgctttctaccagatggcatattcctccaatttcagctgagcccgtgttttagcctgtaagcctatagtctctatttgctggcctcacagaggagaaatcattcattaagttttgatcatgtgcagtgtacaaattctctcttagactcaggttccctaatctgaagttcctgtctgtgtctgagctggggaattagaaaatgacgctgagactgttgttcttcactggggagttggatctgctctgtctcttcagcggggccaggaatccttctgaatcaatgccagacttctttcatcctccctccccctaggctcccagaccccatcttcaccccyacccccacccccaaggctgaagcacagaccaaaccatgcaggactgtgaattgaaaagcatcttctggctggtgacatctgtttccaaatatccagcaagtctacttaggtttaatcagaagggtcacagttggtgtttcctccttgggccaggagatttttctcctatgggacttgggcctgatgccttccagtcaattagagctcctctccctctttgattcgttgatactttcagtggctgcctctcagccagtgactggttgggttagtgattcctctacttatagcacagactacatctagctgcccacttcctggataccccacattcaccatagtcgacatattccaaaatcagctctataactttcctctatagtggcttattctccgctctaaatctctcctggttaatgatgccattatcagccctcttctccttgcaaattgccaatgctatcactaggccatttttatttcttacctgagtttatgcagtagcctcctagctgctctcccatctcatcacacacttcctcactcctttctccacaccgttgatgaaacagctttttcttaaaacacaaatctcacataacatttcctgattaaagcctttctgatgctcccttgttaagttttttcctgtcttaaggggtctgggctctatctaacattgcactcatatgtctcctctcctccccgcattccacacaccagcctagttgaactacaggacccgcgagatgccatgctgccatttatatttttgtgcctttgcatatgctgttttctctgctcctccccaccggcatcctccaagttggcctggaaaactcctactcactttcctactcctcagagagttttttcttttctcaccctcccaggctgaatttgtcacgctctcttttgttgcattccsggcctctggttacagcatttatcatgcagtacactgaagagttgtttcctggtgtatctcccatttaggccatgggctcccaagggcagaaattgtgttgggtgagaaggtgcccagagataagactacggcagtgtttctcaaactttgtggccccaggatccctttacactcttaaaaactgttgagaacctcaaagggcatttagtttattatttgggtaaatatctgttgatatttcccactgaaatgtaaactgggaaatttaaaaatcatttattccttcaaaatgaacaataatgaacttattaagtattattataaaatacattttatataaataactgtgcagaataaaaaattgtaagaccagtggcattgtcttagatttttagaaatttctttgtgtctggcttatgaagggaagacaacaagatcctcctatttgctcctttagtcagtctgattcattgtgttgtttaatgtctgtgaagacaatacaatctaattgcagatatttttctggatcaaaacttgacaagtggtagtttcttactagttattgtaatgtgaaacctaaaaccttagggaacttttcttacagctaccttaaaaccgctcatctctcttgcacctccaatagcccttttgcccatgaatgttttacttataccatgcattggtcacttggaaaatrtgagaccactgagttatgcaaatcctccaacagatggtacactctgtcatacaataaaaaaagataacagaaatcttaattatgcaaccatcaaagtcatgatggtagacasaagttttccaaagttctgattttcacttgaaagctcaaattttatcattggcaacaaatactgtcagtggttttyctcaaagggayaggctcattttgmtcattttcaagaaaatggctttttaaatgcctaagtctgaataacaggtttttgtcagttgtccttttttrggaaaagtggtgttctgtgaagcaggtggctagttcagctcacaactcaattgcacaggtgcttttccttgagacaaacatcatacttcagtaggtcatggaaacatgtacttgccttctcataacagactatttaaaagatacttactcaggatcaggatttaccaaattaatacttactgcctcatccagggcatgcctaagtgatgctggcattgattttccttcaagtgctcagaggggcaaatgcagtgaccactagtatcgtttggtgacactggctgccttgatctgtgccaagttgccagctgttttgccccctcccctatggcgtttgcaccaccaacaaagtgttaaccccataaagaaggaaagaaatgtyttagcagcatttttaaaatttatttttatttttgtaatgtagagtcttgctctgttacccaggctgcagtgcagtggcactgttatggctcactgcatcctccagctcctgggctcaagggctcctcccctcacctcagcctcacaagtagctggggaccatgcccaggttatttattatttttatttttatttttgtagagacagggtctttctatgttgcccaggcttgtcttgagctcttggcctcaggcaaccctcccacctcagcctcccaaagcactgagattacaggcatgaaccatggctcccagccaagaaatgtcttagtatttttatcaaatacttttgacctcgtaaaacctctggaaggatcttgtagacccctaggagtccatagaccacactttgggagccatgggactgactggagtgaagcagaggcccctcataccaggttgcagagtccrtgctgtgttgggaagggtgtggggggagaagtgctgtggtcagatttgtttcttggaatgaccatggtggcaagagagtggagcagtggagcatcttctggggagttggaaaattggaactgaacatcattgctgraaaaaaaaaaagcgattttaagttgccatatgaatataggatgattatgtaagccccaaattcttcaaccctttggagtgatgttttcattccaaatcacattcaagtgtgtgaaactaggttgaagtattttctggtattatttcagaatagtattatttctattctgtgaatgaatttgggtgtgtgtgcacatgtgtcggtgtacgtaaagcttgtatgtgcatgtaccgttggctggtgggtatcctgggcaattcttttctggcccaggttgtctttgtgttttgtcatcagaagtgcattccttagactctgcatgttatcctggatcataagtaaaaaacgtttgtttaccctaaagacctcccactcagtggaagcgtgggagacacattcctgagttaaaaaggtctagatcaatataatattcagaagtaattgcaagtgattctaaccaacccagcagtgcttacttaggactgtgttcaagagcctccttgcctctttgttgatctctttaaataccaaacaaaagacaatgaatcttccaactcaggcgattccattgtgattgatctgagccaattttttgaggtaattgatgatattgccttagttgagtctgttagtgcaaataattrttaatcaatatgctctcagctcttagttcagaagataattctaacacatgatttatgctgaacatttcaattgagctacctttacaagaggaaaatcaattggcgagtgttctaaagcactttaattatctgcagctccacgttcctccgcagccatatttacccagacagctagttgtcccatcctagaaagggtcacaggaagtttttcatcgccacggtagagagatagtatatcgttcatcttagattgactatgttggtttaaagtaatttagtggaataccttaaaatcaaagcattgctgctttcctttggagagcataattaacattgcccaggaaaaagaaggaacgtgttactgatctccattcagttggaaaacagtttgccaatgtggatagtgaatgtcatgtaagtcaatttagccgtaaaacgtgaggagatctgaatcacagaaaggaggttaaggtgtaaaacattttaggggctaaatttacatcactcccctaaactgttgtttagattctttgtgacttccttgtgctaaggctttctagsatggaatttgttgtttttcccttttagacaatgtcttgatgaatattgtggtttgatttttcccccctgtgagaggagatgcagaagaaattaatcaccactaggaatgggcctgcctttgttcaaagtggagcttccaagcatctgtttttgttgtacttgtggtgggtacaggaatgtgtgggctctggcctgggacttttggacatgtttataacagatggaaattttaaatgacagttccctgcattgtcatggtggagccacttcaatagcactgagatgctctgttatacttcttgcccagtactctgtctcttgctgctattaaagcatctctaaatggtaaaacgtgaaggcatttggcagctttcaagggcagttctttaacgtctccactctctacccccatgtacccctgggacccccaaaacttggacccaagacttcacgtagcaataaactgaaacaccactcattgttcacagctgggccagtgctggggctccagaaggtaatgctcttaagcactgaattgtgagttcatactatcaattaaacagcaggagagaggaaagggaggttttgacttgggatttttsaggagcgaattcagtaggcatttttggaatgcctggcttggagctagctctacagggaagaccaagaaaaaygaagccctgcttttgcctttaggaagtcacagtcctgttgggaagggttggagtggagaggggagacctcagccattaagaatacaggagagaggggctgacaccagaaggtctgtgggcagagacagacggctgagtccttggcacccagggaagaggaaggagaggctgacgggtcacaggatggcatcttacatggccttttgaggttgccactgcttatgtcctcctcctgttccccaactgctcccctcattcttccctgggaatggtagcttactctgggctcatcagagggaaaacaagaaactgtgatacataaattctgcaactggttgtggtcctggtgatgacttcttccagaatggctctctcagtccaacagtgaggtgagattgagggtcggaaccattagggtacaatggtccaaattccagcctgcacctgaaaatcccagtgtttgggaatctgattggggagcatcctggaggcaggctgggtttcttttttttttttttttttaagagggtctcattctgtcacccaggctggagtgcagtggtgcaatcayagcccgctacagccttgaactcctgggctcaagccatctctccacctctgccttccagagtgctgggattacaggcgtgagctaccccgtccggctttagggctgggttttgaggaagttgtgtcctcgtggcctgagctttccttttcttcctgcrtctcctcccctatgtgatgcctcccccctgctcgttgtttgggttgcagggtgagagagagaaccttctccaagtcctgactgctccctgggcccaagttcaggctgagctccttcactggccctgcaattttacacatgccrctcaactccttggaaacaaaggtttcctctctgtaagatgaaggtgatacgtaacccctggggttgtgagaattaaaggaggcacatwttaaagcactttttaaactgtaaaacyctgcaatataatgtgtaatrtggatattcctatgcaaatataatataatataatataatataatataatataatataatatagaagatgttactgtgttcagttttattattttacctggctgcctactcagggtcctgtgatgttctctgtaactgctctagttcagaaatgaagcctcgagtaggaggtgtgggcactgcctgccctggcttctttctaccaaagtgacttagatgtcttggagctaaaacatgagaggcaaaaaatatcttaaagataaatgccgtgtctgtgttgcatataaaattcaataaatatccagtaactgttgagatatgagcccatgaacagaaaaaagaaaaaaaatccagtaaatgaaggaattactttaaaagatttcagtcttttccttttgtctttttctgtttttaatrtacatgaagactaatttaaagacccttttctctttttaagtatgtttggagatctgtatgacaaattggctcctaacattgtataatactaatgacaggatatgaaagacagcattctttaggacaaaggaatgcagttttcaaagaccaataaaagttggcaaagaaatttgcagatcaggacccaggacaatgcttacataacctctcaactgtttttccaggtttgaartgcaaataacagagataaagacagaaactacacatgtaaacttgatatattaatagctcayccaatctacataacaaaataaaccaggggtctaggccctaaaagtgatagccgtggtgttagatttctgggcctcctttattccaggggatggggctctgacaggtgaaacacagcatttgtttaaacagaatagagaaagtctgcaaaacattcaagggcaggaagtagcaataaatactcctctgtgcaactgaagcagcacagagcttggggtgagcagaatgtcatcactcaaagtagaatttggccagggcctcccagggtcccaccaagggatgcagtgaactttctaaaagtcmagacctctgtcttatctcctccaaaagatgagaaagtgagatgtgaagctcctttctggagatgggatatgtttttcatggtaggttctgatctcttttgcaggctttgagcataagaaccaagggcacaaaaatagctccttgagggaaaaaaaaaaaaaaaaaaaccgaaaggcctggaacacaggatgatgtgcaggcgttggtgagctggggttgtaaatcgacaatcccttgaacagaggaagacctagttaaagagactttggttttcttataaggcatgaataaacgctctgggcagtctgccccattggaaaacagaataatgctaataatttgcatttatayaataccccccggcttgtggatctacaagcactttgcaaacattaattaattctctaaaccccctatgagccagggggtgccatcagtaactaatcacgaaggagggcmagtgattcttgacagagtggatatgcaagttagagaacactgcgagcttgggagctgaagaggttgagtggaatttttatgagaaagaacaaccaaggtagaatgttgatcagactgtgtgggaaacaaacctggatattatgaccataggtgaaggctatcaactaacaattcagttcctctcctgttgttcgcctcttcattttcaaagctctgcttatacttggtcggaaacctcagtgtgaaggtctggattcagttcactattcccagtataaaaggatgtgcagactgagcacagtggctcacacctgtaatyctagcacttcaggaggcagaggcaggtgggttgcttgagcctaggagttagagaccagcctgggcaacacagcagaaaccctgtctctacaaaaaatacaaaaattagccagccatgatggcgcacacctatagtctcagctacccaggaggctgaagttggagtgatatggctccgatgactggaggaaccccagggttcttggtttcatgccgataggattaacgacacgtacatacgtggagtggttttaaggagggcaaagtttaataggcaagcaagaaagaagagaacagctcccccatacagagaaaagggaggggggcttggaacaaagagaaacccagtgtgcggcagaaaagtggttgcttatattgggatgctggaggagacggtgtgttatttacgtagccccgtgaaaacctggccctcccaccttagacytttaatatgcaaatgcagacgccatgatgttttgaacacatggtgttatccgcaggtggccatgacacttggtacacctggtgagaagagggcgggaatcaccatgttggccgtgttaggtagacccagtttctactcgcctgcatttgtgtattaaagcttgccagcctggctcttcaagctgcctttctgttagaaaagaaacagtttggaggttgcttttattaaacgaaaaacccttatcaagaagtccttttaccctttctatctgcctaaaaattatttcttaataactcctgtattaggaggatcacccgagcccagggaggtggaggctgtggtgagctgtgatcaccccgctgcactccagtctgggcgacagagcaagaccctgtctcaaaaagatatgcagcagctggatcatactagaaatcagtatttctgttgctgtgttaatagtcagttcagagattcattcatgcgttgacttattcactcagtcactgctttatttgacagataggagtttttgagttcttgctccccgttagacttgggggttatcccccaaaggcttatatatgagaaaagcaattccctgctcttggtctagtggctcagtgatactttctttmttctctatcatgtattttttgtttccccagtctgcttatctgacatagatgttaggataattgaaatgtttttgcaatgttgatgtaatttatgagtaaacattgctgtatatatttgaatttctgatgagaaagacactatgcacagaggagagtaatgacctggcgtaagagaacccatttacaccaatagttacgtctcactaaatcgggcctgttagattaaaggactgttggtattcatgacttttttttttttttttttttaagaaatgyagtttgargctaaaccaacaaagtgccacttattggtggtactgagggagtttgcatttactgaatagataagatttgttcgtgatcttttggctgatatcacaatggaacagataggttacttttcaggtcctcaaaagttggatataccaggtgttttccgaaattgattctcattcttgtagatgtcccaaaaattcaagkaatttgcacaataaacctgtataaattagtagaaaagccaatttcactttagctctaagtggtaggaatcaatggtatatgaattcttgagatgtttttatgtacacacacatacatctctactaaagtgtaagtcagatgaagtggatctttttttgttaaatcatttttatgttactttcgagttaactagtatatgtagagaaatctatgtgtaaagaagtatcaatatttctcttcaagtattttgaactctaggacagatgatgstaatgaggcccgtccttgctggagctgcctgtcagaacagcaaggtaggcatggcctggggcaggggagctctgtctggtctgtggaccatcaatccagcgctcggactcctcctcccagcaagacaagcactttctttcaggctgctgccagctggttttgctgtgcggtagtgttaagctttccagattgaaaacatctggcttttcatcagcggtatagactcagaaagagagcagtgttagccgaagtaaattcaacaaattcttatctgacacgttcggtttatcctaatgtgataaactggggcagtctctgaggatgagtcctgtttccaactgtgcaccttttccctctatccttaccctgtccttggaagaatcttgatgttaaaatttgggactgtgtctttrttggaggcatcagatgcactrtcggtagcgatttctgaaagtccagagagtcatttgcatagaggtcaaacacaatatttcctgcaggaacttcctgaatgatgaagtttcagagcaatcccatgtaaccagatgtcagcaggttccaaaaagatgactggctacctgttgctgttacaagcaggagacctctagtgttaactaatttcagaggaaatttgtaaatattaagaatagaaaactgtgtatgtatctactcaacacataytgagaaaatgacagattgtggtgatgtgacactttgggttgtatctgccttttgaaagcatcctttatgttttctcactcatttcttctacagcactttatatggcttggtagggaaattctgagactaaaaattaatatcatcatccctctgagtttttgcatatgaatgcttttcaacttgcaaactggtcgttatacagrtacgtatttttgaacagtgatttacaaacccaacttttgttaactggatcatagcttcccactgagttaaggcttcagagctggctgatcagtgtttatrgttggtctggtgttgtcattggtctttgcactttagtttgaagtacctcaagaagttaatgacctgttaaaagaaaatccactacagaatattctccttaaaagatacaggtgtaagccaggaatatttatattgtggtagcagtaatgttgcacaggtatagtgtgtcagttgtacatcagcacaacagtctatcaagatggtagtaattagccccatgttacattaaggctcagagaggtaaagtagctcacctcaggacacacagctagtcataagtacctgtgtttgttgctcccctggtgaccaaaaatattgggctttgctcctgttccacaagcgcattgggtgttgctccagggcctttgcacttgctgtgtcttctgtttgcagttctgttttctcatgttaaagaagtcctttttgtcatttagaactcaactcccctctctttagagagctcaagcaggccagcacttagactcctcctcmcagcaagacacgagggcagttgtttccttagattcccattgatttagattttccacaaatttgcacaaaactttataaattagtagaaaagccaatttcagtagtctagctytttccaagttgtaggaattaatggtatgtgaatttttgaggtttttatgttcacacatgtatgtttctactacagtatgagtcaaatgaaatggtttaataattttttcatgtgttaaatcatttttatgttcttctcaagttatgaccatgctgtcacagcaaaatggtgtctcaaacccactcaagagagactccttcctgcagttacctagaaccagcctgtctcatctctccgcctccattattgctatcctgtattaataaggagttttataaacagtgtaatttggattgtttgcaactcaatggaaaaatgcttgaaggggtccaggygcattggctsatgcctgtaatcccaacactttgggtggctgaggcaggcggatcatgaggtgaggagaccgagaccatcctggccaacatggtgaaaccccgtctctactaaaaacacaaaattagccaggcgtggtggcrggtgcctgtaatcccagctactcaggaggctgaggcaggagaatcgcttgaacccgggacggggaggttgcagtgagctgagatcgtgccactgcactccagcctgggcgacagagcgagactccgtctcaaaaaaaaaacaaaaatgcttgaagggatggataccccactcttcatgaagtgcttatgtcacattgcatgcctgtatcaaaacatctcatgtaccccataaatatatacccctactatgctcccacaaaaattaaaaattaaaaaaaaaataaggcattttaaccacagtccctcctaaagcacacctgctacctgcacatgtgccctttctcctcttttgctttttcctaaaggacatggttgagaaaactgctctattaaaatataatatggttcagtttggtgtatattgtgattattttatttgcttttttaccttggactcagtcttctcctttcataaacctgaatatgcatgttgtgtagcttcgctggattcaaattagataatttcatttcaaacakatacagccaagcatatggtatttggtatgagttgtgcaaagaaagtcaagttaggttatgaacaagtgagttctgagtttctttttagcgaagggacatttatttatcttggattgttacagcgattttctggactatttttctgtaattaccttgattaatatttaagtggtatgtttacattttgagttgatttatatgaagctgtgcttttcctccactgaaacactcaggtatctcatattaccatgatgatagaaaccattctctgctccttgctttcccaatagaagaatggcagtttatccacgggtatttggagaaggagcagcattcacacagcagaaatgttccactggagggctatccttccagagccccttgctagttatagatacctccacttagggcctctgtgacctgcaataaatttaaaaakacagtctctaaattttatatgtgtgtgtgtgtgtgtgtgtgtgtgtgtgygygcgcacgcacatgcgtgctataaatgaattccctatatgctatttctgtgttagaaggacagggagaaatattgacgtcttttcttcctattttggtattttcccttgctttcttctctgccttcctcagttcccctgggaggtgaggcatttggggcagggtcagtgtgtttgcctggtggtctgggtgaacttgcagaggccgtcagccatgactcagcatcaagtcctgacactaattcttgtttcctgtcacatcctaaccaagtcatttatcttcttggaacctcaattccatcactggtaaggcagttatgataatactctgggtccttgttaaagttatgaaagcatkctattaggtgaccactaagcaaattatgggaagttaaaattattgtatccattatcaccaaattgttttttctttctaccacagagctttctttctttcttggagctggcaaatgtctactcctttgtaggtcccaaaccctgtgcctaaaggtttagcatctctgtgatgagtttaatggaggcaggaccagtctgttctccgttgtgattgcagattttgaggagctattttgaggaggatccaggaggtttactttcttatccctgtttttccttgggatcaattcttacgctaaaggtcaatgtttgtgaaacatgctgtccctcctgcatttcttttttgcccagggacatttaaagtcattatcttgccttgaaaagattaaaaaatgttggcacctccgtctttgtrgtgcaaagtgatcttgggctgttgaccaagctgacttgatccctggaatgtcttgatctaaattcatcttttcttttgttgctgaaagtttagggtttccgcttgctgaaattggatttatgaataaaagaagccaactttgctgtaggtaattatgtcagaggcaagttcatcggtgtcagtgttcattttattagagaaggcttagcttattcacaatgcatcttttatccccttgtctctaataaatgcatgattttcagagatttgcagccaaaagtgtgttattccaattaggttacttatgtcaaacataaacctttcctgtatatatgttatttttttacagctaagttcagtagaaaatccttatgcagacattgatatgtatattttaggttatgttttcctgcaatagtatgtctctggaccagtgatagtaatttgtgtcaataactttataaagcgagaagcagttgaagaaattagaacggctgagggccagaagtcctcagcagggaaaagaaacacacgtgcagcagattaaggggaaagggccaaggaaagcgaggacccccactttctggtgtctctctggtaactggaagggcggatatgagcggttcgcaggcaccagtctttaaagcgcctgtgatgttctcctgactggygtgggcttcctgccctttcaagagaactccttgatcatgcattctactaaaacgaggcagccctgggaggcgagtcttgcgttctaattgcccagtgggttgaggtttggggacaataagtggatatcaaggaaaggtcagacttgaaagctagcaacccagtgagcagaccaaatcggagagaacgaagaatgactttttttcttcttcttaattactttgtctaaggtagagggtttccttcttaaacattttgaaatctggctgatgaatacttgtcaaactgatttggggggtatttgtctaatcttttatcttattccatcagatcatgaatgaaaatgaaagctctgaaagagttttgctcccaatggaaaaaaataatagcacaggagctgcatagggagatgaggaggggctggaaaagtcatggggtcaaagcggtgcacagcacatgggttattttttgctactaccttccacatctgctgggctatggtgaaatttgaaatattttatattttttaaatattatatatccttttgctctttcttgccttcagcgtacctgtatatgttagccttaaattgtaagaccaagacatttataataaaagcaaaataatagtataggttccttcaatgagagggtaaatcatcccatccaaaccaacacacacaaacacagaccccacaccgacacacaaacacacatgtacaccacaccacacacaccccgacacacacacataccctgacacacacacacacacacaacctgcttctcctaaggaaggactttaaagagaaaaacactcttgattgtgcacaattacaaatcactttccattgacaattttgtaaccaaggaaagccctgggagttcagtggctttgtcatttagagttttaccattggctgactttgatctccacagcacagccttgcttactcctttgcaagctatattttttgtttgtttttaagtgtagtcattttctgatctgattgcaccagcctttccaaaacctaagtctcttaacccagaagtccaggcctctttctaatggtgctggaggaatgattggcaagcctkagatccgggagtggagattatagggaacggtacaggtggcaggagctgccccagagacaaagtcaacaccactggggccattattttsgttggaaatgcgtaagaaaaccattcctcaaagtggaaacaataaacacattatctacttccaccatcagctaattgaggctgtctctcrataaacaagtggattttctgctaacaagcacatctgtctacaactttaatctcctgtgcttttctgccctgtccccgttttatttatactcattccaatttttcttaataatgttacatattagacttaaagtctctccttttgcatcctcttggcttagaagtcagtgastrccattttattgtaggacaatttttaaaattgaaattaaaattaaatttgtttaactcttcattttcttggctctaatacgtcaaagaagggagcccaaaygcatagaaaacctagtaattttagtggcatgataatagcctcctttttttatactgacaccttatggtaaaaatcatgtcaaattagaatgatcacttttagttcaaaaatatgaaataaagttttagagaaacayatttgctaaactaattacctactaatttatctatttgtgaattgttctcagtgtgtgaagaatgctgagtgactgaagtcaccatttgaaaattgtctcaattcagtaagaagggaagagattgttatgagtatgatgcaggtagcttaggaacgtaaacacctgttctgtttagcaatataagggggtttgaataaactgacatatggggatttaacacttaaattgttcatataattttactttaaaattctcagtcatcccataaaactgattgttttaaactccctttcctatatcctataatattcactttgtatttccttctaatacaagggaaagtacttgctttattagcctctttaaaatccagaacattcatttattataaattgtctgatacttgaatgtctaaataaaatatcccattgcttgcctaaggaatatttttccccaggtgaaaatatattttactttatgtgactgtgatgataaaattgcttagtatactttttgagtcaaaaattcatgtagacaatttaaatgtgcaagtttatgatccagtctctggggcccctgcattggcatatggaagcatatttaagtttatttttaatttcctttatggctggcatggtttctttgggttctgacacaggcataagcacacacatgtacacacacactagcagaaagcataaacagggctttcccaagttatccaggcaattttctgaatgagttgcaaaactgaaattaatatctrtctttagagtcttcaaggacaaaagcacatcatctgccagccctgctcgatgcttagctctccatgaagttaatgtgggttttgtgtatataaaggcaaatgattcttttttaccatgtgcagttaaatcccataatggtacatgctccgatttaattagttctcatcatataatgggatgcagccagattgatacaattaataatgatgttagtaaaaacttccccattctagatacgaggaactccaggtgtcaaaataagcatgtattaattttaaaatacaatgaattggccttaagaagaaaaaaaatacaatgaatcttaaattaattttgaaacgaattgtattataaataaaataacagatactgtttttcctgtgataactaaaaagatggtttcccattatcagtgtcattatttttttccagyaaaatcatatatacaaccataatatagaagaacaatcaaaacaatgttagtttactagtatacatttattttaaggtcaaagtcaccacatttatttattcttaatatcagyctttgagaatattgaggcacctctgtagactcatagaattctgagaaatattgtttgaaaaattatcatcttctggakagaacccaagctctttgatgacttccttacttcatccacaacctaaatttttgcctgatactgtcccttttatgccagccagacaggtggcctcactgtgcactaagcaccagggtttcaggactccacgcccccgaccttgaatgctcttcccctctttcttacacatttttcctgaccttcaatgtgtaacacaagcakttcttttctgtagtgaatacagtttcataatatctcttgcaytgggatccttggctctgtaaactacttacctgcttatgtgtgtacatcttatcttcccatctagattgcaagtgtcttcagtaaaaagtaagggaaaaacacttgcactcttctcaagctcaacctaacgcagtagtcatgcatatagttgttaattctcaccggatgaatttatgatggtagtatctttccgaaagtctgttttgagcagccccactagaatagagcacctaagtgtgtttctagttggccacgtgtatgctgaagtacattttcctaatgaagcatcgttatgcttggtgacatccctgacacagaggtttaacggtccatccaccagtcagcacatgttgctttcatgaccaaccatgtaacatgctgatatgaggaaatcatatcagwtcttgccttgggggtgcagcagtgtctaggtaaagctcccttggtgatagggacctagggccttgggatttggctgtagcaaaactcaaaacagagatgggagatgatagctagaattcctggggccacattcaccagttaaacttcttcatttgccttgggcatttggcaaatgaagccaggagctctgatgtggaaaattarggcagtgactgggtggcttattcagtagcaggtgtgtaagctggttttctagaagctggtgatgacctgcccttagagaggcagtcaaatcagtgtcttcctcttagaaaagtgagaatgatggctgggatgttggagggtttgataaacacttttcctagctttgccattgtgatatacaggtgtggtatatgtaaaagttagtttcttctatacttcagtttactcaagaggaaaattatagcattcttcatcttaacaagatccctgtaaagttgcatatatgaaaaatgggccaggtggaggaaaaaagttacaatatttacatcaagcctgtggataagtattacatgtgttctcagatcattggatgtttttgtatgcagctcccaaagttcattcctgtcctcaaaccttgatccccactgacaaacagaactgcatttattacaacctgaacaccacaaatcctggtaccgtggacatgggtttgcttattgcatggccttgaaatattacaagytgaggtttgccagtactctggttattcaggatgtacagtttatttcacagtcaaccaggaagccatgttgcaagacttcrgggtttttcggaaggaggaagacacagccgatacccgcacagagattcagatgtagttgtgaaaataaggcatccatatgtgcaaaattaatgcctgcaatagggctagacgattcctgactaattagtcatgcggtaaacaaagaagtgcttgaattcaaaacaggcaatatctctgatgtctgaagtgatttggaagatttcataaaaggatttcccgatggagtaggatataaactagtagcagagcaggtagtgatgaatatttactgtttcttatttgttttctcattgttcatatgtaataatgaatayattactcattacttctaatcagtgaatattgttatgtaaatttcacagcaattatctgtacctttttagcaggatattttaactcccatttatgtcattttgcttgggtgggttttttttttgttkttttttttgttgtttttttgtttttgtttttgtttgttttttgtcgccaaatgatgaatctcagaagatttgtaacagagcataaactgacttgtgcagtgagttgtgacatacagcatgggggatctgagtccttgctactcaaaaggtggtccatgcacagcagtctcagcatcacagactctcacaccccaccccagacctgctgaatcaaaatttgcatttttaaaaggtccctaaataacacaygtgcacattacatggwagaaatcactcgtctcagatatttgcattaagcctttagtgttccattctcattctsttatgttggagctttttayaaaattgtgaaggtgggtgtttaatctctacagatgtaattttctctgagcatgacacattatttagtagaatgaagttttatagtactatggatgagtrattctgaccrtagttaaaagtttagtgaatacctaaactattttcccagcacttggagtttttcaaaactcaagtcatgttttggaaaacactattttcccttttatatctaagcccatatgaattcaattttgtggaaaatttaagccacatgtttctgattcgtttacacttaacccttgagaakgttgtgttgcaacagcaattgcctgtccaaaaaaatctctttttagtaaatctttcacaagggtagagagattgggaaaaagagaaatgggaagaagtcactgaaaagacccagagaagttgggggttgggttgaggactctgaatttttttttttttttttttttttttttttgagatggagtctcatctctgtcacccaggctggaatgccgtggctcagtcttgactcactgaaacctccacctcctgggttcaagtgattctcctgcctcagccttctgagtagctgggattataggcacacaccaccacacctggcttatttttatatttttagtagaaacgggatttcaccatattggctaggctggtcttgaactcctgacctcaggtgatccaccctgcctcggcctcccaaagtgctgggattacaggtgtgagccaccgcacctggcctgaggactctgaatcttgatacaggactgtgcagattgtatttgtgaataacttcttttytgacatctgagggaggacaggaggggtaggaggaccatgtagtctcatgcgttgaaacagtggacrcacagwtcctgcaacattgtcaaaatccatgtttttactaaacatacattaatatttytttctcttacttctacaagttaaattaatatcactttgtggaatttttggttttgggctccagcagagatctcgtccatatttagtattagccagcgtcttagcaatgttgacaaaaggtgagaggaaaaattgctgaacatgatgctgcaaaagcctctctctatgtgtgatgaactgaaaaaggcaacctcgattatcttttttgagcgtttcagtttgagctgatgcataaccagggaatgtaaaagatccgttaaccttctttttgcctttcagtaaagcttgagttttagcttgtcaaattatacattcaatgattgtatggataccatcttttttgatggatggatagtgtgtataaacgtgtgtgtatacatgtgagactatatgtcatgaataaagagtgagtgtttatggtggaggaaaacaatgatcaaattaatcatgttttctatttagacatctatccctaaatttagtgagtttgtttagataagacgacctggcttgattacagcyctgagtagccattggtaaatgaaagagcatttgaattccgcgtctagcacattattccagggagccagcaaatacatattcatatgacagatgcactaatcaaggctgaaggtcttacttaaatattttaaaaagcaaccttggcagtagaaggcaaatagaactagtctagatggtgtttttgccagtttccctcttgctgtaggctttctcataatcctcttttgttgtgacatggaatgtctttaatcatgccatgccctttatctagaaagatggcttttctccccctgcatcagctgcctctttccttctaggatcaacccagtgtctgtctgtggtccttccctgggccyctctgtctagggtcagtgtctacaatctgtgcttcccacacactmtatgcttacctctatcctgatgtttgtcacagtggtatataattaactgtttacatgccagtcttccccagggtagtctctrtcttgtgcatctctgtgtctaccacctaactcagaggaggcactcaatgaagttatkgaattaatagawccatgactgaaraagttycctaagggccaggcatggtgggccacacctgtaataccaatactttgagaggctgaggtgggaggattgcttgacaccagagttctagaccagcctgggcagcatagcaagaccggtctctacaagaaattttaaaattagctgggcgtggtggtgtgcaactgtagttccagctacttgggaggctgaggcaggaggatctcttgagcccagaagctggaggctgcagtaggctatgattgcaccactgcactccaacctggacaacagagtgagaccctgtctcaaaaaatagcaacaacaaaagtatcctaaattagctctgaaaagctataaacgtctaataatgtcaaacttgagtttgtggattgagtatatgttaaggattctgcaagtgaatctagtgttgtcagctcatgtcacacagaagctgagccttgcttctctggttacaatctgggctcctctttgctgggcaccctgcagatacatcctgcagggcaggggaggctgtctaaaagaagctggtggccccctgtggccatcattcttagagagagaaccccaggcagaggtatccagggaaccttcattcaattgtcggaacttaatgccataatgccttaactgtggtttccatgagtctatacgtgccatcyttcactccattctttaggttgttgaaactgtatcccagttttaaagactttcacagatgacatcttcatcgtttccttctctaacctgttccatcgtgtgtttaataagtctttctgtcagaaaggtattctttttctctcatctaaatccccacatgcccatttttctccatttggtccctagtagtgaggaggaacagctgaccacctcaaagttttcttctctgtccatcccctggctcatgtatcatccccttagggttttcaagtttctcattatatttgtcagtaaaactaagagatgaactttcaactccaagtttatcaccagaatatccagcttcttttgtcatctcctgctctcctgcgtgtcttctcccaaactattttctgtttccttttgtcascatcatggaaaacggaacttattctttcactgtgctctatattttatcttcttgtgcaattgtaagcatcttgagagtaaagattgtacagatcttctttctatttcctgcaatgcacagcacatagaaattgaatttcctggcagctgtaactgtctttgatatacctagccccrgtttgtctgaaattgatcaagaaatgtagccagtaaacttaattcctattcaaaggggaaagtgtgtactgtgtacagaagaggcattttacatagagaagctcagcaccaaaakctaatgtgcaaaagcaagatgcagagcagagaagattctgtactctacatttgagagctctttatttgtcaacaaggcagcagatatttctaggtagcgttggtgcaatccagtatagaaagtggatttgttggtattacacataattaggaagcaggaacatcagtaattactgtsasaggattttgtatggcataattaatgccctcaaactatttagaaattcttagatgaaagaaaatacagaagtgggaattttggtgttgaaaagacaaaggcaaactgtgttggaaatatgttaccaaacatcatgttttatgagcacagattggcaaaacatcaggacacagctgttgattatagctgctcttttcagtaactgcctcagagccaatgaatccttcgcggggagggcctgtcaggacatatcagagtgcagctcctcgccctcccaatgacttaccaaatcacacgcctgccctagagagacccaccagtgtcttaggaagtattggctaaatggaaccacatagcratgtgtggccttggatatttaacatcaaaatcatgctttggcaagacatgttggcatcactcatcaacaggctctcagttctctggattaaaggcaaaaaataaaataaycaaagtcactttaaaattagtgacatgttttatactaagataattttgcagaaaaactgccattttaaatcaaagtacgcagcaagggagtgatctactaggctttcatatcaaatataaaactaccactaaataactgtttctgaaacttcatgtgtagtttatcayatattaaattattaacatttctgttggaggaggtatttttcataaaatatttaagcttcacatctcagaacactatttcaacaacagataccaaagctataaaatgaatgttacagttctatcaaatattcagccttttcattaaggaaaaaaagaagaaaagaaaaaaccatattaagccattactatgacacgacctttgctcaaaaaaaaactcatgtttcaacataaccctcttgcacccctgggaacatgaaggccagaggtcacccttttttttgttcatggtagtccatgatttggggacatagggtcagtggatatttcaattagtatcaagagttaattattgtatcagaggacacaaatgagaagctatcaaaataatttaattagaaaacaaattagaaattaaatacatcttataaaatgaccttccattcctagggcagagacaygttcaagcgtaaacaagttattctggctgaagttgatagaataagcttagcatatatcaaagaaaaaactacccttaagcaaaaygtttttctattttattcggttctgctttccatatgcgttctcatatttttttcatttcagatgttcttccttacatatacctaaatattaccttttsccattttctactgctaaccacagaagtaacttcaggacttgagggttttgggggctttkgggtgttttttttttaatgtttcatatttcttcagagaaggaaaaagtcttgtcatttatggagcaccttttcacgaaaaccacgcagtgctgttcctagtgtagaccattaaagtgaaaaagcattactggmagactaattgtgtatgstgtagcatgcagtctatcacagtaacccatcacacaccaaaatgcacatgccggcagacccgtgcaaygatggttgatgttcacagtgaccctgaggtgttctgtgtaattttgagctaaggatactttattatagtcaaactttttggaggtaaggtctatatgaatacttattagtgaacagcatatagttggtcrttgtgggtaagtgggagatttccttgacaggttattccctcagacacacagacccaggcccgtaagcrgcagatttagacagcagaaaatccaagctcgacgctgcagcaggcgtaactctttagtggtacagcaggtttacatcattactgcccagacaaattggtcatgcgtctttaatttgttctcacaaatcactcccttcactagtgtgatagttttgttttgcaaatagtgactctaacagagtgtatagtttcagatagaatatttggcatgttgatgctgaatcatgccagccacctttccttaaggagaaatggaggaaaaaacacaccttacaacaatctttaaggttctcgtttagttggtgttcttaaaaaagaagtatttaaggagaattataggttggctattgtgtgtgttgtgggggtgcttgcttggtgttttgtgagtggacactcatcctggaagaaggaaggggcatcgggcagtcccagccagggtacatgggtgtagagtcctttctgaactctttttttttttagacaggatcttactctgttacccaggctggagtgaagcggcatggtcatggttcactgtaggctcaaattcctggactcaagcaattcygccygcctgcccccgccttagcctcctgagtagttgggactataggctcaccaccatcccccagctaattaaaaaatatatattttttgtagagacaggatctcactgtgttacccaggctagtcttgaactcctggcgtcaagcagtcttcttgccttggcttcccatagagctgggattacaagtgtgagccacctcgcccaggcctgagctttttttaatgcacgtgagatttctggtgtttgcttatgtcagggtcaaatggaactttgccttgagactcagagaaagaattaacatccatcaagacttaagaaagcatagtccatgctttggaacacaccaagctctattgctaaatttaattttgttttctaattaatttttttccaatagaacaactttttcaaagcttcatattttatcagcaataaagtacttcatatctgtaagtccaactcagtgaatctgagggaaggtttagggaaagaaagaaacaagtgactgattttaaaaacagaatagcgatagcattaaccgataaagggataatagaaatagaggaaggttagtgagaaatatagctctttcttgtatatgtatatttcaaaatgttgtcaacatattcaggtgaaacacttaccaggtgattagaataatggttgtgttttttagatgaggtagatttcactgcatgaaaatgaccattgatatggratataccagccaatgaatgagaacggaacaaacaaagagatgtaaaagatgagcagtaatttgggttgctcctcaacaaacatggaaaattaacgttttagtcaacaaaggagagccagcagggtcaagttctgcaagaaatgtgaagaccaaaaacaggccactcactctattaagctgttagaacatcatttgagaatgcagtgggagcttaaggccaaattgttgggtgttgagaaggcagagaggggtggcactggctctgtgcattagccttgtgcaagaacaaagcggtttttcctcttggggcacgaggacatttgtytcccagtggcaccttgcaaaatgctagacattgaggaaaattccagtaaacacatggttctggctcttaaaatttcgaagtgtcctgattttaatataagaatgttctggcatgctagagatagtgatggcaggccacagtaaaatttctaatatcctccacattcaaaagggaagtgaagaagctggccagctcagcagacactactgaagggatggatgtgagactccacgtaagttaaaattgagatcagttcagctcagaaaagagaaaactgggtgagacctagttcatattctcagaggtgcaaagggttttataaggatgagtctgacaagttttccccgtttctccagagacccaaataaagagaaattagttgaaattaaaggaaccttttttttttagtctgtatcttagaagataatgaaatgttagggtggtcttctaacaggggccacaaagaatctttaagagaaaaaaaggagagtctagtatcaatcaacgttaaattatcttacatgcagttggctgaagtgacaggtcatggccaggtgatttcttgagaaccttttcagtaaatgacttgattactattatgaatacatttagtcagtgcgcttcagaaatgctattgcttgttttcgctcatccccaaaatgactatggaaataattgtrtatgtgtgtatgtgtgtgcgtccagctaggagggaaactacaagtagtactttctgatttttgaaaaaagaacaactttacatacaattcagttttacattgtttctgcacaggaaaactgcatgtcgtcttctgctgtaactataaaacacatccacaaaagttgtcactggaatttgcttaaatgtttctcaaagcagaaaaagaaatgactggtctctggttcattcagacgcctgcttatgatcacaattctgttgtcttacgttgtcatattctgctgagaatagttcaacaaatactactcttagttgaaagctttagaattttcctttctggaatatttacagatgtgacaaaatatatttgttataaatgtattcttatcatatcaaatgacctgaaatttgccatttttgattaattcctggagattacaagaatgatgagggcagttgcattcagawgttgyatacagttgccctttgcagaagtacatggtgcacatgcttcagtgtatttaatgatgttaacagttcattgattaaagttcaccttggaaataaacaaactttcctattcatctttcaaagttgttacaaaaacagaagcaggttttttttatggccaattcttccttttcttccttagttggtggctctttgttttgaattcccatagtagctgtttatttttccrctttgcacaatgtctgtattagtgatttactactcgctgtctttcacaagacctatgagcgtggtggtttaattaaccatattttgtgcatgtttactcttgacattaagaaaataataataattgcttaaactaacaaatggaatatgaatccagttgagttactttgctccttgttacctcattccctcaggtgtttattgctcttgtagccatttgatgtgaataacaagaattcattatttcagagtattaatgttactcattggactccttccttcttccagtagatccttgctgtaaaacatcctggattctcattcttctgcctgagcagttcccccgyaacggtgcgtgagcagatcacatctctctgacagaagggtttgcaaactatgcccacagaccagatccccagggctatttgtttatgcatttcctgtgaccacttttgcagtatgatggcagagttgagtagttgcaacagactgrcccacaaggccaaaaatatttattattagggcctttatagaaaaagtttgctagtggttcccagttccgctgtaaaggattttgtccctgtttctttctagtgtgatctccactcttctctctttttccgtggttgagtgttctgtgtcccagccaaaccgacattcctttctatttaactacaacattttgcctgtgcwatcttttcatctcatgccctttcttcatcttttcaaattctgcttctcttttaagaaccagcatatatgccacctcacccaagaagccttatctggttcctccagcttggatggctctaatcttagtctaattgttttctcccacgccttgtgggtgtgtcctcccccccaccggctgtggagtggccrggaacacaagcctcctccccaagacttaacttcctaggtgaatacgcaactccctcccaggagtggtggccactctaagtcctaccaaggktattggactgaaacgccattgtctttcatgtagtgatgacaagtcatttgtttctaaagtcaaaaataattacctagtgtaattaggtaattatttattttttatgtaattatgtaatgtaataatctacctatatgtatagagcattcactcagaaccctacttgctgatttttgaaccatgtccagccctgaaattatgtggtttcagattcccgtgtggtggtggcatctatctgggcagctcctccaggagttgagggagtgggtctgaattctcacagtcctgttggaagtgtgtggccaggctggttcctttaactgcccattagagtacactttccttccttgtggggcccttctagcctatcaggtcaaatttttgtggagtttccttactagtcatttccatttagttcacaaaatcagaattcaggtgaatgtagcaagcttagctcaatcaagttacactctcttcttctctttcccagcacataacacaattctagttgatttattactagcacagttgttctgtaagggcaggaagcatactcttctastgatcactttatgcataacacatagcatagtaggcactgccaaaatgcatataataacacgaatatgtgtatatacatactcacatgtgtatgtgacacaggattttttaaactccttcactcagctagttccaggttcttgtctcacgaccacgaaaaattaggcatgcggacatcgaagagtgagtggaatagaatttattaaacaaaaaggaaagctctcagcaaaaagagggatcctgaaagcaggttgccagttgccccccttaacagttgaatacgagggcttctatatatccaagctgatggcgctgggttccctgtttgtataaggtttgaattcctggtggctccaccccttccccccagtgtgcatatggtcccttagtctgctctgggcrtgttcaggcaaactccctgtgcaggttgccttatctgcacaaaacatgtggtataaatacttggggggtgggtcggagattcttcagggacccttccctatctgcctaggagagttctctgcctcctgcctctatcatatgtacatatatgtcatgcatttccaactacaatgactatgtttcattcatatttgtatttcctgtaggcataacactaatattactgacaaagctggtcccacccaaatgggctctttccctgtttggtgcttcaaagctagtacacaaaactgaaagcgtcgagcagtgcaggctttaatcggatggccatggaattgagtgggcacttggatcacagatcagcttctcagcctgtgagagccaggaagtcacagatatagggcatctttaatgaatgggttgggcactaaaagcaaagggaggaatgttcgtgtcttgaaatgaacagcgaatttcttggaaccagagttgccactttcctttttgttcttttatgtttttttccagctattgtcatagtgattgtcaaccgtcatggtgctggtggaagtgtcatttagcatggaaattagattataatgaagttagaggttcttcagaggtcaagtgggccagcatcttgggatttccaccagtcttggccagtttggttatgcaggggatttgacttcaggaatggtgtttcctaaagtaaagcagaattaagaagctgatctgtgatccaagtgccctaggtcatgtaggcattacactgagtaacagtgtaatgtttactgtacactgttaaaatagttgaattaatccattctttactctcttagcattgaatttcagttgagcactccctccccactcccctcttctccccatttcatgctaattctcactcgattctcttcttttttttttttttttttcaagacagggtctcactctgttgcccagcctggagtgcagtggcacagtcttggctcactgcagtctcagcctcctgggctcaagtgatcctcccatctcagcctcccaagtagctggaactacaggtgtgcaccaccatgtctagctaattttttaaactttttatgtagagatgaggtctcactatattgcctaggctggtctcaaacttctgggctcaagcagtccctcaaagtgctgggattacaggcatgagccaccacacctggccttgagtctcttttctaactataatacttcttcctagttggcactggcctaaaacttaacctcatatgggataattaaatcttcctctgcatgctccctcagacctaggtactataaacaggttccaaaggcacttcactccttttcagatgaggttgcggtaagttaatggcgacactgtcctttagtccagctgtcaataactgcatactgtgaacggtcaaagtttacatgttggtaagaagtctggggatgtgcaccattgttctcttgctttatttttccattggaaagcaattgctttgagcaccaccaacaacaaaaaaaagattatagaaaattataccttttaaaggcaatctctkcatcttgtttaatgcaagaacacagtctgtaaaatgtagtgtgacttgcacagcaattattcactgtgttagatctaatttcagaatgtttcaattgcccattattttagcacattttttaaaaatgtaatcaacagcagtgttgaaactgaagttctcttgaaggctgatgtgttggtgcctactgattgtacaaagctgtatactgtctcttgagtattagtgcttagaggacattgagatcaatctgctttgttaattgaagccttattarttctacatgagtgtgcagtgtgctcaatacagtgaatcatccaaataaccaaaacttactacttttaagaatcaaagtttttccctatatttaggatttaatgattccctgccttcttaacagtgcattcgaatgataactgaaccttactttatggttctaggccatctatttgcattgctgcattgattattctgttgagttaataagacataaggaactgattgtccctatattaaataactccaaaatgttaaaatactttagtctcttttgataatattctatctactttctctctagtcctctatgatttttcagttcttccaatgcacccttgatgctattaacatgcttattttaaacacaagttcctgggtgaaaakgttaagataactgccctcctcatagagtccactcctcgtatcaaggcagattcatgcagggatgaaaagtrtgcactctgtttaattccagcactgtttcctagtagctgttgatcttgggcaagttacttaagctttcaatttctctctcttaacctcatctataaaatgggcataatagaactcacctactagaattgttgtgaggcccaagtgcctagaatagagcctcatgtatagaaagtgctaaatagctacattagctttgtttgttgtagatacactaatggataaggaccttgttgaaactgtcttttagttcagagaacttctgattttgaccagccatattscagctttcaggacttactagttgcctagatgttagaagttggaacatttgctattcagattatcctatctcccacaattttttgattacctcaacatttcttgggagttacagggatgtaaaatgaataaacttggccttctttctacctatgtgatttaatgggtagttatcctaaggcagagtgaaagagttatttgcaaatctgcctgagtgcacacactattgactgttgtgaataactaccataaaccacagcattgagtgctttccctacttacaccaactcatttgctactcaacagcccatgagtagcagtagaagctaaagagaacacgtataacctcctccaggtctttagcgaatcagtgacaatgcagaatctaaaacctaggtctttccaaaacttcagaatgaactagattcttgcctcccctcaagttaaaagaatatgcaactgtttgtacagcacctttcactgaagttctagttgaaaggaattgtttattaccagtgaatacatttcatagttgaatctctgtggttgtttggttccataaattcttgtttctttttcaagatttgagaatgcaaaatgctgcaattcagtcttcatccttggaaatatctgatggaaagatatgggcagcatcaatgtcttcaaattctgacttgtcccaaagcctttcaacctcacttctcttacccatctttgataggttcaagggctatgtctgtccacaatggaagtcacagccacatttggctctttagctttcaattaattaaaattaaatacatctaagaattcattcctttgttgaattagtcacacatcaagtgcttaatagccacttgtagctagtggtaaccacagtaactagtgatatggaacacttccatcatggcagacagttgtgttggacagygttctaggagaatcatcacagagatagttgccatatacacactctttctcactagccagggcttgggacccggtttcttatagatgggctggaagtcttcctcttgcctttctgaatgaagctgtactgacccagtcaggcctgggcagcagtcgcttctttagatctccatgggttccaccctgcgtcttgcttagctttcaccctagccttagccacatgggtaacatgaaatggaaaagaatcgtgaatcaaacacacagaagctatccaagaaaaccacaggagtggagatgccaaagagagaagaaatggaaagagatgacttcagaagattctaggttctttaatgcctcccattaaagttgtctcctacmtcatgggtcttggtgactctaatttgtcttttctctctctctcttttgtggtttttgtttgtttgttttttatktggagaaacgaagtcttgcttcattgtccaggctggtttcaaactctgggcttcaagagatcctcctgcctcarcctcctaaagtgctgggattacaggcatgagttaccttgcattgtcaggctttgaaattgtctgagtaggctgacatcagcaatgtttaaagagaatgaggtaaaaggaatagaaaatgtttgagtatgttggaaatagaaatggttttatttcataatctgttgcagttttatatttatgtacatttgtgctggttgctacatgaaatatagygcttttattgtaggttgtggtcaaagtttgaaaaatcctgggttagaattgtagttaacacaataaacagaattctttttctaattttccaacatctctttccataacagtattatrcttgttttgtcatatgttttatgtcaccgttttatgtgtatcagaaccatgaaaaacaagtgcttcatttgggcatgtgtcattgggaatagggaaccctctataggaagcagatgatggtttcagattttaaatatgagtcacaagtttggtagaagaatcacacacaaaacagttttattgtgaaatttgcagatttgggaatagggaatccttgctagttagttttatggggaaaattattgtacatggactcatgataatctgtgttaggaggtgcagagaatataaatacttgtaaaagaagaaaaaatggagaaaaaggtgcacatggctggacaatgtagatcagaggtctttatttatttgagttcatggggcgcttacttgtctgacactggcatcagggctaaggaaacaaaggtgaatatgactggctccctgccctcaaaatctgacttcttaattccggagagaggcaagtccrgtaaacaaacagctacaacgcagcatgaatctaagacagctgagcacagagggcactcagatgtgtggatgcatctgactcagccagcagagggatattttcatccttggaaccttgccttgtccaagccaggatcttctgcccccgcatcacccttgtcttccctagcaagtgtgcagatctctgccttgataacgcgtgttcttttgtacgtttgctgagatcmatgtacaactattctcagggtttttaagcagctataaaatgaggtttttacaattcagtttgaatcttctcatacaataatcatgttcatgattcagcacaggtttttacatgttgcattcytactcaagggcaggkttttttttcccctccttttktccactgaaagaatgccaacaggaataaattgagtgggatgagccttcatggttaccttttttcttcacttgggtatttatagtaagatgaaatgtgcagaagctgttttttctttcctttcatataaaccaaagatacaaggaatttactaagtgtctgggcagtcgtttggtctcatgagaagagcatggaagctgcaggggcctgggcgagctctgggaggctgctcctcaaagtgggaccacagtgccagcagccgcgctcttagtgagggcttgacttaggggtaccatgaggaactttctcatgcaagtgaagtggtgactcttgttcatcgcttccgagttttcttgtgggagcacttgcaaacaaaccctttccttttaagttcttacctcctattgaccattttgttccaacttaaaaaacttaaaaattatacctttagtttgaccrtgagccgtctctttatgagcattagagtattggaaattgtgatgttcagcaaaatctagaacacatggctgctttataaaaatatgagattcatggccaggcatggtgactcacacctgtaattctagcactttgggaggccaaggaagcaggatcactggagccctggagtctgagacctgcctggacaatataacaagaccccatctctaaaaatatgaaaaaattagtggcttgtacctgtagtcccagctacttgggaggccgaggcaggaagattgcttgagtccaggagttcgaggttacagtgagctatgatagcaccactgcactccaccctgggtgacagttagattctgtctctaaaaacaataataatcagaaaaatatgagaatcagtcatccaatttaatacttwtctgtagccttgaggtcacatggcatgcataggcttcccacttcctgctgaaagtactgtcttaaaattatcagagtgggagcagcctccagatcaggtgggagctgtgacctctcagactgtgctaaatagctgtgtttgttgtactgcttttgtaagtcaaccaagccacaggttgtgcattgtgagtggaccgtgttgcatctgcctcctgcctctgaatacrgtggtcccagcaatagatgctcaattctcagagcrtctgcatgaccccccatggtcagtactgctycactgtgctcctttcattgatcctgttgttgctgccacgagagcaaaataaaattaatataaatatatatgctacacacacacacacacacacacacacacacacacacacatttttagagggcttgtggtttctgaagatgaygaaagaaaaaaaarctgtgaaaagcaaaaatgcccaaargttcatcttctgccctgacccatcacccttcttcagaggtacccagtacctccaattcccaagtctttctggggttctgctgaaccaacacktagccgtttatcccttcatgtaagcttagggttctacattttccaatatgctaactaagccccatccattagccttacagctcctaaaatgttatctttcatttgctgtagtctcctctattgttattcttgttatctgagtgatttgaagactttttatgtctttgctggcattttggtggggttttagaagagcgtcgaggctgcatagatgtgttcgatctgtcttatttatttggacatttcagcagcctcttttaaaagaataatcagtccccagtccagaaacccctggaaccacttggtacttcttaaacctgccttcmcttcacataggctgaccgctcaacctgacttcaattcctcactccaaacccagcccaaatttagggaacctatggaaatgcatctggcctggtctgtaccatttccttaagaaatgatcactccctcctcttattttccccaaaatcatacactaactttatcacttaatgtcttgtctattattgttacctgaccattgagtataggaaccattgtcacacctctgtattctcaacaatttacataatgcctggcatttagtaggtgcttagtaaataacaatggtaattgtcactacaaattacaaaaatatgtttatagtagttctaagtctcaatcagtcttcccaaattaaccgggaaagaaacatgctcaggcagaacccatgagtttcaacacctggaggtagttactacattggcagaatagtgttgcaggggaggggaagggatggatgcaaagaaataaatctctctgtctctctctcgaaacgtgagaggtggtatgtgaaagatgagggcactgtctggggagaaacaaaatcttccatgaatgcgctttagtcttctacagggcaagtatgacctagatattcagcaattggaattacttttaaactgctcacctgtctactgttgktccttgttgatgaggaaaatcaggtgatgcttatcttaaagrtaaggtgtttgtatcctcccttgctcaggatccaagcaggcttcattccaggcatcattaagtgagtctgttgccaggaaagctgcagtgtgggsgttcaccatgactgctaaatttgcagcatttcttttcattcaaactcatggatggaggagagggtctcacttgtatttgcccaacacgtattattagtagtattattgttttacatttctgcagtttttttcatggaagcctcacattctactttccagtctcacaggccatcctcaccacgatacacatgatcatttagtagcaaartctgttcrtcagaaaactctaattgctttatgtgtgagaacattaaactgcaataaatttatggatgcagctgctccattactggagaacaagttttatctcctaataaattgatgtttctttttagtgtcaactaaaaccaaaatttacacccaaggaattgaaccttaacattaaataattacttcaatgccgctagtggtaagaaagggtactcacttcccaattctaaaaggccggagtgagggaaatggttttttcctctgttaattgtttcttgaaagcataattgcacaagggctttaattgaaataagcataggagctatgcccttttaaagaagatactgtaaatagtgtcatcatttggtatgagttacaccataaggggaaacactaaaagccttatttatgttgaagggtaagggggaaaaaagaggttcactttggtgttttgtctgcagttccatttaagataatggaatagatgcttaaaattctctggactttgatgaatatttaattcatcttttctacaagacgtttgaattaaactgactactgataaaagatacagtgtggacaatggagttwtgtaaatttggcttgctctgaggggatctgaatttaaatggccaaaggatggtttctttttgttgtttatgataattcaaatgtactaatcttgtaatactgtacattaaggacttcaattgtctggtcccatgtgaaataagaaatagtatcaggtttactttatgttcatattatggactaaaagtttattrtacgtgtgtgtgtctctgcactcatgaatatgtatgtgtgtgtgtgagggagagctctcccctaattcaaatatgacacagattaaaatggctcctggacaggcgcagtatctcacacctgtaattccagcactttaagaagccaagttgggaggatcacttgcggcctctcaggaggctgaggygggaggattgcctgatcccaggagtttaaggctgcagtgagctttgattgcatccgtgtatactcagtgtacttcagccagggtgatagaggaaaacactgtttcaaaaaaaaagttttcccccaatttctgtgaatcaggaagactttagcagttgaatgttagaatattagccaagctgaagtagccctgggcagggacctatacttctgcattgctccaagtcagccatctgcctagtttattagctttgtcatgtcactggatctctctgggcctcagtttcctcatcagtaaagcgaagaggttggtcctgataatcacaaggctaccttatcattggaatgctctttaattctgtcactcatyccacaacatataattaacacctacatcttacttttctctgcctttaaccttccattcagtgctatgtacggccagttgtctgcatgggaaaacaggaaagcaaacaatccaagtacagactggatactgttctatgccagttctatcaattatctgggaaatgattgaataatccttttgaaaaaaacataaagtattagatgccatgatagagatcagcacacattgaagtacttaatgatgcaatctgtgacctggctctagcattttggaatacagttctgtgccatataaccacatgtcagtcaatgacagactgcacatatcacagtggttccataagattataataccacatttgtactgtaccttttctatatgtagatatatttagatacacaaatrccattatgttccaattgcctgcagtattcagtgcactcacatgctgtacaggtttgctgcctaggagcaataggctacamcatacagcctagctgggtagtagactacatcatctatgttcatataagtatactcttatcatattcacatgatgatattrcctaacaacccatttctcaggatgtagctgcattgttaaacaatgcaagactgtagttctaaggttgatggaatttttttttaagtctctgctagctacagggaaatttttccaawgtaaaagaaagatcttgtgaaaaatcacataagaagcacattgggtctctggggtaaaattaaagggttcaaccagaagacatccttcttcctcttcaagaactcggatctaagacctctgcagagccatttttggtcttttaagaaaaggcaaaagtattrtaatatttagttattagcatgttcatttgccaaagttctaaaaattccttagtactatatatgtatattttatagaatcttgaggtctcttgaataagtaacagaatatatttaaagccgtcttgtggtacttgcaatctacttttactattaaagttrctataaagatttagagatattatatctttgcctgtgtgatccattgttgccatatcatggagccaactccttggtcagaaacataacctccaattataacattgctcctatgggaaaatctgatccactttatggtgtggtttctaagaacacattgtggtgaaaaggagaggatgcctgtatttttttaaattgaagcttttcaaccctttataacatcagttatgacttggcgagatgtgaacaatgtgtcgtttatggattgaatttgagtgtggtctcacgaccttttccctaatgcatacaaaatggataaaaaatgtatacctcaaactgaagctttaattggaaaatttggagctgtacatatatacactcatgtttttagaataaggattttattacaactgttgtaaaataaaatttaaaaaaaaacctctcttctctgcagtgccaaacatcttgattttccaaacatcgactaaagccacagttattgataacaaatcctgacttttctctcaaaaattcaaaaagtttactgtcctttggctccttactgtcattaatcagactacgtttcttggtgaaatctttaattacatctttaacttgataattacttctaaatcctgcacagaatcatagtcctaaattataagggcaaaaaaaaaaaaatgaagcttacaaagtttttgtttgttcgtttggaaagtattggtgtatattgaagatgtccaatcagctttctttgaaaaatctctttcacaatactattcactgggccttagaaactgcattaactaaatagttcatctgcaaagaaatcctgaggatatggtgaacttggtcaagagaaggatacaatttctttccctcttttcwtgagaaatctagccagactatagaagggacaaaacatgtatktgacagcaggtattcatctcacattgaggaagtaggaaggttwgtcttagagatggacttggagaggataattatgataatactttagagctgtcatattttatgaatttaaacaaatttttaatttactttagagttttttgtaactagtgaaaccttagcactcatagaagtaattggattggcagcccctgagaagactgttcaccagcaaagcagattcacctgccatagcccaggtattccccaagcctgaggcccagctggagggagcagcgagattcaggtctcccacctgctcccagcaatgaatcttttgcggcagagtcsggcacgtcacctcacatactgctctcaaacccagcacattgtaacatcccacgagatcccgacttcatgagcaagccaggcttcttttttgcttctctcttgctgtgactcaactacaatgaaaagtaaaaatcgttattttctaagaatgttgttggttgggtttatcatatatctccagccctcttctccatattctatcactgtgatttcatccacttccatgacttacattacacttgtgtatatgtcgatgactgccaaagctatatcttcagtttcacttctctcctgagctgcaggcatgggtttctaatgacccactctatgtctctccctagatgtccttattcttcatcgtattgagtgtttatgaagtgcctcttctgtggtcagcactggattagatgtttacttrtatctcatctcatattattcacatatacttgaagccaatatgatgatttctataaggggtatcagaagaaattattcaaaatatgacaagaaactctgtgctttatatttcatacttaacaaattggtcattgtgaccctctatgagttaagaccaccttatttccaaaaaattatttgaagcagcttcttaaaatagctgttcaaatgaagtttacaaggacacaaaaatgatagaaagaacattacaaaattgatatgactacctaattggaatgacagagtaattatagttgtacatcagtttaatctcagagtttcctggcagccaaggcaaaaagaacaacatcaaatccttaatctacgatcagaggaaatatgttagttcatgtggagaatactttcactagtgctgaattctaggagtatttttaatatacatacttgtaatagataaattgtgaaacagaataagcattttcaaacaaagacttgtttgagattcatgaattttcttatgctcaattctttgataaacktgagatcatctgtagcaacaccttctctggcattaaattgtgctgtataatttcactgtgaagtctatatacattatagaagaaaaattatataacaaatcaaataacattttttaatatagcttgcaaagacacagaaatattcccattatgaccatttgtcatattggcttttggtcaaatctgaagatatatcattacattgtaaagatattttcctgggatttaagttaatagaatttagaagtatgcagctttagaggtcartattcttggtcttattacaaatagtaacatgttcatagagaattttgtgaatacaagaagaaagaggagactaccaggaaagggggaagtctgtttcaaacctctctcaggataatcactagatgatttctacctaaaactgcaaaatcagtttaagattcatgtttttatcctattatttatttaaaaatactcaaatggtcatcaattatttttattgctgtttctggtagtgctaattttaatacataccatcaccatttttaatcaattataagattcagcttttcagaatttaaaatccctgatatcaagatacttattatacaatggcattttaattgacagcattttctgtcttcttagacatttataaaatgtgtcatgatcaayggtttcttaaattcaacaattaaaagggttatagttgtttacttcgtaaatacttcctacagttctgcaacacaaaattcagaccatattcattaaaaacaaacaaaaaaaaacttgattctggcaatagagggatagaggattaattctttgaagtttttgacatataaaagggattgtggggtctccttttattggaaagacagagaattaacaccttaactgaatccatattgtaataaaccctaggacttggaaacaawgttgcaaatattaagtatcrtataaatttatctctatggaaaacatcttcaacttcattaaatgttctgtatgatgccacttatctatttcatgcacccccataccttctccaaaagttctctagacaatgttgcactgagaccacagagatggcatttttaatgtcaaaacaaaataacgtagcagaaacctatagaaacaatgttgtggtgacaaaatgaaatgtcagtggaggtctgttgtaacataatgtcaaaacaaaatgtcagccaaaatccayggagacactattatgatatcaaaatgaaacaatgtcagcgccagtctgtagagacattacaatatgagaaaagacaaaacaaaacggtatctgtggaggcctgtgacttctgaggcttaatgtagcttcatgtcaggtggttggcttgtgcaaacgtggctaatatttcagtatgtattttctaaggcttttcttttccagctcaagaaaaggaatcccaaagcggttctttagtataagtggctgggttaggcaattgctgatatttatatctaaatctatgcctgtgtccgtatgtatgtcagtgtgtttgtcagtatctctctctattcattctgggcttctgatgcttccaaacacatcattagtcccatttggtcttggcttagtttccctacacaccagtacttggacatcrgttggaagtataaaatacaggcaaggcagtgttccaatctgcttgggaagggtcatgctgagttttagyagatgttttgctccattcttttctcctctgtcctcaggtagaagctggcactgcccccttccttactgagccttgaggcaccaggtggttttgaaatgtgcccctgaattcctgtgacctttggccctagagctcatgatctggcagcaccttggctgggtaatactagtactctgttttcccagccctttcataggagctgaaagattttttwaaaaaattatatatataaagagaaaaacaaatattttaaaaatctataatcatattaagttgggatttttttccaaaacaaagttagtaaagtatcaaattaaagtagatatcattgtgagacaaattttattatgtagaggcaaatttagacattgtaaagggaaaattttactatatatataaacttataaagatcaaaaggtttttatccacatattaagcaatttgagtctggaattaaatattgatttgtttttgttttagaaatttgaaaatccctgaaattgagagaaaaaaagtcaaactagagaaaaaaagaaaaaactctgccacaatagtaaagatatatttttctcattttaatcagctgcagtataattttaaaatcatgtattaagcaacaatacaataaagtctcaattagctagaaaccaagcaaacccacagttagccaatatgtttccaaattacacttttagaaacaagaggtagatacctatraaagtgctgttatcggggtgaggtggggggtctgtcagaaaaatagtgagaaaccaaaagaactcaatttcgtcctttttttctacaaagtactcaacagtgagtcatgaaaatctcaaaagtttttttttttaagttaaatatccattattccttcttttcaagatggatgagacctttattactttctagaaggattttcaaacacaaggattgaaacaaaaaaggctttcagtaaacctttggctaatcagcttaccactcggttcttctaagactgtgattttcagaaactttwatcaggttcagtttacttgtatcgatttgcacgccttagccacaaaactacaatatctactggtggggatgtgctggagcctgaaattgtattcttgaggcatgcgcttccatagtggtgataggagcatgcagtgggaaaagtgggaaacgttctttgtcaccagcatcagtgggatactcctgagagatcagaataggagctggtcactctttagcaggagaacgaagagtgaagaccagcaaagattgaaacagaggattaaaaattgtatgtcacagtcaccatattgaccagcagaagtaaatgtgggcaaaaactaaagccaaactgtgattttcatcacatgtcaaagaaaggaaaactagtttgagtatagcaccaggtcatgtgcttgggagaaaaagtktggaggactcggttaaatctttaaaacagtatttgtatttggagctttgtagattacaaactcaatgttttaaaaatgtactccctaaattaaccataaatattgtaaaaaagtaatacagaaattattcctaaagtgtgttaggaagtggtggacataattctgtaattataaccaatagctgttaccattttggaacatttacatccatgtctttcgtctacttaaaaaaatatataagcatccatataccagttttattcttgaaaagayatttaagctatttgaaaataattgagaattaagaataacagaaattagaaagtctaacattagagagtaaagctatttcttcctcttttccttttggaaatcactccaaaacaagaaacagaatgagatatagaaatagtaactctatttttgtgaaaatggacatagttaatatagaatgacagaatcacactggaatgtcaagaatcaagcttatgcaccccgcaccaaagattgctagattctcttcggaagacatggaattgccctggaaaaggagtccacatacactgtcatgagaattcccaaccaaaaaagtgacactctgcccagccttcctgtccaccatttcataaacccccctgaagcacacagtgactaatctgctttttagtgcttcactcttaaatataaaagggcagaaaaacatgtgaaacatttcagaaaagccataattgtggaagacagagtccaaaacaaacaaygtttgtttgttttctttaagaacttggaggaaacataaaattaagagaagagaaaaatattaaggaattataaacagtaattctgtgaaatagaaatgatgttaaaaccatcaaagatgaacaggaggctattgaaaggattattgagtaaatgggaaagaactcttagaaaataataaatacaatatcagtattaagaaacacaatagaaggcttgatagatgaggttgagaagtttcccataaaggaaaacatgagctataggacaaagagcagtatagtgagaaagaaaggaagtgaaaagttcattctgggaggtccaatatttaaagaaaacaatttctagaaagagagaacagagataataaaggatagattattagagaaataacmcaagaatcttttccagaactggagaacttaagattccagattaaagaatcacctagtgctgagcaaaatcaatttttcaaaaaggacagcatwgtgaagttttggaataccagaaagagaagatcctgtaaaaaaaaaaaaaaaaaaaatatatatatatatatatatatatatatatatacacayacacacacaatgaagagttgagaatcagaatataatcagatttcttcacatcagtcttgtaagctagaagataatagagcaacacattcaaatattgaagggtaatgttttgttacctgaaattccatacctagccaaactgtcagtgagtggtaatgayagaatacatacatttaaagcatgcaaacgcaaaatattttagttctaatacccttttaggcagccaccgaatgtgtgctttaacaagtcccaggacttctgctgtgcagaaaaccaggaagcaggcagcctagattggcgtatgtggtgggagcttttgaggttagagggctccaggaaaaaaattgggcttaataagccatgatagacttgttctcctggaaatctgaaaaatcagattgtaaaatcattttcatataaattttgctataattatattgggaagatgtggaagatgggaatttggagtcagaatttggatttgagtgtaagagagctaatgcttcatctacctttgtaggaagtcaacaggtgtgtttaacagtaataaatcaggagatagtgatataaatatattacccagaaatgtctaaataccagaggaatttggttagacatggcttattattaaattcctagcttttgctttgtgtaatagattcatactggcaacttacatttaataatattgagcatggcactttcatcataactaaatgaaagtaagcaatgaaaccatcactagcaagagtgtatcacaaaccaggaattacaatggattcattctgagtatctcaggttgagttaaaaagaaatgtcatagaaaacgactgaaagctttaaaagtcttggggttgggtggtcagagagacaagatgtgatgaagcagaagtttcatttaagaagtttcttttaatgattcttttaaggcttttagcattttaaaatataaactatgcacatgtagtattactttgaaaaaaaaatgtmattgacaaaagaatgttgcaagccctttcacaatctatcagtaactccaaaatctgtcaataactccagttttcaaaatctatcaataactccaaaccaatatggtcacactgtttttgttttcctaatataataatttaactaaatctgaaatgagaagttaaattaattaacatttctatgtcatttattccctctctccagataaataatggccaagttgtaaatagaaaaaaaagctcagaaaattattaatgaataattatgaagttcatcaagagcataaatagaagtaaaaaaatcaatcaggaagaatattttaatgatctttaaaatgttttaaaaacagtaatacaaactcttyattaatggtttctttttagaaaactggttattagatgtatgtttcactacttttattctaattctcaaagaagtttcagagttagcctcttatgaaacttacaggtgatatatctcttgttacattatttaatattctgagtcatttcaagaaagtctgtagaatttagccatgatttagaattatgacatgatttggaattaagtactgcattgcactggaattttttcttttaaaaaaacatagcttagtttcrtatagtgttttgcaattatgctgtcattaaaracagaaagcaaaaacaaagaaaatgttcgccttgaattctttgtaatcatttcatgattaaagaattaaaataatggttctataattagtttctatgcctgaatgataaaacctttctaatatgaagaagaacatgataatcattttattgtgtcatcaaaacccatcaggttttgtaatttaatttccattgcctttttatttcagttttttgttgttgttgttgttgttttgagacagagtcttgctctgttgccaggctggggtgcggtggcacgatctcaggtcactgcaacctccacctcctgggttcaagcgattcagcttcccaagtagctggaactacaggcatgcaccaccacacccagmtaatttgtatatttttagtagagacagggtttcaccatgttggccaggatggtcttgatctcttgacctcgtgatccacctgccttgacctcccaaagtkctgggattacaggcataagccaccgcccccagcctttatttcaaatttttataatgtattcctgtttttcactctttttagtttgtcaagatttttcacctgtaacattgaatttcatttgctctttaatcagacacctaaatgtatattttagtttgaggcacagacttcaactgtgggtcacaactggctgaactttgtatccccagtggttttattgaatgaataatataatccacaaactttcttcagttctctaacctattagaatcccttacacgtccttgccatttgttagagaattcaagaaaatcacactatgaaaagtaagtgcactttgggcattaaccattataactgctttcttgcattgtgccaagaaaaatgatgcctgcctgccttcctgccttcctgccttccttccttccttccttcgtcctttcttccttccatccgtctttccttctttcctccctcsctccctgccccccgcttcctttcctttcccttgtttcttttctttgtttctttctttttctttgacagagtctcggtctttcacccaggctagagtgcagtggtgcaatcatggttcactgcagcctcaaactcctgggctcaagcaattctcctgcttcagccttccaagtagctgggcctacacscaccaccacacccagctaatttttttttttttagagatggggtcttgcratgttgcccaggcttgtctcaaactactagctaaagcgatgctcccatcttggccacccaaagtgttgggattacagggataagccccggcacccagccaacattttattttctaaagtgcatttaaattcataggtataccccgaaaacattttctctcatcttttacttgcttaaatctatgttaagattgcctgctagggagtcaagagacttgggaggcccagacctcagcccctgccctttgtccacgtacctcacagggtcttgaggaagtccaccatctttgaggtttaaagctcttaacacacattctcacaatagtcactcttattcgaatatggtttcttaaaccaaaaccttgataattagtttgacaatgataatttttaaaaacttgctaagcagtgttactttagtgctgagttttcagtagatgccccattggaggtatggctgtgatagattcagctgtccttttgagtagagaccagcttggatcatttttgtgacactaggtaagatcagctacctagggctttcttgtgtgtatttattgctgggtcctgaaattatgtatgtctttgcgcttgcatgttctctgttgctggaggacttsccctcaaaaagtaaaactaaatttttcttactcctgcctgagaccaatgacaagctaataaggaagagtgatgaaagtaataaaatagggcgaggggtacattcctgaggttttgttgcttataaaatgatagtcctgttacccagagaccacagagggacttggagtaagatctagtcctgaggctttccgatggagagatgacctccctgtgatccataaagcatctggagaactggagctatcacatcagaagcaaatgcaggattaacagctttggagaccacctttttaacccagagagcatagctgtatgtttttaatttgttatgatttattacactgaaattggtgtgaaatggacaacaaatcatgggtgtcagaatctggaaatgaattttatcagctgagcaaagtgagtacctttgggatttgcatgagtttctcataattctttttatattacagatgatgagtaaaactgtgaaaataaactgaaaatgacatgatatttcctaagtagttaatttcacatgtatacatagacacatataaatatagccacttagcctcagtttagactttctctataattcagggtgatttgtacataaccacagaaatatttgtctaaaaacctcaaagtcagtatcaagaccatttgtgcaatatcataaatgtctgggattatcatagaaaaatgcaaagacyataacaagatatttaccaactataatttttttcaatgttcaaatttggaaaagagagtttagacttacataccagtatacaagtggtaagattaaagaaggatccatcccaaaatttcagatgttataaataccctgaagcatcacaaaaaaagcggcccttgttagaaactaactttgcatgcataattaatgtgggcaccacattcctacttcacaaccagaagagaaattgaattcaggtgtttggtgaacatatgggggatttactgtgaatttatgacctgtgatttgagtgtaaaaccccaagatacttgctgataaaacttaatgaagcttgcgcagaggagctatttttatttgtagtttgataattgatacatttcttggtttaaccctcccacccttcctccattcctcataagtcttccagcctgagagatagagccatagtgaatagccacagtctttttagccagcttggcctcatgcttaactaatttgaaagttcacagtttgcttttctgtgacattttagtctgttctttcccttctctcttaatttagcgattaatactttttcacaaactgtacaggtgatacaggtgacaggaggcacaccgtgtgctttgaacaggtaccgtgggagaacgtgcaaacgctttcacagggggtgacatcaatttactatttcttaagaaagcaaagataaaggcataatactgctcatcattaaaatttagacaaatccattgccatttaaaggttttttctccaagaagaaacacttcaaggggcaggaacctgccacacatatcctgaccatgtctctctgcttcaatgtttttatctaggattttaycaagaatgctcctgatttgagagccaggagaaaaatattctaaaaaaaaaacaacgaaaaacaaaagcaaatgacaagtgttccattttaacacacggggtgtaatgggtttaatgagaaacctgtgtttgctcactaatttacagcaattaagaactcagttctgacatctgtagattagaactatttatctagagatcaggcatattttatggaattgctaatcagtatagaaaaatatctaagtgggaagcaggttgtttayctgcctctctgaatggtgtcaatatctggtagttctgtatcataggatccctttttagttcagtgacatttatccccccaatgctttagtcatcccagttcaagaacttgtttgtatccactttgtcatgctgacagtctgtctgttttgaaaggattacaactctgtacatccatggatgacatcacagtaagacattgcttaatgatctgagacgctggtggtcactgctggctgcctgttactacggcttcatgacaggtctgccctacatctgtttctcccggagtcactttttgcctactccagtcctggtgtctgctttaaatgacatccatgaaatagctgaagtttggacttaaccattggtacaagtaaaataacccagattatttttttcccaggatacaagaagaattagtaattgggcaaggaaggaaaaagtgctctcatttttctccagtgaagatgaaacaatgttcttggaaagtgggttttttactaatgggctggatcttgagttcttccatttgtggaactatgaaggaagttagtaaagagataaatttttcttaaatgaggggactgaagtgcaagaacctcctgtgaagattgagttgttacccaaggacatcatcaaggcttggaaaagtcagggttgaagaaaataggatctttgagtataagtgaattgagtcttagargctttaacctactatcttctcctttctatgtgtgctgagatgcagaccatgatgatgtttcttaagttgtaggactttgaatgctggctggtgaaagagaaaagattttcttaagcagagagcttggcagctagcagaactatagaatttttttctgccctgtgatgtgtacatgggaaaactgtctgagtgatagaaatgtatcaataggaaaaagcttttttcttttttttttttggagtgtggtattgcattatttccaggattgttgatacaatttggaaattaactttttgaatttttttttaattgggaaaagaataatgtycctttttcatctgcagtaattggatgccaartgcaggtgtgaaattcactagcatttggaatagaattttgtacataggccaaaaagtaaattgctagggctgagaagtagatagcaaaaagaaaatggccaaatgatataagctgatatggttaacaaaaaatctttaccatgtacctgtgcttttgtaagtagtggatttgaaggggcatcttttaagtcctgagctcttggcaaactaagtaaatcaaatgttaacrgggattacctttttgtgagttgtgtgtttgacccagatcccagcaggtcatcaatctctgccagaaagagaaaccagtaatgagcccttgagttcagttttaccgaatcacctggttggcaggtatattttcaccaggctccaggaaagcactcacattcttgccttggtctctcaggaggctgactttcagagatcacagagccctagtgaggtgttttgggtgcagtagcggggaggtcgacaaaaggtatcaccctaagcaattgaatagatttccatgggacattcttgactatagactggtattcactggaaagcacatttgattggtttcatgtattaagatctggcagtgagcatttttcagttacatcttctgcaatagtatttactttgtgcaatttttcccagagaccagaactttgcagtgactaattctatgaatgatcatggtaaaactcgctcgtaaaatgtgatgcctgtctttgattccactcttctaacaacatgcttttgcaacaagcaccatttgtttggttccacttgtgggcagggcctatgtgtttctaggacattagggccaccttaaatccatccatactttatttccttgaatttaacaagartgtacagcccccataatgctgtttaaagtgatggggtggtagtattggtgtgggggcggtctgaggagggaggtctagaacgtttattgctgcagtgctgtcacatagcaaattgcctaacctagtggcctctaataacaagcattgattttttgctcagacatctacagagaggctaggggttggctgatctaggccaggctccactgggcttgacttataagctrcaggttggattcatattcactccatgtgtctcttagactgtgggcrtgttcttgttatggtagaagtcaggagcacaaagaatacacccagcatacaatcagtttcaaactccttttgtgtcacatccacaaacatcctgttggccaaaacaagtcacatggccaaggccaacaacaayggagtgttcgttttcttttgctacaaaacaaagtaacacaaactttgcagcttaaaacaacacatattgattatatcaccgtgtctgtgggcctgragttccagcatgactgagctggatcctctgctcagggtctccctcggggtgcaatcaaggagtcagccagactgggttctcacacagaggcttctactagggaaatatcagcttccctgcttccgtcatygttgacagcattgtgttccatgcagctgtgggattcttggctccttgcgacttcagtaccagcaaggagagagacagaggcataaagagggacaccacgattgtaaccacaaacactgcgtgatccctgctgcatttctcattggttagaagcaagtgcacagcaaaccaccatgacacacgtttagctaggtaacaaacctgcacatcctgcacatgtatcctggcacttaaaatcaaattaaatcttaaaaaaagcaartgtgggttctgtccacattcaagggtagaggagtgcataaaggtgtgaaccccagaaggtgtggacattagggccaccttaaatccatccatcacaaatatttgctgatcaatttgttctgccacagggaagtgacatacaagatatgtacatgktgaatggctatgatgaaggcacaaacctaagagagaaaagcccatacacatgccgattctggtaaactctgtaagtcagtatttgggtcaggggacaattacaggtgaactgaaaggaagagatgaacatgggctggagtagtgaggaaaggctgcaaggaagtggattgatgtcttagacttactggtagaatttggaaagatggaagggaaagaagagggtattaaagaaagaaaaacctgagcgactgtattttcctctcttctttggcagcttttcttctcctgtaccagagtttataatcatctctgccttctgaacaatgtggagagcctgccacaattcatttcctcctcctgtctaccttctctcttccttttctcccccctgctatgggaagcatagtgtataccgagaccaccttactttaaaaaaagagtggttacttctcctttccattgaattctggatcttaaaactactctcttccaggtttccagattccttttgcataattaaaaatgcaaatgttaaagcatttttaatccatgaagaattaatcagtcacatcacaaactcctctctttcagcatatactsctctgaatagataggtgagacttcaagcctgcaaggaaggatacccaggttcaggcttaggcagctgggaaggaggggacagtttaggagaaacaagactatctggacagtgcctggttatcagttttaacatattttgggggactgttactagagcaccaccagccttattattttggtgcaatgaaagtaaatagcctggagaagcgacagataaaataggcagygtctgcagaatgtgaaccagtggttacaggctagccaacaatggacaaaattgttatttggcttacctagaatttcaaaagtaaagtaagtgaacattttaaatttgggagagaaagctgtctttctagcttctcttaaataagaagcaacaccaggccagcatcccttcatggcagtagtctactaactgcaggcattatcttcagagtgttgtccatatacctgcagtatgttctgaattcrtatacgtgtaagttcttgggccctgcactagactgactcagaatttctcaaggcaagccttggcaatcagtatttttttaacaagctctytgaatggttctcatatacacagtgcatatagatgagaaccgctgttgtaaggtttctgttccctctcatcgtacctaaggaagtggttgagttggcttgcctgtggggcacaggtgcggggcaggcttcagtgattccctgcagataggctcattgctccttttagcctgaatgggtatccttagccacattcrggaagcacatagtagtatccaatttgaagatgtagaagccttgtacaccgcatggtctgcctctgacatcaaagactgcaatccccgtagtaattatggacgttccatataattcagggtcacatagttctgtgcacgctgggctaggaatctctgtagtgtgtgatcctaggtacccttccttaaacctgtcaggaaaaaacaacaaaaaccaaaacccagatcattactgaaccaaaagcaaaccctcttcatttagttagaacgtgaaattaagttccagttgggtacaaagccaatgtgttggyggaggctgagtgttggtattggactaaaactgtcttatagctgtctgtgtggatgttttatacagaaagtatctctctgttcctctcagcatccctgtgtagatcccactcatgtggactatctgtaaattaggatttctgactcttcattaagggttttattgtctcacccatctgatcaacttggatggtatttttattatatttctcacacaaaaaaatcatgaccaactttaagttggcagtgaacctaaatataagttgattaggatgtgtagggatgagtcactattgctaatgaatatttaaaatttcctttagctttcttggcagaagagctcaccaagaactttaaaagtccaaatttgaattattggctcattatagactggccagagagacagaactgagcaattgtaatggtttcatctctcaaagccagaatttcaccttcagactgccaattgttgttccccaagggggcttgacggtcttccagtctttggaaatcatcatccatcatgaaaaccattgcagcctgttttccaacttcagccattaagtggttttgccagtcttagacaagtcagccagctttctctagagtattgggagagaaagagcagaggaaaagggggtgaaaccaaaggtctgcctagctccccagatttggaaacaagggcaggagtgacttccagaacttatcttttgctgtgaaaaacaccagtgtcaccagaatttaacattgaggatactcggtcaactccctttgtcgggaaaacagactttcagtgaattgcaaatagtaggaggtcagtttttatcaatggtttcaacttcatgatcctaataattatgggcttaaaactctctgtgctgcatgaaaataacagaagaatacttctggttagatttgtaaaatactttgtcagtcaaacctcctataakcctcccataaaagctataaagtatgccaggaacaaaaaagcacaggtggaaaaatgacagtgagattcgggaatgcccactttcctgtctcttttgtcttatgaaggtaaccatcctcactcatgcctacaccattacggtttcacataaagaacagagtgctttttagattggacagtgcaacaatataggacactatatatttttaaagccagtaggaataacaacctgcctgtctcaaaagtgtggagggacattttgaagtgacgtggactgaagccttgtgtcgtcaagcagcccaatttacagacctgttcacctttaatgttccaggccaatcagttcagatttgtcagaagaaaagcaaagaaagacaagcttttattgactgagaaaataatcaaattgaatgtattgacagtatattctagaagctctagtgaaattgatacatgaaggtacaggggcccctcccaatatgttaaatgatgaaagactattccatatttttagaagatgttaacatgatgatcctgtacatgaacatgttcaattttaratgcttaaacctttgrgattcttcaaaatatgtggaattatatgtagacttatgtccgtttgagaattttacgtactctactgtgacagaatttctctttccaagctacctctcacaaatcacatcacgcaggaggggtgcagccagcagaaccctggcacacactgagtaaccagggcaacatgcttttgtgaagagacctgatcttccgaatagctttgcagctttccattctgctagcagcttggagggtatatatgataagaagaagatgtggttcttgtcctcaagaagtctgacgttctgttgtggaggcagtagatgcctgatgggcttgaatagctttcctgatgaaatgagagagttccctgactcccctcacaggacatgcarcaggggtgtgtggcttgtctatttgactgctgtgtgtgcccaaaccccttaggggagggggagcatgcagatgtacaggtacgggagccggggttccagccccrcggtagtgtctgggtgtgggtgcctgcagctcctgaagctccagtgggcatgttgcagtgctcttttagctctccyrtctgcagatggcttaagtgttaaccagcccagtgccccccttggtacccaggcccttgtctggcatccaggaaaaatcaggtcccacagggtcttgtaagatggtgaatgtggggattttattgggtgatggaggtggctctcagtgggatggatgggaagctggaaaggggatggggtgggaagatgatcttcccctggagtttggccatccagtggcccagtctcctctccagccatccccagccaaactcctcttgacattcagatgctccttctcgtctcccttctctgccgcaccattctgccactcttctgcccttctgtttgtctgttcatggagcctggggtttgcagtttatatgggtgcaggataggggggcgtggtgggccaaaaaggcaacttttgggtgcaaaaacaggaatgcctgttcccatttagggttatgggtttccagacttctgagggtgggacctttgctgaggaaccgccctctcctacccagtatttccctgtctcccgtccacgtcactgataggatgaaacttactgctttagtgaatggyatagaccaaaagtgctgtgagatttatgattgatttaattttggtcatcaatctctattactcttggcgaaaatactctttttaaaatttgtactttacaaatgaagagctttggagcctgatacatgttttacaaagtgatatgcatggcatagtgaaatgagggttggactgggagccagaaaatctggattttggtctcactttccccactggccagctgggagatccccaaatgaaccacttatcttctttaaatgtcagttactacatttgtaaacgtgtgcgtaggtgggtgggtgggtgggtgtgtgaaatactaccttctgcacctatcttataaggtatttctgagaataaaacaaaattcaatactatacaaaaagaagrccgtattgttattaactagatggttaaatsaaactaccacttgaacttatttttaaaatgtttttcatttttgctgtgagaattgcattttatttatagacctctgatgactcataaataggaacctcgtattatgaaaatattgctgtgcatttgtgcagctatatttcatggtgtcctctcacttgattattacaactcagatatttagagtaaaattattatctctacttcatatatttaaaaaacttcagcttagaaacattaagtacgttagtctaagaaggtacagaagctaggaccagaccctgttgtttctgacttttaatgcaatgtcctttccaaaaaaacttccctgccaacaccttgccagattacagaaaggaaatgaaacttttaaagaacagtgcaaaaaaaaaaagaatatctaaaaatattgtttaccctctcaaatatctgtctaaaatacctcaataagccttaatcctaaaaccaaaatgaaaacatattttaaatgcccacatattgttttaaaaattcactttctcttaaatggygtcatttcacagcaagttgccatgttttgctagcaactgcagttcacagataatatttctgaagggtattcactgctgcctcatctctctttcagtaacagatcaactcctagcaatcatgatcggatacagcgtctgaggcaagaatttcagcaagcaaagcaagatgaagatgtagaagatcgtcrgcggacctatagttttgagcaaccstgggtaagtaattggttcttcagcacggtgaatggtcctacaacttccctgcagcaaaggccactaagctatgacctcaatgctctatgaaacgagacaagatggagccaaattcctttgacctttaacatattgaccttttcctcatttccatctgggtttcatcattgctaatttcattttatatcttgttccaccatctgtccattgcctaataggtttcactagccttatgacaagacrtagcaaaagtattctcactctcaactaagcattttttaaatttagtaaatatttttctgtagatacatattctcagaatcagagccaaaattaatttgttcagcacttctccattgtgcctgtaatgtacaaagtacagtgtttagtaattcttttttttaaagagatgaggtctcgctttgtcacacaggctggagtgcggtggtgcgatcatagcttactgcagccccaaactcctaggcttaggcartcctcctacctcagccaccagagtagctggactataggcaagtgccaccacacctggctaattttttagttttttgtagagactgagtctcactatgttggccaggctggtctcraattcctaggctcaagtgatcctcattcttcagtctcccaaagtgtcaggattacagttgtgaaccactgtgccaggtctagtaattcttgattctttaatcttttgcaccccccatgtgtgtttgttgaatccatcttattccagttcatccccctcatagccaccagagtgaaaaaacttcagatggctttctcartgccagaactgtgttctgatcttgtgtctcaccctagagatgacagcacttctgagagtggaggggttgggacagattttttgagatgatggggagtttgaagaatttctttgggagacttgagagtgagtctgttagaggtgaataaataagctgcttaaggtaggaaactctagcatggggtattaggaagtccaggcagcatggtaatttgacctaaccggcaatgcttagaagactgggaatagaaggaataaatttgtggattaattctttagtgggggttggaagatagacatggcagaaagccaaggsaggtgctggagtcctaccaaggatactggggaagcatcgtgtggtccaggtggggtggcaagtatagctcaaggaaggattagcctcacagcctagcagtgtgcaagagggctcaggatctaggggttctcaagcctaggaagttgtggtcaaaacagtgtattttttggactctaggatcttggaagtagaggcgatagttcagacgatgttgaggtctaaggcctgccatctttgcacgtgagttacagaagtagagcggagattagtgtccataaagttgacaagttcagttcagacaaagtgttgggaatatcatttactagatatttggaagagtaggacagaaggaagaatggtgttataaaaggctggaggccaggcatggtggctcataccatcaccccaacactttgggaggccaaggcaggagcattgctcgagcccaggagtttgagaccagcttgggcaacatagggagaccccatctctacaaaaaaaaaaaaaaaaaagtttttaattacccggatgtggtggcacatgcctgtggtcccagctactcaggaggctgagttgggaggattgtttgaacctgggaggttgggactgcagtgagaccctggctcaaaaaaaaaaaaaaaaaagaggcttgacattacaaaaaaaaaggaacatttgatttgaggaagggtaaactacccagctgagaggttggttatgttgaagggaaggggagattaaaggtagaaatgtaggaagagccttcaatgctagattgaaagtttgaagagaaatagtgctaggaaagaacactggcccagtagccaggtggcctggctcttccggcctcagttttcttatctctcaaccaagattagaataaatgattgcaggccaggcacaatggcttgtgcctgtaatcccagcactttgcgaggtcaaggtgggctaatcacttgaggccaggtgttcgagaccagcctggacaacatgatgaaaccccatctctactaaaaatacaaaaattatccagtcctggtggcacatgcctgtaatccaggctactcgggaggctgaggcagaagaatcacttgaacccgggaggcagaggttacagtgagccaagattgcaccactgccctccagcctggacgacagagcaagactctgaatcaaaaaaaagaaaagaaagaataaatgattggatgtcagttactaaacccttggatgaaatgaaagtttaagaagaagctaaatgtaaagcagatgcaagtagaacccctctagttgactacagaggctggatcctgttagctgctgctgaagatcagagcttctcaaagtgtggtccacagaacagcacctttagcatcacctagaaacttgttaggaatacrtattcttggtccctgcattgaccctactagatgtaaacctytacgggtggggcccaggaatctggtttttaatgagccttccaactcattctgaaacaagttcaactttgagaatcactgttctaaagtctagacgatctctgaggtcctttttggtcctgaaacccaatactcacaatatattactctacataaagcaagaaacctataaatgctgctcattaagggatttagtgaccaaattagggtttgaggaagattaattttgtggagcaaaggcaaagaggaaaaaatgggagaagcagtactaccgttggcccttaaacaacatgggggttggaggaccatcccccttcctcctcacacacacaatcagaaatccccatgcaacttctgacttcccgaaaacttaactactgcactaatatcgcactgttgaacagaaaccttaccagtaacatagacagttgattaacacacactctgtacattttatgtattatatgctgtattcttacagtaatataaactagaaagaagatgttattaagaaaatcataaagaagagaacatacatttccttttctttaaatggaagtggatcatcataaagatcttctccattgtcttcagattgaataggcaggggaggaggagaaaggagtaagtcttgtctcagagtggcagaggtggaagaaactctgtgtatcagtggaccctcaaagttcaaactcatggtgttcaagggtcaactgtagtttgaagagctttaacttagttcaggtgaggaagatggggcaactggcaatgtgggatcagcatccaggtgtaaaagcacctcatgaaatcaattcttgcctaactttgggaggttataaaacaagttccctggaaaatctctaattgtcttctgcaacaatattactattaatggcatttttctaaggtatttagttcattttcctagatgatcaagtacattgagtcattcccatgtagcaacatgacagaattatgttaatctgcttatattgtttggcataattgactcaatccattcctactacatttcttgaaacaggattcttttgtgatgtgtgataaahtcttaactatgtatatttacacaaagaggctgaaaagagtaatgagcatggtgtcaagctgaaggagaaaacagcagctgaatatggaaatagttaacacacatgcacacagttccaacctggcacagccccgcctgagcttatcattctccataccatgccatgaggagcagtgttcgccatttgactttgcctgggaatgtggattccaaaccagcatcttgacatttactctttaactaattatttaattcatcaaattcattgagttcttactatgtcccaggcattgtggttggtatgggagaacaaagatcgaaaagaaaaawtgccctcagaactctccagtagaactgataaaaaataaaggaatacttggtaccatatagcagaggtaggctaggggtgtgcatggggtgttgagaaccacggagctgtgaggaccacatcagtgtgcggtggtcagaaaaggcttgaaagaacccctctttgaaattggaatatattttaaatatataacagagaagcagacatatgtctttgagaactcagattgatgagtttatttctggtttctgacattgtatccacatgcgagacctccaggtttgtttgaggctaaatgagtatttcctacgtcttagtatctagatgtttttcattgggaaaagtgaaaatgatttgaaattcattttggtttctttataagattttaactttgaatgggaacagtgaataggctggaatgcatttctatgttatctacttaatatgaacaatcatgttagggaaaatgtttgaaaaaatcttgtacatttggaaactcaactactgaaggtcatggaccacattattatatatcaaaatgccatagcaacttcagacagacaacttggcttgtattagcatttccggtaatgagtgagcagggaattatttggatgacaggctgattaccttagaaatggaatcatttcctaaattatgggtcacaagttgaccttttcttttttttttttttttcattttcaagaaactgagatcttgctctattttactgatcatgtaaatgagcttaaagtgactggaattctacttagtgtattaattttcataccaattcttatggttaccttaggaagagctgctcagttgtttaaaatgtagcttggtctatggttttaattatctgttttacaaaatgagctttttgcatcttggaatccttctcttctcttatgtattctgaccttgaagrgtcactgtatttggaagggatrggaccatgatctcattctttggaatggkttgtaatcattttagttttaaggaaccacaaactcaccttcaagctgtgtgtacaactgagcccatattagttgaaattgtcatgcttgttagaaatgcccacacacaaagtgcagccagatgtgtcacagagaaaaatatgtaagccaattactttacatacagagcaggatgctgcggaaaattcatccaagtagccctttcaatctacctattttgaaaatgttctctataagctctagcagtacagaatgcacctgttcctgggcctttgttcaaaataatgtctgggcctgagggagctgatttgtggcacaaaaggtctttagatgagcagaggcccagaaaatttccttagctscataattgaagtgaattctctcccaagttgagcaagagaagaagaaaaggcaacttcttcctcacgtagtgccaggtgcaacataaataaagcagcaagttgctttaaatctttcttaagataatggaacaataggtgaggttagggttattatcacagagcttcgatatggacaggacttagtgttgcttttaaaagaactaaattgcaggctgcagacgtaagtacagtatgcygtaaaaactttgcagatacctgagtgttgccaacaaggagacttgctggctgagacgactgatagatgggataatggagcctttaataatagctgtattgctaaatcctttccatcccaggttgggagtgactgaaagtagtttagtccttcaggtagaaaattgatactctgcaatgtgaatatcctcttctccctcaagcttgcttgtttcctagctgtccgtcattcaatgaataacaaaatctgtccttttctcccttttcctgtttcagactttaatagctctccctgccctcttagggctctgcctgctttaattggcaaggcagtcatagcacacagccactctgtaccactagattgcctccctgtgcctgggcaatttcagaaaatggtggttttcctttcgtttccatcttttttaagacttaaaaagtatctgctctcattttctcctagmggcctccatgccttgactcaaaaaatgctgccttagttgacagccttgaaatgagtatgaccctagctctagttgggtggaaatcacctcgcatagaaatagacctggagggccgggcacggtggctcactcctataatcccagcactttgggaggcccaggtgggtggatcccgaggtcaggagttcaagaccagcctggccaacatggtgaaaccccgtctctactaaaaatacaaaaattagccgggcgtggtggcaggtgcctgtaatcccagctactcaggaggctgaggcaggagaatcacttgaacccaggaggctaaggtggcagtgagccaagatcacgccattgcactctaacttggcgacaagagcaagactccgtctcaaaaaaaaaaaaaraaagaaatagacctggagataagccatctgcagagaggtgcccatcacacatggagagagcctctgtactgtcgcaaagtcagcactttattctgccctgtgacctgtccctcagccaaaggctctgtgactcatggccatgctatgctcagaagccctgtgtggtaggaactcctgaagctaccttgggttgccattagcccagatactaaagtgcctggcttgttttgtagagcaacctttttattttcagtgttcctattgcttaagatgggggcggggataaaagatctaagcactggtgtgaaagatgaggtgaagacaaatacaattaagaccaaaacattcatttctaaaaacttcatgagggaaacgggtgtgctttgcagtcttttcagccattactcacatccttaggagcaattaagcttttcaacattcaagacccacaagagttcagtcaatagttacataattatggcatgtgtgggtgggtgcggaaggctgggaaggcacgatgggtagacaaaagttaacgttgttttgattaaaggttgtacataagtctactgaagaaaataattaccaatattagcactggccacttttcaacagagtcaacagttgacactcttcacatgatttaatggcataaaaatgatttctgctccctaccaaatctttraattgctactcttatcagaatatggaattcctattagggtcacagctcatgtgaattgctaaagtaaggattgtgaatctcaagggaatgccattagtctttttgtcatcagcatcattctcaccatcatcttcatcacaggttttcatccaaagtgcctgaatgttttgtattttactttttgttttctatatgtgcccttggacatacaaaattttgcagatttttatcattcataatttaaggagaaaatctgctcaaagtgatcctttataaaaatattacatatgtgtgtggatatatatatacacgtgcacacccacacatacttacacactattttccttatctataagaagaaaagtgatagattatttgaaattattgaatattctatgtatatgttaatataacaatgattttatttcataagtggcagcacactcgcatattaagctgtcaaagtcttacagtattacctagttctaattagtactgaaactttgtactgtggatattcatgtttgttctttactctgttaactgtctattaaatatttcgttttgtattttcatttttttctatttttattttgaagcaatgattttatttaattaagagaaatgcttaaagacttaattcataaaacaccgtatgagaccattacaagcatgtaatctccagmactttgggaggcaaaggtgggaggatcacttgagagcaggagttcaagaccagcctgggcaacacagcaagaccctgcctctacaaaaatkaaaaagaaaaaaaaaattaaccaggcatggtggtgcatacctgtagtcctggctactgaggacagcttgagcccaggagtttgaggctgcagtgagctgtaattgtgccactgtactccagccttggcaacagagcaagattctgactctaaaataaaaacaaaatgtttaaaaaaaaaactgtggaaaatatttttttatattttaccctactaaatgataccaacattgtatagcttcctcaagcttgaattattatccctttataatctatgagaaagacaagtactttgtagtccacttacaaaaaaaaatacatatttttcacttgtggttttaaacataggccatgaagagattyacatatcatggctctccagcatcctgtgtaatatatactcgtgtgtttatttccatcttacaatctctattgttattatggctctggcagccatgktttttttttatttaaaaggtcattgcttgtaaccaatttcatcacagggttatttgtaatttgcrctgttagaacagagcttcgccttgttctctggtgaatctccagagttattacarttatgcctgcgcaggtatttccctatgtgggtgttactttgtcgctgcagttgttgatgatattttatttgaaaacatacacttctctgtgaggttacaaattacctcttttcttcactttatttttgtgcttggactcagatacattattttgttcatgccatagggattgaagccacagtgtgtaaaattccagattgccattgtaatactgttcatccagtttttgtttttaagaggtcttcatttaaattgtgaattagaggggtgatttttattcaggtcaagtgtcaaacttgccgggatgaacttatttagttgttgctctgggctggtcatgtatgcaatcttccttgaaatatgtgacctgttagagggttttatcttaaaggtaagagtgattctgtttagtaacccacccttttgcaagttctaaaaagagaaatggagtaaactattaatggtgaagccaatgtttatgtttcttcctggtgagcatgatagtatgaaatatgtcagtttgctgatcccaarctcattcrctccttttaagttttcagaccccatatgctgataatgtcatcattggaatgtatccagatccaactagatacttgtagctgataaagtttgaggcgaacagtgtcagaaaacacacagcagagaaaacaagtccttcaacttcttttttctctgtcagaagcaaattttcaggcctatgggagaaacaacttaaaaatacacctgaaatttctacaagaccttgcaatttcccttcacatctccacaagcagcttgtcacagaacagcacgagcttaaaaagctggttactaaatcctgctgcagaatgccagatctttcaagactgtttgacacatgcatatagtttacactgagtgaaaaggaaaggaaaatgtggttcttttgagggtgtaaaggaaatggtgtagtgttttctttctgtccagtggtttatctcaagcttcccattgctcaccgtgacaagaaaacagctcagtttcctttttggccagcctcatcaagtgtaatggaagaaaatgtctgtctcttttaatgcagttgatgaacaattgtttgcataagcagaactcgctcagcgaagtgtttttcttgctgaaggcctcactgatgtgttatttgaacggtgttgtgaagcgggtctctgaatacacatttgttccagtgagtgtggttataaagcccctagtagagactggggtattgtaaagcctaatctcctcacacattatttttgtatcgggatatttttaatatgctcactaactaagcccatatgctttgaaatgtttgtcctgtatattgcttcattactgcttatcaacaagtaaggttgtgctggctttgcagaaagagaacaatagatgatgcttgatttctttctgtgctggccaaagccaaccataggagccattcttttggtaacaaggctacctgttatcttacagctcgccaaatgaatgytcagactctgttgttttagaaaatcattatcagggcaaagtctaccattagctttcaactctaaaagaaaatcaataacttgtttcaaacagacattcctcactcagactatgcctgttgcacaacgttgcataacagagggggaactgagggtggcgagtactgaaaaggatcacttaaggggcctactgctgatgctgtgacaaaccattgggatgtttcataaatgtagaggcaccattgtmtattttgagcacagctacttttatttcaaaaggccagatctagaaggtaagstaaccattgtcagtgagaaattgaagcatcccagaaacctgatctataccatgcggtatacacgttcagtaatctgatttcggtgagaagcaccaatcaccagatgacttgctgaccaaagtatgttttttcttttctttcttttcgtttttccttttttttttttctttttttgagacagggtcttgcaccatcacccaggctggagtgcaatggcacggtcatggcttactgcagcctcaatctcctaggctcaagcggtcctcctgtctcagcttcccaagtagctgggatcacagacatgtgccactgcacctgactaatttttaaaatttttttgtggagacagggtctcactgtggtgcccaggctggtcttgaactcctgaaatggagtgctaaccaaagtatttagttagaaggattgaagtgttctctataggggatgattaacttaggtaaattgccatttcctaataactaaggtaaaatgcattacctaataaccaatttaagtagcgagtagcttttgggtttgttcttttgataggcatttctgttccctgtttggctgccatctgtggattgcaggagacctgttggtacctagtttaaactaatcttggcttaaaatttcactgtcatcctgtactagaaagggaatcagctatactgtatcctgctgtaaaactaaaatatatacctaccccccaaaattcatcaacatggccacctcacaggtgtgcactcctggactttccctcttttgagagttgtagcaaatttttatttatttatttatttttggcattaacatcttctagtttttggaagagcctcattcttattgtatctgctctgtgtattctggagagaggtaaatggtgtcttatgtcagcatttaccaagcctcattataaagactagacgctgggtttagtggcttacacctgtaatctcagcactttgggaggctgaggcaggattgcttgaggccaggacaacatagggaaaccccatctctaccaaaaaaaaaaaaaaaaaaaaaattagccaggcatggtggcctgtgcttgtaatcccggttactcgggagactgaggtgggaggatcacttgaacccaggagttcaaggctgcagtgagccatgattgcactactgcactcctgcttgggtgacagagtgagatcccatctctaaaaaaaaaaaaaaaaaaaaaaaaaaaaattaaagaagactagaaagtttgatctcttcaatttaaaccacatgccaaagccaaaatcacagtttaagaaaattgagtgtttatgggctcataagagcaaatatatgtatgccacttttctcaaagaaacgattttgaaaaacaaatcacagaattttcaaaattttcaaagtcaattcataagaakcgaaatggagtcaaccagttgtgtgatctgtacagaactttctggttaacgatgtgcttgtattttcctcttccagccgaacgcacggccggcgaygcagagcgggcgrcactcggtgtccgtggaggtgcagatgcagcrgcagcggcaggaggagcgcgagagctcccagcaggcccagcgccagtacagctctctgcctcggtatgaggacgcttggccgagcctccagatcccccyggccctttaagatcccccsccctttaggaacgcgctcyttcccaagtcactggggcctctccagcttgcccctggtagcaacagaggaaccaataaatgtcccgtggctactgttccttagcgtggggggctgtcgtactgcgaggccaggggaaatgcccattgcaggagatgccagtattttcacccacaagctccctaaaaaagtgaagcgactcgtgtactggcttcttagtattggctctcctgcttcctgtgtggacaagacagtatcttcatctgaaaaatgggaagataacccttatttggcttagcacatatggttattagaataaatgatacttcataaatccagagctccataaaaggatcgagagtcagtgctgcatacgccgtggttgtgtgggatccatggtcccaaacctcactctcttactgtcccatcatcactgctctcacccatgtttaactttagagggtctcagggatgttgagcttgttagctgggaaccaagcaagaaacccttacttgcctgctccccaggggagacgccttggcccagttctccgacaaaggcctgcaagggtctcagggtgactgagtgccagtacattgaaatagtaactatttttccatcaaagtttttcttccaggcatagtaaagaataaaaatgttgaaaaacattcagctttttaaacttcccaaaacaggtgactcctgtagtcacaattcttataggcatttgttgctgtatttcaaaatcaggtgacaaagacatattttaagtgggaaaagattcatttgccatgttgatatcaggtagacttttgactttgagcaaaacagttttagggagttaggagacaaatgcttatcttgactgaccagtgtagagtgatcttgatcaatttctaataaagatgagtcctggccaggcacggtggctcaggtctgtaatcccagcactttgggaggctgaggcaggcagatcatttgagcccaggagttcgagaccagcctgggcaacatggcaaaacactatctccataaaaaaatacaaaaattagctgggcttggtggcacatgcctgtaatcccagctccatgggaggctgagatgggaggatcgcttgagcctgggaagcagaggttacagtgagctgagatcacaccactgcacttgcctgggtgacagagcaagaccctgtttcgaaaagatgaatttctttacatgttaaataatcactgtaacaaccacaacggacttcaccacatggatacaggtcagccaaggggacatggatgtgaatgagtctccatggggataagtgccatctattgtagcagtttattcattcagttgttctttttcaatccataaggctatataaaacccctttgagtactaaattattttttcctttaaagaggagaattgccaggttctttagcctgctgtaggtaagagtcattaaagttttggtctttataggacctttgagataatcttatcttacaaggaaacagctcagagtaagtaaatttcccccagctcacacagctagcaagtcattttgccagcattcaaacctgaatctgcccatgccctamaccatgattttataaggcccgttgctatcaagggcttctgttcccaaattttttgagacagagtcttgttctgttgccccggctggagtgcagtggcgcgaccttggctcactgcaacctccacctcccagactcaagcaattctcatgccttagcctcccaaatagctggggttacaggcgtgcgccacctcgcctggctaatttttgtatctttagtagagaaggggtttgccatgttgtccaggctggtttcgaacccctggcctcaagtgatctgcccaccttagccccccaaagtgctgggattacaggtgtgagccaccacacctggccccaaatttgggatattaacaggtgcaaagttcccctcagtgctctcctgccctcagcatttagaaggaggtcactgtgtgaatcaacccagtgaatcaaatgcctaagcacttgaagaattagacatcaaggttggtctgtgtaaaatccaccctatcccccactccgctacccccctgccccctccccactgccctccagtctgtgtggctgcattccatcggaagggtgagctgacagtgtggacgaattggcccacctggcatggccctccctgcacgaccacacgggtgggccagggcacttcatagcttgtgtggatggtgktgtcagggcaggggctgtgttcttatttttattggccagttgtttggcttcatatattttggccgtgcctgagagtgtctctaaggattgaaggagaaacataacaaagtgtgtataatgagagcagtgatgtgggagctgccaagggctgagaaagggaggtgggagagagagcggtgggcgggccgggaaggcagggcagttgccagggagaaggggcacttgggtcccagtcctcagaagaggcaaaagacagaggcaggtgcttccactgaatttctcctggttgcattccaaagtagctcatgcattcccgccgaacctttcatcctcgccttcccattcctctcccttctttactctgagccccgacatctcttcccttctccgcctctccctgcggaagcgcctggtagagatatctatatttacacgcagaggagggttgcagccgctaccgctagtgcctccgctgttatttagtggtgccctaaataactacagctttccstctgggttaattgtagctccctatttttagtcattttatcctatttagatatgagaaaagcagacatcctcaaattaaagagttatgtaagtttgggcagcggaggctggtaggtttctgcagtatcttcttgtcttcctttagagaacaatttatcaatgagaatcttcctgtttgtgagggagattaggaacatagaaccctgcgttcggcttgatgccttgcaaagcagccccactctgtggcaggctgtgtgcagagatctgagggaagggaaagaaagcaaacaggagrtcaggggggactgcaaccacctccgtgagcttgagtcaagtccaagtttctgacatgtgatattcttcaaagacacttgacctctgcttttcggatgttgacaattaacagagttttgtctaaacaagttggtatggcattagaaaccaaaaagattacacacagaaaaaaagtatagttacaaagtggagcgtaaaataaaacaaatggtctgggctttgtatccgttgcattagataaggtggtttgaattagaggcatgtatatgagaaagagtggtttgtaaattctaactgtaagtaagaaactctatggacagaaatcaagttacattttggcatgtcaatgagaaacactggccaggtggtaacactagttggcaggaaaagggacctgtgtggtggccccacactcagttctcaatcagartaggatttttgtttgtttttctttttctaaaataatttattttttattataaattataggctgggcgtggtggcttacgcctgtaatcccagcatttgggatgccgaggcaggcggatcacaaggtcaggagatcgagaccatcctggctaacacggtgaaaccttgtctctactaaaaatacaaaacattagccaggcttggtggtgggcgcgtgtagtcccagctactcgggaggctgaggcaggagaatggtgtgaacccgggaggcggagcttgcagtgagccgagatcgcgccactgcactccagcctgggcaacagagcaaaactccgtctcaaagaaaaaaaaaaaaaagaaaaaaattataaattgacagtttataattgtataatttgtggggcacaaagtgatgttatgatttatgaatatagcataaaagaattaattaagtttaatcaagttagctaacatatccatcacctcaaatatttactctctcagcagctgtgaaatgtacaatactctgttattaactatacctaccatgctgtgcagtagaacagaaaaattgctcctctgtcattgagatttgtaccctttgacatcatctttttttaattcctaaattagtttctttccttaatatccaaaaggcagcccccaaaaggaatagaggcgtgcgtagtcacaggcactggtagagagaaataaggttcttggtttggtgtttcccttcattttcttttcctgcctctccatttcttcttcatctttctcccctccctcggctccgtgtctgctgtggtctgacttcctcgaaagccttgtatacctcaccctccacgctgtgtctctgcaccctcccgcgttctctccacgaggcccatttgttatgtctccaatctacttcccaacttcttagcctcgctccctctgtcttcctccttctgtctgtgtccccctcatcctggtggcttaatggctttcctygggcatcagatctttggtttgagtcctctccatgctgatggtctccaggccatgttggaggtggttgtaatctttaggtgataatctttaggtgatagttattgccaaaccatggtacgtggtaagtgctttgagtggatttagcaatgtccaggggctcactgcaggaccaaacaatcctatatgttggttataaagaaattcaatgaaaggagattgatattttgttgctgttgttacccatggccttagccaagggctcacaggacagtgggaagaacatgggcttccgtctgatctctgcagcagtgtgccaaagttgccctcgcttagtaagggttcctttctcctctgatgcttttctgtgtcttggcatctctactcaatccctccaaccaaggaagggaaagctaactttaaaaaacaatttttggccgagcagagtggctcatgcctgtaatcccaggactatgggaggctgaggtcggcrgatcacttgagttcaggagttcaagaccagcctggtccaacatggtgaaatcccatctctactaacaatacaaaaattagccaggtgtggtggtttgttcctgtaatcccagctacctgggagcctaagacagctgaatcgcttgaacccaggaagtagaagttgcagtgagccaagattgcaccactgtactccaccctgggcaaaagagtgaggctctgtctcaaaaacaaaataattaaattaaattaaaaacaattttcttctttggtcaaaaagatgcctccctaagtcctgagcctttttttctttttctcctcttttagagatgaggtctcactttgttacccaggctgcagtgcagtggtgcaatcacggctcactgcagcctcgacctcctgggctcaagcaattctcccacctcagccacccaagttgctgggactacaggcacccaccaccacacctggctaattttttcaaaacatcttttgtagagatggggtctcactatgttacccaggctgatctcaaactcctggcctcaagcagtcctcccacctcatcctcctaaagttctgagattacaggcctgagccaccacacccaggctcagagcctaatctttgaaggcagagtgactttgtcttcaaactactcctccgggacctattagtcaatcacttactgagtgcaagtcacttttctaagcactttacatgtgttatttcatttctttctccccacaacctttcagggttagagattatgcctgtttcataggtaaggtaacttgagcccagtgagcagaactcgcccagtgtcacacagccagccagtggcaggctcaggatttgaatctacgttgctctaagcctaagccactcccaccttgcccagctggatgcttagtttcctagtgtaggaaactcttattgtctgtttccttcccttggtctctacaattggcccatttctcattctctccttaatcaagagcatatagatactgctaacttccttaccaaggaattgtgtgtgtgcgcatgtgtgtgtgtgtctatgtgtgtgtgtgtgtgtgtgtgtgtgtttctgtcttatgtgcattttacccacatatcttacttcagacctcagggcagtctgcttccttctctctatactgattaatttgaagaaaattttagctacaaaaaattggttctcccacattgttgtaatttccatccctaacaaacctttagtgaattctccctgtttaaatgtagaaagactgtgtcttccggggatgatgcagaatccacttagggtgcacagctgccgtagagcgaagcctggggctccatgaagctggggaggaagggggttggtggatcttagtaggccagagatgaaaaagaggtgaaatgtctgcagcctatttctgattatcttcaaactgataactcataaaagaatcccatttttgttgctgtaatatcagtcacaagttccttgttttaattaaagtttcatgattaatgtcaaatccctggtttcatgccggcattttccaacagtcttgtctctgggtagattaatttatgacttaagtgaagataatcagtgctttaggcaaataaactattccatcacatctaaggattcttgcctgggctgactgtacaaatggtgcagtcttccgttaaaagagacagacatgctatggaatgctcatccagtcatcgtcatagccagaggtgatgctggacattacggtcattttctttactgaaaatgttcccaactacattttaggccatatggaaaatgggtgcatttcactccaaaccatattgatgcaattgtgaatgttcaaaaatgcaaattgcatcattcctgcgggagatgcagtggcttcccagaccttcttttccttccgtgaaaatctttgtgaacattcagctgtgttgtgtgtgttgatggagagggttgagcaatacatactgtcgccaaatgattttcttattgataaatggagcaatatactttgttttattactcaattgtctctccccctcttccattttcaaggcaaawaaattagggcatgtcttcctttctggcacagaattgttttatttcatcatagccaatcttattgtaaattcataaaaccatctagagacttgatagtaaattaaagatgtttcaaaacaataatgtttcctggaaatcatgcccaactctgttgcagaagtgggaagaatttgaaatttccatgtgactctgatttacttgcctatcctggggtgacagaaagcaagttaagtaggtcaccctggcctttggtgaaggtaaatrtataagaaaatagtgcttactttacagacttccggactcyccgtccaatctggatgagcaggtatcccggagagtgtaagttgctgacatacacaacttgaaagccagagctttaagggactgcctgttgcattttttatcataaaggagtctagacttaaatctttcataaccgaactcatactgtaatccattacatgtacttcatattagctagcgcttctggcattatggtggcagctgtgtaaaatatttgttgtgcttgtttagaattgaattgtaatgttctaaagcgagcaattattcctaccatggaagctgccaaacctctaatacttctatactttgccagtgtgtctaaattgcaggagatattggtaccctaagcagaacagacacaaccttctcagacacaggaggatgaccctgtttctaaatagctgcacagtctagttctctctcctgtttactcgttgttagtttagttgtctaagactatgcgcttgctgaggacagtcatttttgaattctccagcccctatcgcagtgtctggcatgtgatgagagaacaggaatatttgttgaaaagtkaaaatgcatattccatcccatcctgccccctttcctccctctccctccttcttcctaccctcacactaacctttgggttttgctttctaggcaaagcaggaaaaatgccagctcggtctcccaggactcttgggagcagaactactcccctggggaaggcttccagagtgccaaagagaaccccaggtactccagctaccaaggctccaggaacggctacctgggaggacatggcttcaacgccagggtcatgctggaaactcaggagctccttcgccaggaacagaggcggaaggagcagcagatgaagaagcagcctccttccgaggggcccagcaactatgactcgtataagaaagtccaggaccccagttacgcccctcccaaggggcccttccggcaagatgtgcccccctccccttctcaggttgcgaggctgaacagacttcagactcctgagaaagggaggcccttctattcctgagcaygcaaataacggatgcttcatgtcrcgcaataaaagacattttcctatgaagacttgtattttgggagtttttttaaaacctcgatggtactatggagtatttctgttgttggtatcagtgcctttaagcggtgtaggcaaagaaatggaaggccttaatgtctttgccactatgtctcaagtgtctgtttcatggaaggatttcccaccctgtgacaatcatctgtttgaggtgttcatatgctctgcgcctctccacagtaccaggaatctcggccctactcatgagttgtccgcggcttggttgtaacatccctgcaccacttgcagtgacaaattcacctgaagtggaggatgacgtgcggccctgtttctccctctaagttctcttagctatgggatgacatcttagtctctggtggaggaaaagtgggcgacatacaccaaaaattggggctttctggtacttcacagcacagccatttgtcgtactttgtcatcactgtggttttctctttcctttctcagctctttgtgacrggagagtcggtcatcctattacagaagctaagccatagtccaacattgtttggtcaccatgggggtccttttgtaactgccttatgactcaacattaccaataaagtgatgatcctggtctgcgtttatacatacgcttgttcggtcctgttcctgacacgtgggttgagtcaccacagctctgtgtggggaacgtgggagacaggagtggctcctgccgggggaagctgggcctgccattggccctgtgtctatcatgaggggagagctaagaaagaaattctcctaggaagagctcatggcccagtacatcctagtaattattttaattagtttttgttctgacagcttgtcaggaagggcacagaatgggacagagataaaccagacagtcattttgatctgctctctacggtttttcaagtcagaggcaattgatgcttgtctaatgcatccacacactgcatgtctgactggcgatgccrcgctcctaagtagttctgccatgaaacataaaagacaaaggaaaagccgttacacatcacacagagaacattttcgggtcccacagcggtggtggcaggaagctcactctcgcgtcagtattagagtgtgtgtgtgggtctcggggatctcggtggctcccatcttccttcattgttctgaacatcctgtattgtaaaccatggctggggtgctaaagtgcctgtgaatcccgatgtggaaaaagctggaggtgaaagctcagcataccatgtatttactttaaaaacagaaaaaaagacatgtatggatatgtctattttttttttattggcacattgtatttttgtgttgacttgtttttagaaatgatgtgtccacacacgtacccgtgtctcttctgcatttctgtgtcatggttctgtttcttaatcacgtgcggcggtgtctaagtggtgttaccagtgtacgcgcagtgaccttggatgacagtggctctttctcacagcctcccctgagctgtgagaaacagctttctctgtacatatgcractcctaataaaaggcatatttcttcctgttcttttggtgtctctggtgttcctgggcagccttgcctagctgggcttttttaaaaggtctattaacagatgtgattttttttttttttttatatttagagaaagttggaagtttcctcacatctgaggaaagtttgcaggaaagggggcaggagaaccctggggcccactcttggatgaggatggagaggggggactcacctgtcccttggaaaagatggtccccattatgacatcattctcactcttagtccattaagacaatatacagtcttacagttggaagtctcaaagtgggaagtttgcaaacacaggaactggtggttgattgcgtatttgagcacctgaggagagaggggaaggggagagacaagaaccttcatgagtccactgcaaggcccaggctgcctgaagaagcctgaggagttctgaattgaaggagccagtacagctcgaactaaatgaatgaaaaattatgcagaaagcgacatgatagtcccatgactgccctttggacccttggaatcatcctagcaagccagatgttttgattgagtcctggccttgagtcctgtgagcccagagaaaggtccagattcgagtccacttccagtacaaacctggttcttatttcccaaattacaaagtaaggctttgctatttctttaagagggacgcccacaaatatgcatgcggcattttgaaggcataaagggtgctatgtccctaggtatgtctagtgcacaaatataggagatttggtccccacacaaatggcagactttgcgaggacctgtcaaaaatgccctcttatggagcacctagcatcagtgggttgtcatagcaacgctcatcctgtcactacatccaaattctatcacctcgagattaggaatgaggggtgcatggcaagccgaggcaataccacctccttggttctttcaagcatgccaggtgtgggaagtgaaaagggaagatggacaggtttgttcattttctccctgagcaggaggcccattgctaatgccaaaacacatggcttatttgtctcaactgacagcggacagcagagtaggagaggcaataatcacatgttgtggggacccaagtcacaaagggacctgtgggttgaaactgacagtttgagcggcactgggaagagaagtaggaatggtccacagagaagtcaaaataggctccatgaagcaaccttgactcagcggaccagcctcctggcttcaggaccttttgctaagacacaagggtatcccctgggagggcgtgtcccaaggcggagccggcccgggtgctgtcaagatgggcactggaatctgcccagcaaaaattgcatgaaaggggagccagggagaccctggagcccactctcagatgaggatggaggtaggggaactcacctgtcctttgggaaagatggtctccactatggcatcatttctaagtccattaagacagtatatagtcatttgtattagaaattataaaaataatactgcatagcatatctatattatatgtaattgaagcactgccatccaccttctctttctgtggtcagaccgacggcagctcaaaggtcaaagtattagggttcaatcacttggcggttcatggtccaatgaccacagctaaggaggagttcaccaagggtttcattattggcaacgcgtgaggaggatgccagggatagttcccaaaagcagtacctccctgaacgaggtgaaaacagcttttatcgggctggtgagctgagctgagtcatcatatgtcaagcttgtccaatctgcagcccaagggccacatgtggcctgggatggctttgaatgtggcccaacaaaaattcgtaaaccttcttaaaatgttatgagatttttgtttgcgatttaaaaaaatttttttttagctcatcagctatcgttagtgtattttatgtgtggcccaagacaattcttcttccaacgtggcccagggaagccaaaagattggccacccctgtgaggtggagtaaggctggtgcagggacagtcattgatcatgcttctacatccttcgcatgggtagaaaatggcaaataagttcctccctgggcggagtgtttagtgcagtaaggagaagagttcaccaaagttccctccaactaggcacctctggatccaactagtttttattttgctgggtctgggctgcttcctggaatttttgtgaaacaaggagaactcagggtgcaacagttaccagtgggcacttttccacaggctgccagaaaacccggggaccctgggttacaaaagcaccccacaattgacagggctgtcccagaacaggcggagagcaggaccccaacttctctgggtttctgccaatgaagtccagtagatccaatgagagagggtaaacccagtgaattttctgtttcatggagtttgaaaaggggtggaaaataagcaaaccactttgtcaggaatcttctttgtgatcgttggccacaataagtatcacagcgaggagacagccggtgggagaccaggcatcccggtggcttctctgtccacgccattgcccttgtttcacccacatatggcagtcgtcaagaatgctgccctgctccagtattttttattagaaagtgcacaaatttgtactttcgaatgtagttttgcatatgtcgttctatatttggttattttaatggtttcttatttcatacgatgagtccttaaagctcaggtgtttctgaaaccaatctaggatgaggcaggtagttcttattttctggctttgtttgctagtcatggaagagtaagtcatgaggttcaactacccgcctccaggtacgttccattagaaacgtcctccttccaatagcacagtgtaccatacatttaaatgtctagttaacagtcagcttttttcttctggggtggggaggagggaacaaagattacttggataatgacatgtcaggtaaggagataatcttttcttcagagacaggatatcatcttaataaggcagctaataagaacgttcacaggtcagaaagtgagagtgacggagatgctttaatggaaaaccaccttcagctctgagtaatgattagatcacaaaagctggtggaataaaattgactttttaaaaatgtgtcagggataagggttgtaattctgaacataagctttaaagaattttttttaaacaagaaacggatattctgctttggtgcttatgggggaaaggaaagattctcattgcaacccacatagaaggatttttttccccttgagacagagtcttgcttccttgcccaggctggagtgcagtggtgcaatctcagctcactgcaacctcagcctcttaggttcaagtgattctcctgcctcagcctcccaagtagcttggattatgtgtgcaccaccacgcctggctgatttttgtatttttagtaaagacggggtttcaccacgttggccaggatggtctcaaactcctgacttcaggcaatccccctgcctcagcctcccaaagtgccgagattacaggggtgagccaccacacccagctagatgggttcttgtctccagaatttagcatcttctccgccagcacgcatccttctcctctcctagactttcatattccattcagcaaagtaaaagcctatggatgtcctctgtccgtaaatttcgttgccttcagttaagccccatcataagccccatcacagggaatttcactttcacacttgatcttagccaaaaaaggctaagacgcgatagggaatttcacctttaaagaattccattatggatcccctaagatcgagaatccttttctgaagaagataaccgctttttctcatatttttttcccctttctgagctccgatttaaatcatcagtttttatttcctgatttgtgtgttttttaagcacattgtatctgcgctggcctgccccactccggatgggtctgtttaacactggtcatgggagtagagggcaggaggcaaggaattgagtcctcccactgtgaagctggacaattcctcatctttcctgcttagcacttacttgctcacaggatcaattaaatgtgtgaaaacaccttttttctgaattgcacggtgaactgctgagtcacctcacaccgttgctggcttagaaaagccatttcgagtttgttcctagatgctgtggatgcctctcaatgatctgatcctgcagggtgtcagcagcctcagcggattgtctgtgggaggaaggggcgtgagcaggggcccttcttcgctccctggaggcagtctccccgcttgcaagaaggttccttctgaaaccgaggtttggcttccatgagggattttatgatgcaaatattttaagtacaactttgaaggttttgccattaaaaacagcttcgcatggctctgggcccagctgactgcaaactatgaggggggaaagtgccatagattgctggcactctatggcaggaaatagaggaaggaaaacaacacaaatttctaaaccaatcatgacccgggctaatgatctggtttcagggttcagttcatatctgacttgcatttacccggctcgagttgtcagcagcaacgtatccattgcagttgtttatgatgggattaaatgggtaaaaacgttggctgacaaccctgagatgggtcagattagggctcgccaaagaacgtggggtgttttggaatatagcaaacctttgaactcataaagcctcaaagtgaatttgctgtgcacatgccctgacttggagctccatttccaaacttgctttaattttatctgcttggcttgacttctatccaggcccaaggggcccccattccggtcccagcaaccaaagcattcccgcaaaatatgaacccgcaaagtccacaagctgctcctggcttcttactttttttgattgatttatttgtgtagcactttacaatttgcaaaacgttcccatcttttcttcttgagtccccaaaccctgagaagcagggtagagaaatgatagttcaattttacacatgaggacactgagaaaccaagaatttgagacttgccaggtgatgagtggctcaatcagaacccaaaactcattgtcccaactgtgacccctacttgtgatacaaaggttttatcaaataaaaagattttactttaggcaattttaaatgccttacttgatggtcattgtacatttcgttgatgggaaaaaaagtacaacataatgtataaacaattgcaaaattagtaatcctttgaaaattaattttatgggtacaatgaaaagttcaaacctttaatcccagcactttgggaggccaagcgggaggccaagaatttgagaccagcctgggcaacatagcaagatccccatctctacaaaaagtaaaaaagcattagccaggcatggcagcatgcacctataggcctagctacttgggaagatgagatgggaggtttggttgagccctggagttcaaggctgcagtgagctatgatcacaccattgcactccagcctgggcaacagagcaagaccatgtctttaaacaaacttttttttttttaatttaaagctgggcacggtggttcacacctgtaatcccagcactttgggaggccgaggcaggtggatcacttgaggttaggagtttgaaaccagcctggttaacaagatgaaaccccatctctactaaaaacaacaacaacaacaacaacaacaaacaaattagctgggtgtggtggcacatgcctgtaatcccacctactagggaggctgaggcaagagaatcgcctgaacccaggaggtggaggttgcagtgagccaagatcacgcccctgcattccagcctgtgcaacagaacgagactctgtctaaaaaatttttttaatttaaaatatttatgaatcataatactatttatattataaaattacata

SEQ ID NO: 6818 - DNA, 83784 bp, Homo sapiens
acttctttcttttttttgaaatggagtttcgctcttgttgcttaggctggagtgcaatggcgtgatcttggctcactaaacctctgcctcccgggttcaagcaattctcctgcctcagcctcccaagtagctgggatgacaggcacctgcgaccacgcccagctaatttatttcatttttagtagagacggggtttcactatgttggccaggctggtctccaactcctgacctcaggcaatccacccgcctcagcctcccaaagtgctgggattacaggcgtgagccaccacacccggccccttgtgcagatttctgaagctcttccctgcatagcaccctcctaatatattgccctccaaattctagtctcttggcctcctcaaactttgatttttgtctcttcaatgcaataacacctttgggttcttttggggttccacctccctgtgccacagcctagaaactgattccaggcagaacgctattgtaatcattgggctcactgcatatgcttcctttcttcttgaaatcatagtccagtgctgcctgttttcccatgtttgaaatcattccatatattttgtccagtgtcttatttgcttattgtaaaaaggtaagtctggatcctgttactctctcatggccagtaatggaggtttgccattttaatcataataaattttatttatttactgcatttaacaaacatttatggaatatctaccgtgaagagcccagaaacagggaaaaatgattcagactaatgcttatacaattaaaaagttacaatattgtggtagcttttaagtatgaccccaaaattctttgacactctttccaccaagaggtaaattttatttcctcttcccttaagtgtagatgctgtgactgcctgtccaaaagaacatgactgaaatgatgctgtgcttatttcctagcccaggtcttaagaaactggcagtttcccggctcttgcaatactcagttgtatgcccatccaacacactgagaggaaccaagcagatacataggagctcccatgtagttgttctggttggtaaccccaatgactcagtcaactgctaggaccaactgccagacatataactgagcaaactttgaaatgactgtagccctggctgtagtgattccagcctctgagctaccaccgctgagactgtgtggtcctggctaagttctaaccaaatttctgtttgtaagcagaagaaatgattgttgttgccctaagatgctaaatttgcaatttgcagtgcttaattttttttttttttttttttgagatggagtttcgctcttgttgcccaggctggagggcaatggtgtgatctcggctcactgcaacctccacctcccgtgttcaagcgattctcctgcctcagcctcctgagtagctgagattacaggtatgcgccaccatgcccagctaattttgtatttttagtagagacagggtttctccatgttggtcaggctggttttgaactcccgacctcaggtgatctgcccccctcggcctcccaaagtgctgggattacagacgtgagacaccgtgctcaggtataatagacacctgtaacacataccataccattaagtgctatataatagaggtagtcaattaacaaatggattaacaaatatttattatgtgcctattactagtcaggtactgagtcaggaaaggcttttaagaagcaaaatctaagcggaagtttagaggagatctaggacctaaatagagtaagagcaggaaaagcagaaagagttgcttgtttgaagatacaaaaagcatgggggcgaatgctagtagttcagaaaggctaacgtagagggtaggagaaaaaaaactgcgaagagatgagttactgagaggtcagttcattaaggaggtaatgctaaagaaggggggtttaatcctgaaggtaaggctactctgcacacttgtaatcatacaattaatttaattttttatttaatgactatcttccccaaaggctgtactccaaaaaggctaaatctcacagagcttttatccctataattccagcatctaaaatgttacctggcacacgtgggagttaatacatatttgctgaatgactgagtaactgaagaaaccctataagaattttaaggaaatgatatataatcagatttgtgtattagaaaaatcattctggcggtaagacagagaatggtttagaggtaatagctgtattagctagcttaggctgccataacaaaataccagagtgagtgacttatacaacagaaattaattttcttgccgttctaaaggttggaagtctgagatcagggtaccagcatggttgggttctggcgagggctctcttactggcctgcagacagctgccttctcgccacatccccacatggcagagagagggagagacagcaagcaatccagtgtccttcttataagggcactaatcccattagcaaggccgcagcctcatgacctcatctaactctaattatctcccaaagattctgtctccaaataccatcacattgggcataagggcttcaatatttgtatttttgaggatacaattcagtccacagctgtaggaaaggagaaaagacagcaggaggtgaatgtagtaacttgcctaagagatgagggtataaactaaagtagtgacaatgcagaggaagaggaaagactgagaaatagtaatcattcctacttgggctggaattattaaactgttaaaaaccttcctaggatattctttttcctgaatttgaaaattatagactttttcgtgtagtaactctatttgcacaccagttttttgttttttgttttgtttttttgtttgttttttttgttttttgagacagagtctctctctgtcgcccaggctggagtgaagtggcccgatctcggctcactgcaacctccataccccaggttcaagcgattctcctgcctcatcctcctgagtagctgggattacagctgcccaccaccacgcccagctaagtttttgtatttttggtagagaccgagtttcgccatgttggccaggctggtctcaaactcctgacctcagatgatccacctgcctcagcctcccaaagtgctaggattacaggcatgagccaccacacttggccagtatttttgtttttaatgtagatgaattttcaaaatcaaactgagaataaagggatataacatttaacaaacaaccacagaatttattaaacatacaacattacagaaacattttaatatgccattgatatgtagtcttcaaaacgttttaaaaactgtggtaatactaaaagtgaaactcatagaatttcagtattttaaagggataataagggacgttaaccacaaaatacaaagcatttcactttttatgtttgtcttttaagttaaatattaaaaattttatatttaaaaaatgtttattatttatacagcacattaatcatcgagacccccctgcccccacagctaaagtcattctaggtcagaatgcacggatactgctctcaatactagtatgtattactcccagtgcacacatattgataatcaaggcttgaacagtttgtgccctggcttattgctggcaacagagtaattcagtccggagtacagaacatgtacaaatgcattttcatcaatatctggctctgatacacccagtctgagccaccaatatctggctcaggcacttatgataatggcccaagacactgctcaggatcttaaggtaaacaagttgtcacctaattctgtcagcccagcaatcaaagcacatttttgagagggaatgttctgacttccgtatcagtcgtgatatttccgaataattctatacttgtcataatgaaacacaagcacgcttttggtattggcccttcaaaacattaagaaactggtggtaccaacataccatttttgacattgttgtattttaacattttttctgcttttgaaaggaatacacgctcatcattaaaatattttgaataataaaatgcacaaagaacaaaaacattgtctagaatcttgccactcagagacaatcatgtcataatattctcatgtatttcctttcagatttttaaaattgtgggcatttgtaattttataaggtttgtaacttccttctgaaaacttgtgtattcagatgtctatgtaaatatgaatctgtattatgcaccttaaatggctgtgtagttttcacatcttatgtactatgatttaattgaccagtgtaaattacagtgatcagttacacttatttagtgcttactctatgccaggcactgtaataagcgttttgcttgtactaattcatttgatcctcacaaccctattattcctgtttcttacacatgaggaaactgagacaccaagaggtgaagcaatttgtccaatcactcaatgtgggacatttaatggctggcaatgctttgatcctttagacaatgttgccatgtatacctttgttcatgttttaaaagaatgtctttaggattaatttgccgaaatggaattgctgggtcctaaggttttaaaaatttttttacatgcttccaaatatttcccttaggaagattatacagtatttacacttcatccaacagtatgtgagtgtctgactcctcacatccctgattctttgcaatttttttctttttttgagacggagtttcgctcccgggttcaaacgattcccagcctcagcctcccgaatagctgggattacaagcgcgcaccaccacgcccggctaattttttgtacttttagtagagacggggtttcaccatggccaggctggtcttgaactcctgacctcaggtgatctgccggcctcggcctcccagagtgctgggattacaggcgtgagccaccgcgcccggccgattctttgtaatttttacctaaatgacaaaacattatctaactgctactttaatttgcacatttcacttttagaggtgggacttcatttttaatgaatttttaagcactctttgattactatgtattaatcctgtgttgacatgtcaatattagtttccacgctacatttggagatgccgtaatttgcgggataatttccatttacgtacaagatgtgcttactaagtttgttccaagtgggacgcaacatctctagtagatgctccttaaaacttctccatcacacagagaataatttttattggttaactaaacttataagtaaaataaataaaccaacattttgggttgctaggaatcactcactgatcaacttttagctccagtttttttctgttttcttttttttgctcagtctagggaggctatcttgggctgtgaaagacatgtcaccaaccatcacagctgctgagtgattgcacggttagtcagtaggtgccaacgccctgctagaagagctgtctgcagattccaaagccgggcgttcagggactcccgggaaggagccagcgttacctcagcctctccgagggacacgcgcgccctgaacactcccctcttgggattcaggccaattcgttcagctcccatgacttcatccgagcaagtttgtcacctcacgcagctaattaaactgtttacctagaagatgatccaaaggaatttccatttccttccagagggaatacaaggttatgataaccgagagagcgagaggaaaaaaggcgcacagctcgacccgaactcaacctgctttctttctcctggctctcccagtcactcctggggttgttagtaggcttcagcacgcctgaaggaccccgtcctacggagactcctagccaagggaaaagcagaaaacacaagaactaattccactcttatgtgtgactaattaaaagaggagtcaggcagaggggactccctgttcagcctttaccgatggggcaggctcggggcagctttgagacaggcagcgccaaggtcgcccagattcccgacaagctccgcgcgggggcttcctcggctccttgctgttgccgccgccgcagctgctgccgcggttggtgrggttgggtgagaggaggagctgtcgcggaccctgtagagtcgrtctctgttgctctttttgcctgaggagtcttccatcctacgtcgagctctgactcccgtgctgtcgagagggagtccccggggacacctcggcacgcagcggagatgcctctttttgccaccaatcccttcgatcaggatgttggtaagtgtttttscctctccctgcccattcctcaccggactgcacgctcactctgccagcccctgcctgcattcaggaccctcgggccagggccaaggaagagctcgctcttcccctttcctgaggctccctccttcagagctgggaggaggttgagggcttggcgcatcctctttgaaagaaatgggactcatcctgtgaaatgggccttgagctaggactgtaggttgccaaagaactgctgaatgggttggtgtaaagggcctgggaggagcagctggtgtagcatctggtgcagggactgtgcttctggaagaacagcgaagggcttaaggcgtatgttggctagattaggattgtaaaccctgtaccaaaagtgcttgcctagacaaataaatgttgagcgtctggaactggcagaatgttttaggtaaggttccttagaggattttaaaatcttttgtaacggtaactgaaggagggagctctggttaagggtagactctcaaacatgttaggagcgatgaagatgaaatacttggcaacgactgaaaccgaattgaggacctgagcctttgggatgtctctcttaggctaggtctctgcactttaaaaggtgtaaagaagtgtggaagaagttgttgaatctggaaagagtttgaaatgctacatttttgttgttttctgaatcactggtattaggtactgatgatgtcaattcaataggtttgcttttggtttttaattttattttattttatttttttctgacttgaagataataattatgggaatttgagtttccggggagagaattttggtttaatttgaacgcacgtaggaactaccttggcacacaagtgtggaatgaaagcaagccaaataccatttccaaatcccttatggcagaatgtaatcattactgtgaataaggacaaccttatgaatttacttgtctttgtgtattttaattatgaaaggtggatgttgaatttttctttttaaactcttccttagagcatgtcactgaaacttggaagtttatataagagtagaaaaaagttcactccttacctctgccacttctcagctcacggtgaaatcataggcaagttaaattctttgagttccagtgttcttgtctttaaagaggggaaaacacatcattccattcygcagttaaataatatgtctagagggcctgctacagtacctttatgtggttggcacttactagatgctaccttttttgttccaccttaaatgagtgtcctgaatcttagcagtggacagaaccttggagatcaccgattatacttaatgaattggaaaattgcatttaatttaataagcagttagcacacactacaggacacagcagctcagtgacataagagatacagtgatgagcaaggcctagttgctgttctcaagcagttttacatctcactacatgaatctctaggggaaatacttaaaacagcttcttaatacttgcttcttctgtttacagcacctttgtctagttttcttggtcctgtataatttagctagcaactacccaatcacctttatattctactgactttgtgaacacatatttgcattggattcaggtaaatttcttaatgtcaaacccgttcctagtagctgtaccacccagttcaaacacaggcaccttcttgcctttatgcttttgtcctacgcttatgctttcttttatctttcaacatatccttgtgtgttaaggccaactcagaatccaacttgttacacctgagtcatttcctgattactgtagcaaagggtttctcagtagcaacgttattgacggtttgggccaggtaaatatctttgtcataggagtttgtcctgtgcaatgtagggtgttcagccttatccctggcctttatccactagatgccggtgacacccagcccccactcatgattttagaagtctcaggacattgctaaatgccccctggaaggacaaaatacctcccagttgagaaccgctgcactagtccactctaatttccaccttcttacaaaatcctctaacttattttagcatttttgcctttaccgaattatttagcattcaagatagttttatactccttaatgagwggttgctacataggaggtgtttaataatgtttgttgagttgagaatgtgtcagttgagcctgccagacattatacttcttcagtgtagcaacattgttttgctccagaaaagcttactttttaaagttgctcaggttttggtattggaccaattctcttctcacaatccttgtattgaaatattacaaaaggtttatctaagaagacccctcagagattcccagtacataagccttgcacagagtccagtagactcatattattttttaatagtataacatatagaatacagtgtatagaatacacttaacaattttttctttcaccatatctaccaatgaatatgtcataacattaaagtaactcatttgatacagttatttatcacttaacactcgtatacatttgcacatcttcaaaattaattgtcttcagtcttaatctgaggctgaatcagaaattcactgactgatttatataatataacattttttataaagagacacaatgctggtgatagcttttcccttggaagaaacaccgaaagatgttactagaatgtgagctctgtgaggacagggatttttgtttgattttttcactgccgtatccctagctgtagaccagtttttggcatgctgaagaactttcagtaaacatttatggaataaatgaatctcattttggacattataattcaagagctgaatttagaagaaacgtaaagataacttatttcatcaagtttgtatttcaaagtctctagtgacttccaccttgccaaatccaatggtcactttctagtccatttcttttttgatctcttaagcattcctctttgatatacagtattttattcatgggatttcaggacaccraactttttctcattttctacttagctccttttaaatttttttgcttcccctttttgcaacttctaaaagttgagtgccctgcggctcagttccggagcctcttctctccttccacttttttttttcccttagagtattaggaagcaatttagcttagtgttaagaattcagactggggccacactgctkggattcagtcccaggtttgctgcttaccggtagtgtgatttttggcctagttgcttagataatctgtgtctcagtttccttatctttaatatggaatataagagtaataatagttcttacctcagagagttgttaagagggttgagttaatatttgtaaagcacttagaaaaatttctgtactttttattaagtaagattttaaaaagaacctcatctaatttcttagctttaaatacctagcgtattctggtgactcctggatttatgttcttactctcagcctcttgcctgagctctcgacctagatatccatctccttactgagcatctccatttggattctgcttagagtctaaaaacaaacattcaaaaactcaattcttagttctttgcccaaacctgctcattccttcatccttgcccttctcagtagacgacaacatgattactgtttcctgtcactgagctccaatgtctaggagtatcactgattcttcttatttcttcacacttcacattcatcctatcagcaagatattttggctgtactttaaaaatatatccagaatttcattgacaggtgaaactagctggacttcctgggtcaagtggggacttggagaacttttcggtcttacaaggggattgtaaaatgcaccgatcagtgctctgtaaaaacgcaccaatcagtgctctgtagctagctggaggtttgtaaaatgcaccaatcagtgctctgtagctagctagaggtttgtaaaatggaccaattagcactctgtaaaatgaaccaatcagcaggacatgggcggggacaaataagagaataaaagctgggcaccctarccagcagcagcaaccggctcgggtccccttccatgytgtggaagctttgttctttcactctgcacaataaatcttggtgctgctcactctttgggtccgtgctacctttaagagctgtaacactcaccacaaaggtccgtggcttcattcttgacgtcagcgagaccacaaacccaccagagggaacaaactccggacacatcatcacctttttctgtctcaccattcttaccttacttcagtcattgttatctctyatagtcagtggcaagagccttctggtaggtttctttgttaccactcttgcctctacaatcagttctcatttacaaaggtcagtgatcttttaaaaatgttagataatgtcagttacctgctcagagttctctggtagcttcctatcctacttaaagggaaatgcaagtttttttattgtggctcacaatatggcttcttcctgtgtgtctgatatgattatgatctccagactcactctcttgaattccaggcttcttaaatctgaacgctccaagctcattcctgcctctgtagctatatggtactctttgcctgggatactcctcacccaggtatttgaaggtctggatattcatcacacccattcaggactctgttcaaacgtcattttctgagacgctttacctaataatcttctgtaaaaaatatccttcttgggctgaatgcagtggctcacgccagtaacccctacactttgggaggctgaggcaggaggattccttgaggccaggaattggagaccagtctgggcaacataatgagaccctgtctctacaaacaataaaaaagttagctggcatggtggtatgcctgtagtcccatttactcgggatgctgaatccagaggattggttgagcctgggaggtcaaggctgcagtgagctatgactgcactcttgcctgggcaagagagtgagaccctgtctttaaaaaaaaaaaaaaaagaattaaaaaaaatgcatctttaccctctcactctgtttctttgttccatttctttttctttatagtacttagtgacctgacattaattgattgattatcttttgtgtggaatataaactccattaagatgagaacttttcattttttttcccctaatactttagggatagtgtctggtacatagaaagcactcaagaattatttatcaaataatgaattattggtrtttttctagaacattagtcttgtatttctatttgctgttcttttttccctccaaaacaaattcatctgtcagaaaactgaagttatctttctaagtctggctcttcattcattatttggtaacatttttgtttgtttttaaatctttttttacattaatatagatggggttttgccatattggccaggctggtcttgaactcctagcctcaagtgatctgcctgcctcagcctcccaaagtgctgggattaccgatgtgaggcacccgggcccagccaatttggtaatattttagtgttgtagttatcttgacttgaaacccaagaggcatctttgaatcatttccctgcctctgctaaatcatcatatgtctttgtttctataatagaatatttgtgttcccagtcagactgctttgggccagtccacatcctacatacttggacatttttttagtctgctttgcttagtccagtcagcctcataaatcataagctagatgaatcttaaatgttaatgtcacattctcctgaagtgtgatatgatagaaagaccttgggctttgggcttaaattgcacctgcagcatttactcttagtaaatggacacaatgtatagttggataggtataggacccctttgaattcactttctactttggtaaatagggatagmaatatccattatacatcatgcggatgctatgaggattacttgtgaaaacacatgacattctgactctttaccagagttgaataggcttcaaatatctcaagttcagcatgttcaaaaccatttgaaatttttcttctcaattatgctttttgtctgttttgatagttggtacctaagtttacttagtcatacaagtcgtgaacttgggagtaattcttgacttctgtagttgtaattttctacattctaaacaacaaatgtatcctgtctaccctgtgccagataccctggtaccgaatatgccctcaaggattccaggtttagatcaccactctctcagattagtacagtagcttccagctgttcttccctgcttccagtttttccctagttattttccagatggctgatggtgatatttttaaaatgtgaatgtacgcgtggcccytccgtttaaaatatttctagagagggctgggcgcggtggctcacgcctataatcccagcactttgggaggccgaggtgggcggattatgaggtcagcagatcgagaccatcctggctaacatggtgaaaccccatctctactaaaaatacaaaaaattagccgggcgtagtggcgggcgcctgtagtcccagctactcrggaggctgaggcaggagaatagcgtgaacctgggaggcggagcttgcggtgagccaagatcacaccactgcattccrgccttggtgacagagcgagagtccgtctcaaaaaaaaaaaaaaaaaaaaaaaaaaagttctgaagaatctaccgctttcacagtactttgaacttttcagcagggcatgtaaggcctcttatatttggcttctttgtgactcttgagcctcaccttccacttttttcttgcaggtgtatttcactccttattggttttatgccactgtgctcttcaggtgtggatcctctggcttgacatacctatttgttcattaatcctcagtaggtttgttttgaggagatgatgcatgtaaagcacttagcatagcacctggcatgtagtaaccaatggatacgttttagctccttttataatcaagttagaaatagatgtggggactattggattctaaggtgtgcaatcagttactgttaaaacataggagagaaatgtgaaaattcagaatacaagtatgttaaccatctgatatccactggattaagaacttgtattctttgattcttctgtccctattttacctctcctctaagctgttttttctaatgcctttaggttatcatttctgttttatgttcctctctgaaatgcttccatgctgttcttttgatacctacttctttttctggttagcagagcttcagattacatttctttgcagatacagtttccaggaggatcagggatattagatgaaagatttttgaagaattgatttgcaaagaggataatttctttcagacttacttttccattggccatttttaatgaactgttacatcttcgggctgactgaatgacagtcctttcctcaccacctaaatgtgatgcgaagtcctcctgtcagcatttcttacctccccagatctttgacagtsataaattttgagaaaaatcaaaagttgctgcttatcagaaaaagttctctaatcttttgaaaagactattgaaattcaaatgaggctctgtgtatgttttttctgggtactgctgggcagatttctcaatctcctctttttgagtattagtgtaaggatattctcaggataaaatgagatcattatgaagctttgaattctttagaagcaagtctgttatttttgtcacttttccttttcccacaaaccctgtttttgtcttagaaaataaatagttttgacttcatttgctattcacagaaccatgttgtaggtagtttatatccttctgattaaaaaaaaaatacttgttcttttataactgagaagaattgtgccactgattttgatgattttgagrcagcctcaataaatgatgtgaacaattttagatttctgaagtgggttgtgtttctgatccatccatacaaatatgaatcagatgctgattctatttatgtgtaggaaagtaataaagtagttcatgagttttcaacataatatctgctgataactgtatcatatgttcctggatgtatcattaatcaagaactgyaagatagcactcaactatgatagtaggcaatttatatttgatcagataaactgttaactttttaataagttttaatatgcttagctattatgtttttraataaggtggcaggttttagaatttaagtgtgttcttttaaaaaatgcacttaaaaaaaaaacaacctgcttggctaccagtcagtgagaatgatgaattaattattaaaatgcactaccagaccaaagtaataacatgctttccttttctaagatgaagtaagtgatattgttcagaatgactcactcaatattcttgggctttagaggggttgagtacctagggagcaggctctgggactcctcaatcagagcacttccacttgggtttgctgtatatattgggtttcttttaagataaaattctcttatagtgttgaatgataaataatttgactagtctttgtttcctaggagacagcctctaaatccttggaattttctgagtgataagagcatctttgttatttttggtgggcccctgggataatagcttagtttatgctaataagatgacttggtctgggggctggccactccagaaggactaaccatgtgattaaaggatttgggctttgagtcataggacctcctgggaaggatagggacctggagattaagttccactgtgtggtcctatttcataaatcatacctatataatgacaccccaattgtagaatccatgaaggtacatttcccagtccatcgaaacctacactgaaaaaccgaatattccgcgataaaaactggaaacaagctatttgtgaaaatgctttgtgatgtgtggattcatctcacagagttaaatgtttgttttggtaaaacaggttgttttgataaaacaggwtaaaaactctgaacactgaagctcagttaagcattctggtaggtgatacacattgtggtgatacacactgatgtatttggagggtgatgaagcttcctagcacagaagctttatgtttggaaccctcccagatctagctccatacaggtggttgtttgtatctgggggtctgcattcatggattcaaacaacagtggatcaaaacttrtagaggaaaaaatatcatgtctgtaccgaacacatagagacatttttcttgtcattatgccctatacagtatagttatttacataacatttacattgaattaggcatgataagtratctagagaaattaaagtatataggaggatgtgcaaaggctttatgcaaattcartgccattttatattagggacttgagcatccatacattttggtatctgtggaagatcctggaaccaatctcccatgtataccaagagacaactgcgtatctctattggctggtcctggtttgtgttttttgtgataaaactctaattgtaagtatagtactttctatgtgagttgctatggtgaattatcaatcctgaagggtagtgggaacttccagtttgtatccagttggtcagaagtgcctggggaccccagagcttgtgtctgaggtttgaagtgaagggagtcttatggagagctgtgtcttcaacctgtgaagtctttgctgactrggtagttagcatcagaagtatgctagccctctgggtagttagcagtgcattgtagagggtttctgcatttgaaagttaagtttgaaaaccattaaaccaggtattattgttattattattrttattattatttttgagacggaggcttgctctgtcacccaggctggagtgcagtggcatgatctcagctcactgcaagctccacctcccaggttcacgccattctcctgcctcagcctcccaggtagctgggactacatgcgcccaccaccaagcctggctaattttttgtatttttagtagagatggggtttcactgtgttagccaggatggtctctatctcctgacctcgtgatccgcccacctcggcctcccaaagtgctgggattacaggcgtgggtcaccgcgcccggctaaaccaggtattatttaaggtcaatgtgttactatgactttttgtggcttcatattgcagatacatgagtagtcttatcatttttttgagcacttagactgagagcatggttattgaaataattccccaaagtaaaccttattattttcaagggatttacaatatattaccaaaacttgagcaatgataggtaaatttgagctagttctcctcttttccctcttccaaactgcttttacatattggtgatagattaatatttttcaaaaaartstaggtcttgttgttttatttccttatttggaactcttgrcattctgatgtttcttgaagcagtgcaaacacctgagatagtattttaggtcttaatgttgttctcttattattccaaattttcacaaagtagtctgtatttcagccagcctagattcttcattatacttcttttctgttttgatgactttactttttactttattcacttaattagaaacagattaattcattattctgtcctcttcttattttctraatacatcgggaagcccttcctgattctcctcttctctctctccaggatctttacctgtctttcaatttgctttgggctttgcattatttgaaaccctttcaatcttaaatctaagtctatctgctggtttcatttcctttcttagattgtaagctacttctggtagggtatggcgtggactagaaggctattccattttgctgaatatgtgttcaaattttataattgcctgcaagtaaatcgctttattgagatcatgaattgtttggatctttgtattaattcttaygcaagkaattaatctgtgtgaataacctgcttttgctatcttctatgttagaagattttagggtagctaggtaggtaccctacctaaccaatacctattggttattatccacttggtctttactagatgcttattttagttgtccrgtggtagtgactaactagcaggtgatgctgtgatatatagcaggtattatacacctgtaaaatatttggtcagagttgactgctttttattttctgcgattaaactcacttgacgtacttctgctctcagtagtaggtcaaaatgaggaaataagtgtactctgttgatctaggcaacagggcatggaggagagtatggaaacaagaatttcattatcacttggtcaagaccaaccattacagataagaatcttggtatgagtcatttccactgtccccccaacccatctgtgtttaaaaaatggagactgctattgaagatcttggtgatgttatctttcagcatatctgctctttgaattgcagtgttccagtcaagactggttaccctctgcttctgtacagctgttgttttgaaatataatgatttttttaaagttttttttcctcctacgtgtgtattctttttctcttaagttgcttttttctttttctttttttggtctttttctttatcttccacattagaaggtagtttcctcacgcctgcaatcccagcactttgggaggccaaggtgggtgagtcaccaggtcaggagattgagaccatcctggctaacacrgtgaaacccgtctctactaaaaatacaaaaaaattagctggacgttgtggcatgtgcctgtagtcccagctactcaggaggctgaggcaggagaattgcttggacctgggaggtggaggttgcagtgagccgagatcgcaccactgcactccagcctgggtgacagagygagactccgtcttaaaaaaaaaaaaaaaaaaaagatagtttcagatagcttgcttgtttgcccatggctaatactggagaaatcaaaagcacattggaagttctgatcatgtggttaggtctcattgacttttaacttcwctgtaggttggtctggtgggccattgactatggaattctgcctctccactcctccccctgcaatattactgtctttaggtctttcctcttgggctgacatagagcccccagaaaagagtcttctgatttcttggagggtaacggtacaaatgttgaatcagccttgcatacctgggatgaatcttaattggtcatggcatatgtaattctttttatacattgttggattcagtttgctgatgtttttgtaatcggtggaaggtatctgagttactggcagtgagtctgtatgggtctgcaccaatctcagttcttgcctcctcagaagaaagaattcatctaaggggcgtaaggcagaaaaagagatgaagcaagtttcagagcaggagtggaagtttattaaaaagctttacagcaggaaagaaaggaaagtgcccttggaagaaatccaagtgggygacttgaagagtaagtgcggtttttaactttgatcccaggactctataggttggcccctttcctgtgattcttcccttagagtgggcggcccacatgcgcagtgccctccttatacttgggaggtgagcatgcacagtgtgtttagaaagttgtatgcatgcccatcggaggctttyttcccttttctggtggagtgccccaggaaggtcgtatactgccattttgtctcttaatgcccctgcctgggctcactcactcagtgcctgagattttattggagcccccttttttgcttctccctggtgcctgcattcawttaacactttaatgtttaacacttgtggactgttaggagcttctctctccttggtgcaagctgccaatttatcacttttagagaggcaatgtgataattgctgaatcacccaacattcctagtgggtgtgggagaaccctctcctgccctgctcgtacctgtcttactacctgtaacattttgttgaggatttttgcatttatgttcatgagagatattggcctatagttttcttgtaatgtttttgtctggttttggtatcagagtaatgctggcctcacagaatgagttaggaagtatctcctctgcttctatatactgcaagagattacacagaattagtataatttcttccttaaatatttggtaaaattcaccagtgaacccatctgggcctgtgctttctgttttagaagattattaattattgattcagttttttaaatagatgtgggccatttagattgtctgtttcttgtatgtatttcagcagattatgtctttcaaggcattggtccatttcatctaggttatcaattttgtgggcatagagttgttcataatattccttcattttctttttaatgtccatggggtttgtagtgatgtcccttctttcatttctgatattagtaattggtgttttctctctcttttttttttttccttagtttagcttggctagcagcatatcggttttattgatcttttaaaataaccagcttttggttgtgctgattttctgtattggtcttatgttcagattcattggtttctgctctaatttttgttgtttgttttcttctgcttgcttagtttggatttaatttgctcttctagtttcctaaggtagaagcttattgattttagatcttgattctttttaaaaatatgtattcaatgctataaatttccctctaaccactgcttttgttgcatcccacaaattttgcgaagttgtattttcacttagttcaaagtattttaaaatttcttttaagttttttttttactcttgtttaaaagtgtgttagtctccatgtactttgggattttccagctatctttctgttattgatttctagtttattccattgtaatcactatgtgatttctattgttttagatttgtcttggtttgttttatgacccagaaggtggtctgtcttggtgaatgctgcatgagagcttgggaagaatgtgtattctgttgtttttggatgaagtagtctataaatgtcaattgtcaattatatacagttgattgatggtgttgttgagttcaactatgtcctttctgattttctgcctacctgacctgtccatttcttctttttttggtcttgctctgtcgcccaggctggagtgcagtggtgcaatcttggttcactgcaacctccacctcccgggtttgagtgatcctcctatctcagcctcctgagtatgttcagctaatttttgtattttttttgtagaggagaggtttcgtcatgttgcccaggctggtcttgaactcctgggctcaaatgatctgcccacttcggcctcccaaagtgttgggattacaggcaaaagccactgtgcctggcctcatcctttaacttttaatctctatgtgtttttatgtctaaaatgagtttcttatagacaacatacagttgtgtgttgttttttgattcactttgacaatttctgccttttaattggtgtagtatgcagaccattgacatgtaaagtgactgttaatatacttgtgttaatagctaccatatttgttactgttttctattcattgcccttgttctttgttcccattttctatttcactctttttttggcttttgtgattttaattaagcagtttgcatgattccattttatctcctttcttagcatagcagttatacttttttaaaatcttttttttttagtaattgcctaagagttttcaagatacattcacaactaatccaagtctgctttcagataacactgtaccacttcatgtgtaatgcaagtaccttataataaatgaaaatattattaattcctccttcccatcccttgcgtcattgctgtcattcattctacttacatggaagcatacataagaatatcagaatatatataaaatcgtaggtaatgaatacattgttgctgttattatttagaataaactattttttgttagagtaagaagaaaaataaaaataaaaataaaagttattatttttatcttcgggtattccatctttattctcttcctcttttttttttttttttttttttaaagagataggatcttgctctgttgcctaactggagtgcagtgtacgatcatagctaacttcagcctcaacctcttgggctcaagtgatcctcccacttcagccttctcggtagctgggaatacaggtgcatgccaccaggcccagctaattatttttttaaagatgaggccttgctctgctgcccagactggtctccaattcccatcctcaagtgatcctcccacctcggcctcccaaaatgctgggattacaggcatgagccatcctgcctagcctctaatgctgtttttttctttatgtagatacaagtttctgacttacataatttttcttctttgttaagaagttctgctaacattgctttcaaggcaggtgtacttgcagtagagtccctcaatttttgttgagaaagtgtttatttcctcttcacttttgaagaataatttcttaggataaacaacaggcagttattttctctgaacacttaaatacgtttttatttaaggaaatacattcagtcaaaacttggttttctttccttcagtcccctctccatattatcaaaaaaaaaatccacaaaactagctaaataattaacttaattacctgaaacatttttataaagatttactagcaagtaaataatcttttgctaatgaaaatagtatttcttattttagtctttctatttgcagatggtggtagacctatatataatttttttataaagaaaaatcaatgccttttattttatactaagtaaagaggcaactgcattgtgaatagggaaaataattgcaagagataatgagcgtacatcttttcaagatggccatgaaaataactagaatgctggcaactattctgatttgttgttaagacttgattatactatagttttgtgatttaaatgtgattatgtatcttttaaagatttgaaaaataatgtttctgcaatcccctttacaatctacagagaaagcaaccagcgagatgaatactgctgaggactggggcctcattttggatatctgtgataaagttggtcagtctcgcactgggtaagtatttagcgtttcaaaggatttttattctttctttttaaaaaacacgaaaggccaggtgcagtggcttgcacctgtaggcccagcccytcggtaggatgaggtgggaggatcgcttgagcccaggagttagaggctgcagtgtgtgatgattacacccatgaacagccaatgtacacgagtcagggcaacatagtgagaccccgtctcttaaaaaagaaggatcaggaggtaaagtatattagcattaaatttagtttaaaaagagaatatttttattaaaaagatttgaagaatcatctcatttagtttatataccttttaaccagttagggtaacatggctggtaaaaagttgatgctttaatcaccctccttcatattttcttctggaatctcattttttccactgattttagagttattagtgatttctcagttaccaagtttcatggttatttatgagttcttttctcctttgtcagatttgcaacattccacctaatgaatcagttaggtggaattgaaaagaaattttttctttctgttgaaagattaggggaatagaatcttaaactttttggcatgtattacagagctttccaaacagtacagtaattggattaattggtgtggatatgggtgatttcttcagctcctgggctaacagcattagcctttagcagtttcatttactgctttatgccacacaaatggtattgtcttatttgtgcactttcatgtgaaaaagattaggaagcactgctgcattacacttgatatttgcagtggtaatatgaagcctttgccagtgtcttctttgcctcttcttccttcacccctaaatatagatgttcctgaaactttccctgattcattttttatttctaagattttttcttttggtctcacaacttccagctgtctttatgtagatggcatctgtatttgcagctcttcttactcaagcactagtcttatggacactgcattatttctggatatcgttctatataagccttcatctcaccatctagaaaccagaactcctgtctctttttgttttaaacctactttctttcagtttttccatttctattaatgacaagatgattctttcattgcactaaaacttgagtcaccttcacatttattactcaattctgtccatctgccttcataatctctcaaaatgttgacgttttaaagtctccttaatcaagtttttgagcatagccaaatggtgcagaggcagttttcttcaggggctgtataccctccactctagctttttttggcccataatgtcctcccactatgacgttcccaaagaatctcccaaatgtggtcccatccatccctttgttgtatttacattttagtatattctgacctggttcattaatttaattgaaaatttttaactactgtgtgttacatatcgcgttcccttttctccatttttatttgtcctactttactttggacgttccttaccttgcctaggctagcgaattaacccactggcattttttttctgtttccatctcttttctaattcttatatccagttgccgtataacagctgtgttcatgttactcccctaccttccatactgagttcagtttaagctccttagtcttctgaatcatgcattttcatttttttccctcctgtataacattcatttcagctcaactatctgagttccagtgctttttttctaccttagtttgatgcttttggtccttttgtttcttgaggatggaatgttttcctctttaatttcccatctctgtgtctcatatcctttcagacccartgtagataccacttcttccacaaagcctttccttatcccctttactgacaatggtatgatcctctgaatcctcaaagcactctatcaaaactattcttatttgtgttttttcctgcattttagtaacttatatctaatgaactgaagtttcttagatataaacctagtagatttgtagaatgaatggtccatgaacttctgttgcacatgggaaagaagcaaatagcttagtggtggagatcatgtactctagagggagawtgcctgggttcaaatcttggctctagccatttagctatgtcatactgggtaagtaacttatctttctgggccttacttttccagtttaccacctaagaataataatagtatcatcttcataggggagttgttgtgactttgagattagctttatcaagtgtttataacagtacctggcacatggctgaatgagtgcaactctgcctgcttttgattgaagtcatattttgtgacagtttctgttgaagactgggyaccaagctagaccacttcatgtgcattttggagataaaagttttatctagcattgcagctgcaaagcccctcctctctctcttcactttgttggtttcctttttatctttacttcggtgtttttcattttgtagacgctttctgtaataattgggtcaattgcttgaagttgtttgtcaaaaggcaaacccccttttacaactataaatattccatgtttttccagttaaaaaatcaatttgtaatgcatctgaaattctgtatgttgtagcacaaagctgtagagatcaatttgtttttcttaatgttaacgttattctcccagaaatgtttattattattttccctattttatttcctttcatatttgaaatttactaatttatagctttaaaaatattttttgtctttttgtttttatccagtatcaataggtttagacacatgctcattttttttagtttttcatatttatttttaaactacatactttctctcagtatattccttaatatttgaattgtcagttggggattttaattgacattatactaagtctatgagtttacttaggaaatattttcaacttcagtgaattcgataatgaaggtggatctgtttgttcttttagtcagtgttttttccttttcttcttccttccctcctttttcttcttttttcttcccacttactcacttagttttgactcctttaatagttattgctctctggttcttttaaatccccattaagttaatcttcaagcatttattgtgtgcataaatgggatatcttgttatacctcttgttaataaagagttgtttgaaaaggattaaacaataattgagataccattctaatattattgaggttttaaaaaaatgtcaggccttcaataattgctcatgtatgtattttctttcaataatactgtttaacatacatctccagttgtgttttttctttcttgttctcccttgataatctcatattaggaaatggtaaacataagggtcatattaggacattcctgggccctaggcacttttgtcttcttgggctcctctttctattaaaaaaattaaaaatattttatgactacattgttttaaggaaaaatatattagtattatatattaaaacattttctttgaagcaaaagttcacttttttcttcttgttttaaaagaaataaaacatttacgtgtacttccaaaattattgtgagtcctaggccctgtgcctacatgcataagcgtttacagaattgggttacatattcacagatcaacttagtaatagaaaattttaggtttctttcaggtgagcactaaactgtgggatacttatggtggcattcctaatatgttatttgtttttatttttgtggtaaattatatatacaataaaattaactattttaaagtgttcactttagtaggattaagtatactcacatgcccgctgtctgtctccagaacttatccatcatcccaaactgaaaccctgtgcccattaaacaataactcatccccctttcctccagctcctcttaaacatttgtagtttgcctttaatattttaaattattttataattagtatatatggacaacttatagaaatctggtttatgttttggaggaaactgtgattggatatgggttgctgatggtcgcataagaatgttgaacagtattgtaggctgccattgaggtattctaaatacctgatgtgctttagagaagactataacatgtaagtgggttgagagggaaaagaggacatgagttttccaaagacaaattcaggtagagtcttttgaagtagaggaatgttgtagattggaatgcagttcagaagtgatttgtgtttcaggcaacaatctagatttagaaaaaaaattattattgctatttggtgttagcctgaaattttgtaaagtgcggcgatctttttaagaggacagattcagagatggtggaaggactttaggaggagcatttcactttcagtaatattgtattttttaaatcaaaatgatttgtaactagtaatatatagtagaatcatttagaggataaataaaatgaaataattcatattattttaacctttttttctcttttggcttctttttttaaagtcatctgtcttagaattatggtagtttgaaaaatattcttaggttttaaagggggagaaaagagctattattgtgaagtttcatttagtcagaactgtgaccaggaaacatggctctcagtggtgttgtgaaaaatttttcttaattccttctcttaaaaaggaaaaaaccagacaaacccattttctgttctttaaactcacatatacatatgcatatgcatatatatttatgtttgttgattatataaagtatttatttcttttaaaaataagtatgtattcacatggctcaaatgttaaaacaatttaaaaagatggacattgacaagtctaattcctatccctgtttcgctgctctcatcttctataagttaccacttacgtaaattttgtatctttccattcttttacacaaatgtgaatacattttccccccatttacatgtaataagaatgttgtatatattcttctgcatttattacttaattacttatcgttacttattgactacttattgtatcctgtcagtcttagaaatgtatttcttttaagtctattagtattggacaaatttggaaattattttctagtttaacattaattttggttagtggcatgtagaatatctaacacatatacataattactgaatgaaaattagtaatttttagtaattatctcaatttcagaaagcctactagatgtaatccctgtttacttcatttaagttgtagtttctttttaaatcttgaaatacttgattataccaaacctaaaactttaacaaacattctgaaatttttttctaacgtctcaagatattcacatgatttctactgcgcaatttccagtgtgtgagtaactagtgaagaatgcccagccaattaggtcatatgatgggctgaacagccttcatttgtttagaaatcaagagaactttcacaatgataatagcmgttttctttaacatgtcttcacataaataatttttctatgttagtgttgattgatttgtttatatttatgtaaacatagacgtgaggataaatactgattatcttcaataacaagttaaaattaaagttctgtaattgacctctagattaagttttgctgttattttatatgttaactgtctttgcttagctttagccaaagatatagttgactaaaggtggaaaacatcatgtaactttttctttacccgactaatggatatgttttggtactaaatttattctaacagaatgagaaagatcatatgatagtcattattggtgttttgtgaaaaatacaaatgtaagcctttgggaaggagtttgttaaaaatgtttttccttggctttgtatttttttttttttttttttttttttgagacagagtcttgctttgttgctcaggctggagtgcagtggcacgatcttggctcactgcaagctccgcctgccgggttcaccccattctcccgcctcagcctcctgagtagctgggactacaggcacccgccaccatgcccagctaatttttttttgtatttttagtagagacggggtttcaccgtgttagccaggatggtctcgatatcctgaccttgtgatctgcccgccttggcctcccaaagcgctgggattacaggcatgagccaccctgcctggcctttggctttgtattgttttgtcctggactggactgtgactatttccggccttcagtaggaagttgaaagaatatttcctgatttttgtaagggaaaaataatctctgagctggatattctagagttgaaaggacagcatcagtagagaaacagacctctttcaagtctttttttcttcctataatcatatcctcattttacaggactttatcatcaaagtcttttaaatgctcttttaagaataatcgtcacttattgactacttattgtttgctagactctgttacagtgccctatgaacattttgtttgattatcacagcagttctaggtactgtagattctctcaactttcaagtgagaaatctaattgatatttaggattcttttatataacttaaaatagcggaagtgttccagcagagttaaataatttttttttttttttgagacagagtttcacttttgttgcccaggctggagtgcgatggtgcgatctcagctcactgcaacttctgcctcccaagttcaagcgattctcctgtctcagtctcctaagtagctgggattacaggtgaacgccaccatgcccggctattttgtatttttagtagacatggggtttcaacgtattggtcaggtggccttgaacccctcaccttgtgatctgccctcctcagcctcccaaagtgctggtattacaggcgtgagccaccgcatccagcccatagaattttttttttaaaacgtgatcttgatttccatgtttcactcagtttcgtaacatggcagaatttctttaattcgtttcattctctttgcgttcgtcattttttcttttatttgtcaaatactgaatgccaaatatcatgctttggctatacagtggtgaataaagcaggcatagcctttgccgtcaatggtgctaatattctaatggtggaagatgtgaaataaacagatactaacagatgatggtcaatagctaagaagctagtaaccagagtgctataatggaaaataaaaaggtagactggtatgagggggttacgtttatgctataattttaatgttgaaaagagacagagttcaaagcactgcatcccagaaagaagcaatagtctgtaggtgaatgctgaatgctacaaggtagagaaaacttgatgccttctaagaacttgaaagttacagagtagctggagcagaagtcagttgccctgaatgagcgcagagctgggtttcagagtgagttagaaaaatagaagatgatggttggaaggtaggatcctttaaattaaaactatagagggttttcagttattggtaatgacaaggtctgatgactccaaggtccatcggagttaataagatgtgatagaagttgaaaagccaaagtgttgaaagcatcacttacactgttattaaaagctccaagaattaggacaggagtgatgttggagagagaggcagtgatccagtagctaaaataattgacaggtgaaggggcatttgagatttttaaataaactgcaacatgaggggactgacgtgattggagctgggcagttttaggaaagagrgagagtggtttggaagaggcaagggaaatgaatgcacattgcttagcataatgcatattgaacagatagtacagaggtcaactccgacacaatttccccaattattcacatatttcattagtgtatatatttgttacaagatatgaaccaatattgatacattactattaactaaagtccatagtttgcattaaggtacactttgttttgtacaggtcaatgggttttgacagtgtatataatgacatgtgtctaccattgtgtaatgccacgtatctgtcattacagtaccatgctgaatagttttatcaccttaaaatgacctgtgctccatctgttcattcctttccttcctctctttgcactttaaacagccactgatctttttactgtttacaagtttatcttttccaaatgttgtgtaattgggatcgtagactatatagccttttcagactggcatctttcacttaccagtatgcatttaaggttcccacgtgccttttcgtggctcagtagttcatttcttcttattgctgaatactcttccattatatggatgttctacagtttgtttattaacctactgaaggacatcttgttggctcccagttttggtgatttttaataaagctgctataaacatgaatttgcagccttttgtgttgacatcgttttaagttcagttgggtaaatatgtgagaacatgattgctagatcatatggtaagactgtttatctttgttagaagccaccagactgtccccacagtctcagtatggttttgttttttacattcaagtctttgatctatttggaatttatcctgttaggcagtatgaagtatggttctaactttattcttttctatttggctaccaaatatcccaacaccatttactgaatcgtccatctttttttcttctgatttgaaatatttcttttatatattatatttgcatatgtatttaagtctgtttttctcttttgacccgttggtatgtgtctaaacacattctgctaccacatggttttaattattaatatgttttgacatttggtaggatatggtcttgaggtttttttttttttttccggaaatgttgttttagatattctttccccttcctactctcattaaataaactttcaaattgagttggctgggttaaaaacaaaactttctgtttaaattggcctagttttaaattaacaaatttatgtctttatgatattaaatcttcctatccgagaacatagcatctctttttgtttataacctttagtagtgtttttaagttttcctcttaaaagtcttgtacattttttgtaatgtttcgtctgaggtattttgtcctttttgctgctgtttcagtggggtttttctttcactgattgggaatttcccttctttttctttctttctttttttttttttctgagatggagtctcgctctgtcacccaggctgtagtgcagtggcgcaatctcagctcaccgcaaatgccgcctcccaggttcacaccgttctcctgcctcagcctccccagtagctgggactacaggcacccgcccctatgccctatgcccggccaattcttttcttttctttttttttttttttttttgkatttttagtagacacgtggtttcaccatgttagccaggatggtctcgatctcctgacttcgtgatccgcccatctcggcctcccaaagtgctgggatcacaggcgtgagccactgcgcccagctgggaatttcccttcttaaagggtagacgggattatagcatctgtgtatctggaagagaatgatgcactttgagggggaaattgagatgatgattcaggagagaattgggataacaacagaagtcaagttgttgactaggcaatagggaatgggatccgatgcgagctgatttttctatctttacttgcctagacaatgattttacttttttattttactaagtcttaaaaacatcgtatattttatagaatgagacttatagaattctgatgactgttgtgcttgttttgcagatgagaaaactaaagccctgagatttttaatgtgacttgtctaaaacgagtgagcagaggcaaaattagaagtcagatttctttacttcccattttatgtttttttctaccttcactgtgctgtgtgcttmggtgcttgtatgagcagttatatttgaaggttaaaattatgaatcaagacataccaatcttacattaaagtttttggtgattcctctctccccatacgttatgttacattgtgttttgtttgactgaaatataccttagtgttacatggtctagaaaactcaaaatatcatcgtactgaatttaatcctcaatattttagttcagcatgtagaagtttagtttatctgcttttctaatgaagtcctttgggacttacatgaacatgtttgttaaataatagtcaaataacatcactgtatatatttatattcacgttccattatctcataagaaatgcctacttaataagcttaamattaagggaataatttgatatttgtactctatattttgctccttttatatgttgtgtggattatgttttatgtaatgtatgttacaaatcaaatttgcattttgaatatgttcagtatataaagattgcattatttctgttgtgatttcttttgtacttttatattagaattctcttacagtctgtgacatgccttcatgcttatgaaaggcatctaaataaggctctactcagtattcaaggagcattcatattatctcttaatttctaaaaatatttagttcattcagcaaagatttgagttcccatgtcttttagctgctgtgtgtctgctaggtcctggtatactaagacctataaaagctatgcatgcacatactcctccttcctccaatatagacgtacatatgtccttgaatggtaaaccacagtaaagctttttttgtagcattttagatgaagatgtaatgtttaaatcactctaaaataactttgaaagctacagttgtaaaagcaaagataaaaaatgaaacatttttgtgctttcaagaactaacattgttgagagtctctaaatccctggcatgagtctaggagttttgtattaacattctgataaggaggtattagacatctcctcttttacagatgaggtctgtcaaagcttcaaatcgtttttctactgtatcacaatgcttcttttgtttagtaatggttttcagcctgggtggtattgctccattagggatggtttcaggtgtcccatgacaggcgggttactactgatgttactgatgtagtaactagcagggatcagggatgcaacatgccagatagtctttcactagtgtccttgtacgtttttagtctgacataggttattagaggttaaccatgcaaacatatttgttaaccatgttttttattattgctattgataatttttgttttgatcatttttcttttatatttgcaatacttttaggcaaataccctgttattttgttatgtcctgagagagggataatgaagaggtgatatcctcattttgaaaagttgattggtctaaaaatcatttattaatttagtaatatatacaggaattagaatttaaatttactgtcttttcaatgacaataatttcctttagagtatacaatcttcctgtcactgctcggcatatggtttttatgatactaaaaagtacttttcaactgagatatagagctatttgaaataggagaattttcaaaagttttatacagcataggatgtcacaaatcttgactcctttttccaacaatagctttaaatattcttggcttcctcctatatagcaatggaaataccttttcagataatctcactaactggtgaccgcgcctaacattgagctatagatctctcataactgtacaacagtatacctataagtagatagacatttgtaaataatayagtgacattgttgaaaacttactgtgggccattcaaagacatttgaaatttcacttttcttggaaaagagaattgcargaatgcaaaattgcttttagttttccttgatcctctgactgtagaattgagctgtatcatatacatgtttaacctactgaatttaactgtattcttttccagcctcctcagattttttcccaaaaaacttgtgcctgccaattcatttagtgagcttgtatgtgctgtctcacaattacaattcccacttttctcatagcatcaataccttgctgtgctgagggccattcttgctcggagcatgcatattttatctaacatagtcctgtatgcaagccagcttcttcagctgttgctcaaagtaacagttttgctttaataattgaggaaaakttggctgtattggacacatttgagagacggttcatgagttctccaatagttaaatccctaatcaaagaaaatggagtaactgcagttttggcctttataccttgactttggaaactgaccttaagaatgttgttcttctgtgacatcttacagcagtgtgatttgtgttatggtcatttatcaaatgataagtaggtatttttaggtggaaaactgggaaaagtgagagataattctcctttccctgttctttgtccctgcccctgacccctatctttttcttttcccatctcaagataaggaaaagagaggatgtgtcttacaaaaagttttaaaataccaaaatggggttttaagaagctttttgagagagatgaggatttgcccaccctttaaacaggtaggtgatggaaacctttggtagactcttctaagtgcacgtgcagattttctcttaccatgtatttttacaaaatattttgtgtttattgccacccgtctcttctcacatcctctgttcctcccagcactacttattgtgcgttttccccctcatggctttattatagttctattaactacattttatgaaaggatgtatgttttccacttagygaactcagtggaagatacacagaacttggtaataaatagaactttataaggaagatgacttattctaaatattagttgtacaatagtgaaaagcagtatttttcgtgttttgctcagtgacttttttttgagcatcagccacgttgaaggcacaattctaggccccattcgcaatgacagtgttttaacttcagtcacgggagagcaacagcagttgctaaataattcttattttcattttctcaaatttcagttgacagtttattatgtgccagagggcatggttaaggagtggcatgccaaggatgagctgtgtaaccctgggccctgccttcagcagccctcatgatggggagataagtagttaaggagaaaaaccccgcaaaccaacccaacagaagagaggtgttaaatgctaaagctttatcatgtgatggtgaagagcacagactctggagtcagattgtctgcttgtgaggttctcagcacagcatctaacacaaagcaggcactccctaagcgttaactattagtgttacaactattatctgacagatttagttcaatatttgagtttgcaggaggaatacctaacattccaggcacagcttgatgtggggagctgtcaagggcctaagttcctcagtttaagagatgtgtaagctctgatctgtaggatgagtaagcgttgactaagaacagcagggcgggagagtccttggagggactggaggtccaagagagcagggttttgagaagtgatccagggatgagattcatggctggcttttgtaagcctgacctgatttagtctttataaacttgaagtgaatttatttaaatatgtattatgtttaagttatgttttaaacagagattaaaagaagacccaaacaattctaaataatatgacttagtactgttcaaacctaccagccgtcagcttcctttgttagaggctgttctagttatctcttactacacaactcttagtagtaactgtcctaacacttagcttaaaagagcagtttattatatctcaaagttatgtgggttaacagctgggcagttcttgcgtggggtctgtcatgaagttgtagtcacatagtgcctgggactagggtcatctgaaggcttcactgggatggatgcttagtatggtgagcagtgatggtcgaccatcacctgggacctcacctggctatcaggtgaaactcttacccaaggcctctgcttgtggcttgagcttctcacagaatggtggtgggttcccagagggagcatcctaagagctagtgctccaggagacccaaatgtactccacatggcttcttgtaagttatgtgtctcagaatgtcacttccactatattttattggtcaagcaagtcactgaagtcagtccaggttcaaggggagggttgttagatgtcacctcttgaagggaaatggtaagttcatgtcaaaggaattattatcatagttatctttggaatacataatttgcctgaggcctgttagttccataagtgttgaatcagaactttgaacttaacaaaacaatgaaaaataccattagraaaaaataattctaataaacaaaattataaattccacttttgatacttgagacactcaatccttaagaatggaatgacaaaatgtgatacaagggtttcttcatttttaaatctaacatttaattatgacttttgacatggaaaaaattgttctgtgttgaaagatgtacccatttgtgtgtatttataaatatgaacagctgacagatagggaatcttaactgattaggtagtcatgaagattttctttcatggtgccttttcatcgcttggttttagacacatggcctgatacagcttttagtttatgaacattcataaaagcctaattaaagataatagcattttttggctgggcacgtggcttacgcctgtaattccagccctttgggaggccaaggtgggtggatcacctgaggtcaggagtttgagaccagcctggccaatgtggtgaaaccctgtctccactaaaaataaaaaaatcagctgagtatggtagtgcctgcctgttatctcagctacttggaaggctgaggtgggagaattgcttgaacccgggaagtggaggttgcagtgaactgagatcgcaccactgcattccaggctgggagacagagtgagactctgtctcaaaaaaaaaaaaaagatagtagcgttttctgaaattgatggttttaaacatgatattgtagtttatataaagtttggacaactatgtttatgtcacagttttaacttatacagggattcacttaagttttagaaaaaaacactaggctagactatgaacttcatgaagcagggtcagtctcttcttgttcactactktattcctaaagccttgcataatgcttgtcacctagaaggtaattaatgaacgttagttatggaaagtattattaacagagttctttggtacctattgaatttttttttaacagtgactctctaatttttatggcggtgattcaccctgaaagtcttgcttacctaattagattaatccaaagggccggtatccttttgcactgatacctacaaatagcactccatgtggtggaatcagattatctgagtacttccaacacgatgaatgggcaaaaatgagaagttttcttaatttaccattagatcagagaagtgactgctgatagaattcattaaaaaaaaaatctgtcctttgcacatttgccctaagagcttcaagttctgcagagtttgtgttttgtttgggaaattagaaaggtctattgcaaaagaaagcacagtagcacagtttggatatttgtgtgtgaagattgattgattaaggaaggttcacgacttaattttcatttacttccaggcatgagctgacttatttttaatagttatgacttcacctagaaactgaatggttgagagtggtataatggggcaggagtgggtatagggaggatgtgatagagaggagctccatcttaaatctcctttctttgaatctgacagtgcagtttgttgagataggagtaatactggtaaataatgaaattgaatttgatgctttcagttcatcagctgacatatgtaggcagttatgtacattcctgcaaagtctgttctttgtctggtctgtgatttgaraaaaagacattggaagctgcaacggtatagaaatactgcccccttttcttttaccctcttacgaactatatgacccagatctattcataaaaagatgattttgtggatgaacatagttttggctgttgtgaccataacatccaatttgccttggacaattgtagtttatgcctgctgttcctctgttatgtccagttaacaccayctttcactcgcgaaagggtactgccatagagaatgaattatatagacaccatgcttgtaatcaactttcatttgtcattggaaggataatagccagaagtatactcacgttaaattcacttataatccccaaacctttttaaaaagtagtgttttaaccatacttttaattacttggtaagatttaataattatacatatatatatatataaaagttcagtattacctatctggtggaaatactaaaaactgaattaaaaatgcataggacagaatgaaacagttcataatagtggttaagttctgttttgtagacagttctgaagggatttttaagctagtatgtaaaaagatactgctgtgtttgcacaaacaaggtgttcatcagcgcttcattcttactggctttgcagctctgtccttttaatkgttcagtagccaattttattttggtgccagagatatctttgctttggtttttacaattggctgtggtaaaacaacataggaatgtctaaaataaaaaggaatagtttcatttcaacamccctttccccaccatcctttccaaaagtcacagtttaggtttcctaccttaaaaaaaagtggtttataaacaaaatacataatcaattttatttaacatttggtaaagaaagtatacaggattattttctaaaatattgagctgaatcatctttagattattttttactgattttaattttagtattcaaataattctttatatctggcctttaccatgcattgaaatgattgttttgtgtttttatgtcggcatggtattcacaactgcaagtcagtatggggtcacggaccctggctcctaaaataagtccaactgtgaaaaaggcaaaatctaaataatagtgttaaagtacataatttcttcagtctaatgatgctgctatccaaaaattttaatctcttacaaaatcagtaaagtagaagaaaaaagttttaggattaaaaaaattgaatgcttggcacataatagacattcagtcaatattagttcttttgtgtgttgtttctcccttcaccatgctctttaggtggaagcagcctcacaggcagttgagcatccttaaaatcaggaatcctaccttgtatcctaatttttctatataattattaaaaaggatttttttgtatttattacagtgctaactaattatacttaagcatattgctttgctttccagggctcattggagttcaaattgcccrataaaagtttttacttttataaatacatatatatttcacataccatcaaatttaccattttagaatatacaattcagtgggttttaatatgttcataagtttgtgcaacagtatctaattcctgaacaatcatcatcccaaaaagaaagctgtactcattagcagtcactcccattcccacctctcctcattcctggaaaccactaatctactttctatctgtgtggatttgcctgttgtagacatttcatataaatggagctctgcaatacatgttcttttgtgatcaactttcttcatgtggtgtaatttttttttggaagacagagtctcgctgtgttgcccaggctagaatgcagcggcacaatctcagttcactgtaacstgcacctcccaggttcaagcgattctcctgcctcagcctcctgggtagcttggatggggtacatgccactgtgcctggctaagtttttgtatttgtagtagagatgaggtttcaccatgttggccaggctggtctcgaactcctgatctcaggtgatccgcctgcctcggcctcccaaagtgctgggattataggcgtgagtcaccacgcccaacctcatgtagtgtaattcttctgaggttcgtttatgttgtagcttgtattagtacttattttattttggtaaaatatatttaacataaagtttactatttaaatcatttttaagtgtataattcagtggtatttagtacattcacagtattatgcaaccaacaccactatccattttcagaactttttcatcatcccacgtagaaactctacacctttgaaataatggctgtccatttcccctcctagccactagttacttttttctatgttctatctttatgaatttgtctattctasatacctcatggaagtggaaacatagaattttttgtgcttttgtgtcagacttatttcacttagcataatgttttcaaggtccatccatgttgtatatagcatgtgtcagaatttccttaaggctgaatactattccattgtatatcacattttgtttatccattctttcgttgatggacatttggctgttgtgaatactattaatactactctgaacatgggtgtacggatattggttagagtcccagctggattatatgtggttatgcttaattttttgaggaactaccacacttttcacagtagctacaccattttacattcccaccggcaatgtacaagggttctaatttcactacatcccctccaatatttggtatctttcctttcttaaaaaaatagccagcctagtgagtgtgaagtggcatctcaatgtggttttgatttgcatctccctaattgctagcgatgttgagcatttgttatgtgcttattggccctttgtgtatcttacttggagaaatgtctattcaagtcctttgcccatttttgaattgggttgttgttcgttgttgagatgtaggagttctttatatattctggctgttaatctcttgtcatatatatgatttggaaatattttctcccattstgtgggttgacttttctttattgatggtatcccttaatgcacaaaaacttttaattttgatgtttaatttgcgtgtgttttttttttttaaatgaagtgttgatgttaatttttaaacatttggtagaattcaccagtgaagctttctgtttctgagattttcttcgtgggaagttttcttaatcagtaatttagtctttttacttgttacataggtctattcagattttctgtttcttcttaagtcagtttcttttcttttttctttttttctttcaacagctaagcatatcatagagttagtttcggtagtttcctgtctttgtaggaatttgtccattttaactaggttatccaatttgttggcataaagttgttcatagggtcttttaaaatcctttttatttcagtgaggttgagagtaatgttccctctttgttttttgattctaataaattgagtcacctttctttcttggccagtctaaccaaaggtttttcagttttgttgatcctttaaaaaaaaacttgtgttcattggcttttcttgattgtgtttctgttgtctgttttatttattgcctctctttattgtttccctccttctcctttgcttgctttgggtttccttgctctttttcctcgtttcttaaggtataatcttaggttattgatttgagatctttttccccaattctttagattgtagcaaaataaacatagcataaaatttaccatcttaatggtattaaatacctgcataatgttgtgaactctagtccccatctacctccagaactctttaaaactgaaactgtatacccattaaacaattaaacaataactccccattcgctgctccccaggccccctggcaaccaccattctactttctgtctatgattttgactactctttttttttttttttctttttttggagatatggtcttactctgtcacccaggctggagttcagtggcgcaatcgtggctcactgcagcaagtgatccttccacctcagcctctcgaatagctgggactacaagtgtgtgccatcatgcctagataattttaaaaatttcttgtagagacagggtcccactatattgcccaggctggtctcacactccttggctggagcaatccttccaccttcatctcccaaagtgctggaattataggtgcaagtcactgtgcccggccttgattttgactactcttagtacctcatctaaggggcatcatacagcatttgtcctgttgtgaccagcttatttcacttagcgtaatggctttaaagttcatccctgttatagcgtattccatgtatgtatgtaccacattttgcttatccatttatgcgtctgtggacacttgggttgcttctgccttttagctattgtgaataatgctgctatgaacacgggtataccactatctcctccagaccctgcctgctttcagtcctttggggtatatacctggaagtggaattgctggagcatatggtaattctatttttaattattcgaggaaccagtatactgttttacacagcacctgtagcgttttacattcccaccaacagtgcacaagtgtttcaatttctccacatctttgtcaacacttaccattttttctgtttttctttatagtagccatcctgatgggtgtgaggtggtattgagatcgtctttttttttttttttttttaaygtaggtgcttataggtataaattaccttctcaccgttttactacacccttaagttttcttgggttatgttttccttttcattaatctcaaagtattttctaatttcccctgtgatttttttcattgacccattggctatttaggaggatgttgattttcacgtattttaattttctatatttctttgttctttcagattttattctgtctttggagaacatgctttctatgattttttatctttttaaatctgtagagacttgttttatggcttaacattgtttatcatgtgtaatatccatatgcccttgagaataatatattgtattatttctagttcaaataatttatagatgttgataatgtattgtgttattagaggaaaatatatgtcattttaatctgatgatttaatattttgaggctatccttttgacttatataaagagctccctgtttatgttatctgaatttattgggaggcatatctgtgtccagaacatagcatgtttaagtgacaggtatgaatcttgttagtgcctattactgcctggtaactggcatcatgggcaaggaactgaacttcagtaaatggaggacttggtttgctgtgaatgttttgaacactgaatgagtcctttgcttattatataatttttgagagcctaagcacatgatgtttcgtaggttatatgaatgattactctgctttactattatcattaattaccataaagcatccccatgaaatgcatgtttgctacattcttggcctgtcatttaaacagatctgtttttactgacctgtgatttatctacaacaaagagcatcccttgtatgtgtatggtttgatagtttgatgagttttgacaaatatatatacctatataagtatcaccccaaccaagatagcatttaatcactcccaaaagttccttccaccttatgcaagtactaatatgcattgtcactatagattaaatttccttttctagaatttcataaaatgaaatagtattgtcagtactcctgtgtctagcactaaatgtgtttctaagatgaattcaaatttttgtatgtatcaatattcctgtttcttggggaagaggtattacattgtgttaatatattacaatttatccattcatctgttgatgggcatttggattgtatccaggttttgactctgaacagagcctctgtgaacattcttataaagagtactgggtagtatgctttcattttcatgtccttaagggaaattatggttctgtgatttcatttgttgtaagccttagatatttgttatttgatttccaaatatttgggtatttttatgctatcattttgttatcaatttgtagtttaattttgttatggtcaaagaatgtactttgtatgactttagtccttttaaatttatcagtgtttgttttataggacagaatgtagtccattttgttgaattttccatgcacatgaaaaaaaatgtgtataatgccatgggtgggtggattgttgtgtaatgccagtcaggtcaagtttcatgatagtgtcattcaggtattccatatcagtacttttttttcttgtgttatcaagtcattgagggggcatgttgaagtttccagtagatttgtctgtgtttcctttcggctgtatcgatgtttcctttatatattttgaagttctatttttgtgttcatgcacatttagaattatgtttccttgggggacttaaccgttttattattatgtactgtctctctttatccctgttagtattccttgttatgaaaactgctaacggtagtgaatagataaaagtgtagttggattacaatcttaatctgccatttttctagatgattggttatgtttcttctgttttctctttctgtcttttgtgtatcaatcaaatggtttttatggttttatttttttgatttaaaactttgttttgagacagggtctcactctgtctctcaggatggagtacggtggtgccatcacagctcactgcatcctcgacctctggggctcaagtgaacctcccacctcaggccattcactgcgcccataggagcygggaccatttctggctaatttttgtattattttttgtagagatagggtttcacagtgttkcccaggctggtcccaaacttccggactcaagccatctgcccayctcggcctcccaaaatgctggrattataggtgtgagctgctgcacccaagctattttattttcatttttctcttaaaaatatttgtagtggtggctctgtgttaaattttttcattttttttctctctgtacttcagtttgggtactttcagcatattttcaaatttactgatctttcattcttacctgattaattccatccactttttaattttacatatttttttgtctctagacttttatctgggccctttttaatatatttcttcatcattatgtggatgatttccagcatgcttatmatagcttatataaagtccttgactgctaatttcatcatctttgttatttctgcattctcagttgactgaattttctgctagttgtgtatggtagttttcttcttcatatcatgtcttcatatcattttattgaatgcttagtaytttgaattttatatttttgagcatcaggtgttgtattcctgttaaggagtattggactttattttttcagaagtggttacattcgtctgtggcttatgttgttaggcagtatgtaggtatgattgagctgcattgctagggtctaaactcccctgtatatccactgaatcctctggattttcaatagatgcttcactgtggcctcatctctgacractgtgtgagcgttggatctctttagcatatcgccctcggtcactttttgaccagtttcatggagtttttcacctgtgcatgcgtgggtttttcagaaggtcttcactgatacttggaaagtgcctctaggcagaaagttgaggcaaacttctggcttatctaattcattttccttcttggatattatcattcagtactgcctgtggcctcatgtctttaaaaagttaacctcagtgtggaaaatctgtttttccagttttctaattgtttacaacgggagtgtaagtctggtctgtttttccaccctggctggaagtggaagtcatggcctaccattttattttcaaacctttttttttttcctacccagaattagcctgaaatgcctcatctacgattactaataagagagcctgttaattttgtttgaaaaatttaaaggaactagtttacagtttttcaaccgtgttattaataaaaattaaatttccctactttatcrtagtctccctttttatcgtagtcttttgtctataacagttaaggggcagggggaagctagatgtattattaagtratttttacttttctcatttttttagacctaaggattgtcttcggtctattatgagaagagtgaaccacaaagatcctcacgttgctatgcaggctttgactgtgagtggtttcattttaatctgtaccacgaaattacctgccacaattgagcccctttaacttctgattttgtgcttttagcttctaggagcatgtgtatcaaactgtggcaaaatttttcatttagaagtatgttcaagagattttgctagtgaagtaagcaacgtattaaataaggtaaggagcattatttccagaaattaattaaggcagtcttctttcttcacatattttattgtttaaatcttcacagaggactattctgtgctttttaagaaatcctttctaggctgtgtctatccagtatataaataaatattatgttttgttgaagagactgcggattcatgtaactttgagttagttttttcaagccatattagagtgtttttaacctgttcttttccatcatactttcatctgataagaaaacaggtatttctatatctaattaaataatatcagtctattttacatactgtttttgtaggcacaaggtattttcctaatggaaaacctttcagaaacactgcaaaaagtctatggcaccgttgagtttttatctttatcaataaggctgcttcctggccatcacaggattttaatactatactgctattcttactggctgaacccacagctggagttgcctcaaaagtggtggcgggggagtttccacaagggactgccccaaactgttccagatagggccagatgagagtccaaaaaaagaggcactaaatgccagggtgatcagtctaaaggatttattaggggaacttacacaggagggctgcagtttataggagggtttaaggaatttggctcagggttggggctggtttctgtgtgtttagcaacatacttgatcttttagtgttttgggccacaacctgaacaactttatcagtgcctgagaatgttcaaggccccagtttgggtccaaacctatggtggaaaacatgcagctggctaggtcacagagcgggacaaggcactctgtttttctattgggacacagaaagaaagcagggagaactggggaccctacaactgcccactcaactgtagaattctagtcacacagttcaagaaatttttcaattttcaattagtaatatgtgagtttccccagtaaaaatttgtgcattctaaaagtaattatttttggcctttttagggggagtactgtaaatcaagaaaaagtttttgtatgttaaaagggaaaatgcctcatgtttttgggaaaaatgaatagttccaggttacagtagaaaaatagcagtatagaaatatagtaagaatgtaaaattctgtacttttcgaacatcatggttaaatgataattctttccctttcctgctttatgcagttaatatttattttctactaattaataaacattgtcttttaatgtcctgaatgtccatygagattacaactgtttatgaagagattctaataccatgttttttgtaatgtaggtgaaaaatgtggtatacttacctatgtataatagtgcaagcagccatttccaaaaacgacttcctataggcaagaggacttctctttattttctgaatgttttacagtgaacatattggttttgtacttaataacatcccgccttttttttttttttttgagacagtgtctctctttgtcacccaggctggagtacagtggcgtgatctcagctgactatagcctctgcctcccgggttcaagtgattctcctgcctcagcctcctgagtagctgggawtacaggcatgcgccaccacgcctggctggtttttgtagtgttagcagagatggggtttcaccatggggatggtcaggccagtctcgaactcctgaccttgtgattgcccacctcggccttccaaagtgctgggattacaggcatgagccaccgcgcccagccaacatcctgcccttttaaaaaatttccttttattaaacaaattaagttcatgtatagtctcaataaagcgtttgcaaatccattatatgctccttgaccaaaatacagattacatgtgcacttagaaagaattttttttcttctaatagagtaatctaaaagtctaaccttctccatttttaaaagctttagccaattatttagtaagcattggtttgaaatacattcatgacatttcatagaggagttatttcttctctggtatctgtgaaggtttctttatatctattacatcaaatagtaagacttcaaattattgccgctatgaagatacatcagtattttaatgaactggccaggttttttcccttaataagcaatgagtaaaataatttattttgaaaactcactacatttatctctttctttaatacggaagaataatgccctgcacacctgccttagactaacttgaatctttgttatacatcaaccataaagagttatgttattttgggctgggcacggtggctcatgcctgtaatcgcagcactttgggaggctgaggcgggcgaatcagttggggtcaggagttcaagaccagcctggccaacatggtaaaaccccgcgtctgctaaaagtacaaaaattagctgggcatggtggtgcgcgcctgtaatcctactcgggaggttgacacaagagaatcgcttgaaccgcatcccccacccccctctgggaggcggaggttgcagtgtgctgagatcgagccactgcagtccggcttctgccacagggtgagactctgtctcaaaaaacaaaccaaaaaaaaagaaaagaaaagaaaggaaaaaaagttatgttattttgaagaaattaaattttcaaaatgattaacatgcagtgtacctcaaactaggccccagataattaagcatcatggaaaaaatgcatagtcatgaacattaagaagtcaggaatttggaataaaggaactgtatcatttattctctccttcccacttttttattgctttgcaaaaagcagacacttttccttgtcttactgatgtacaaaccttgcttcgttgcaaaatattctgaaaagtcctttcagatctccaaaatcttattacctatttaatgctttaatttgamgtgagatatatatgatgggttttttcatagtgtgaacattagttttatttcgaataactatattttcttgtctatagctatgcataacttgtgattcaaaaaacatcacttaataactttactatttaaaatgtctgtattaaatcattggctaggaaattggtgctcttttatttctttttctattttacagggtcatcctaaagtatgtgaaaaattaaaggctcttatggttgaatggacagatgaatttaagaatgatccacagcttagtctaatatcagcaatgattaagaaccttaaggaacaaggagttacgttcccagctattggctctcaggtattttgggaatgaagttgtgtgtgtgctacagtttgtttctcttaaatagctatatttatttgaatttttktcttcattcccaggtaatttttactacttcagaggaattttcgttagctaattgtgttagtaactagttgtattgctagttagtaatactagttttctggcattcagaggtgccagaaaagtattataatggaatattaatgtgctctaacctctctacttctttataaacgaattggtttaacattttgcagtttttgaaattttttggtatagtttttgtttgtttgtttttgagacggagtctttgtttgtcgccctgggtagagtgcagtagcgtgatctcggctcactgccacctctgcctcctgggttcaggtgattctcctgccgcagcctcctgagtagctgggactacatgcacgtgcagccagacctggaaattttttttttttttaaatagaggtgggtttcaccatgttggccaggctggtttcgaactcctgacctcaggtgttctgcccgcctcggcctcccaaagtgctaggattacaggtgtgagccaccaggcccagccagtacagttttaataatatacacaaaatagctttattaattaggtaacactgtctttttaaatgctcttaatgctataattttctacaaagaatgatagctcagaaatcaggatatccttaaaagttagggatgacttgagagattcttttgtggaggaaatttatgaattcctctattaacaatgagaggactttagaaggggtaaatgggaagagaagcacctgaagcattttctccttagtaagagccgaccagtacataagtcttcctttccccagtggatatggctaaatagcttaactttgctctcctgtccacccttgtgccaaaaaaattcagtctctaatttatgtcatgtagaaaaaaatcaagaaatgtcttttttattcctatttctattttgggtaaccttcctttaggatgcccaactaatcaagaggcttaaaatatgtgctgatttactacactgtctttccccagtttattgactgggacagactgtaatgagygatgtgaaaccatgaacagaaatctgtgagtgtggaggggcttatgttttgaccacttcagggagtcatgtagcttatctacattcatccagacctacatgtgctttcttcccaaggcatttccagtttatctgagcactcttgagatgtgaagactcaaaaatgtatctgggagaggaaggaagcaaaggacattyttcttcttaaaaaaattttggtttaaaattttcttaaaaaaattatgtctttgaaaattcattcattcataactgatagctggtttttactactcagtatagtttctagaatctgtataattaaggaaaaatcttaaacagaataatccaagacattatacattccttgacaacagaaacaatgtttatttatcaaagagtagactcactgcagagaacccacctagaataggtagagaaaatgcaagcccactaaatatctagagtctttggttcttgttaactcaraacttggtttgaccagcatcactggcattacctggaggcttgttagaaatgcagcatggttgaacccactccagacctatgggttcattatctccattttaacaagatcttcagaggatttatatgcacgttgaggtctgagaagcactgctgctctagaggacagccttcagtgcaagtgaaaactgcgtttcagtccacaaagggacttactcttgtaagaaaaggaagaattaatgattgtgccatatgtacccttgtttggttaatctagaatcttagccacggaaacagttttagggagcctctaatctaatccgctcatttttacagatgaggaaactgagactcagaatggttaagtgacttgcccagggacacagctcatagttgacagctggaactagaacacaggcatgctgattctcagtccagtgttcttttcgctgcccgagtctgccttctttgttagagaggttagtgaatatgtgtctgtctagaccaggcttccagtggagtgaatgctggcaagagcattatgtcttgattggtagagaaactagcttattctcttgttcaagaaattcaggacatagaagagcaatagtaaagataggacttaattttcatcctttgatctagatgttataaagtatgtaacagctaatcttgtcatagtggctatatttcacctacaagaaatayatataaagtaaaatatgatgaggtagaatgatttttttagtggtttctgaaaagcttattagaaaccctacatgtaaagagcttcacattaaatgaaaaaaataaatcatctaagttcaactgcagaactccctgtagattttaaagccacttagttacttaagttattactgtgttttcatcagactagatttttgttagggcatacttaacaaaaacctctgaagatatatttttctaagtatatttttttcatctgagtacagaagaaaataatgtaaaaatattaagaaaagtgataaagtcacctgactcatactgatgcagttctgttagcactaacttttgatgtaaagatagaagtaggctagcagcaccgctaccgtagttggctgcttaataagacaagtgttattgttacatttagaacctgatgatagaaaggaactttgaataaaaagtgcagttcagaaacatgcggcttcacatagcttatttctgcgcttctctactggtagagatttcttcacacaccataaaagttcaaatctrtctaattgtgaagtttgccaaattgtgaacaaaaatttatgtaaaccgtaaaacttatttctgaccaggcatacctgtagttttcagaagtgtctgataattaaaacattatctaaagaaaattgcaactagagataggtcagaattgagagtgtttaaagttgtattcygtgaacaccaaaaagtttttttcttctcagctcttctaaaaataaatgcctggccgggcgcggtggctcacgcctgtaatcctagcactttgggaggccgaggcgggtgggtcacgaggtcaggagatcgagaccatcctggctaacatggtgaaaacctgtctctactaaaaatacaaaaaattagccaggcgtagtggcaggtgcctgtagtcccagctactcaggaggctgaggcaggagaatggtgtgaacccgggaggcggagcttgsagtgagccaagatctcgccactgtactccagcctgggcgacagagcgagactcaaataaataaataaataaataaatgcctgtgcatttgtttgacaacacgaaatccagttaagtgaggaatgtagaactgtattttattataatgttgaatatttttcctttcataccctcaacaaacattgattgattgcttgtaatatttaggcacattccctcagggaacatacagtctggttgtggagacagacatgtaatcagacaattataacagaagctgagattattgcctgttacaatgttccagtcagtgttctaagtgctgtacatgtggcaatttgaatgtgttttagaatttcatttttaaattgtttgccctgggaatgacaatatacattcataacttttcatgatctactttgagttaatatttgatgtaaaatatagcaactttgcatctgtagaggtctgtttacactgtagttgtcatgtgtattacctctacatacgttataagccccggaggtaatgttacatactttttgttttaaaccctgaatgagcccatctcatctgattttggaatcacatgtgttaatttaatactttaaataggctgtgaggtgcccatgaggtgtaggtgctattatcgtagtcattttattgatgaggaatttgaggcaccaagaggctaatttgcccagtgtcatccagctagaaagtggtagatctgggatttgaactcatgtytgtctgactccacaacttacattcttaaccactcatatcrcagtaccttgtttaaaggtgttatcataataacaaacaagagaatgtgtaattaacaggttgagggatgcttcattgacagtgatattttagctgattactgactgatgtgttsaaactcaaaagggaaaaagtgaacggagcaaaggagccatagggggagaacgttgtaagtagaagtaaatgagtgtgagacctgtaaagtaccggtatagagactgctcaggaactgctagcagtttctggtaactggcagaatggttggaaatgaggttggtaagataggctaaattctgatttgccttgaatgctatgcaaaaactgagaggccacagagcccataggcttagaagcttgtaattccagaagtgtgaattgaattatatgtttgttgtgtattcccttatttacacaatttaatagaggcagtgatatactgtcagaattaactacttgtaatttggtttacaaaataggatttttgagcatttatatcgttttatatatatatctgagttcctgaagataacatcctgacacttgatccaaaaggaaatgataactctaactattaatagatactacagttttttttttaactatttatgtttaaagtagtcatctctttctgtctcccagcctcttttctggttttggagtttttttaaacacgttgaaatcttctctagtctgtcttctctgacttgtgtaccatatgcttttagttgaacctcttcacacaaacctgggagggtgtgcctaggctgcctcctctaagtgtctagttgctctctgtgttctccaattctgattcatttccctctcccttttaaggtggaagctgctgcagtttggatttcttctttcagaaatctgtgctagattgatgagaaaggttttgcaaattcttagggtgggtgagaggaggagaatttgataacaaccctcaaatactgtgttcctcttttttgttaggctgcagaacaagcaaaagcaagcccagctcttgtagccaaggatcctggtactgtggctaacaaaaaagaagaagaagatttagcaaaaggtgcgtttttaagtccctgatggtgggaataacataagcctttattttttctctgagatatttaaaggtaaaataaatagaactttatagcaaaaagctgaaatctgctttgttgccctcctcagtattctttgctttactcttgagaggcaattactgtcacatgtatcctttcagtctatgtttttatgacagttttttactataccgtgtatccaaaaacaatatcaagtgcttttttgtgtctaacaaatttgttttttgtagatagtacacgggaaatgccatttgccacttgcttttctcatgcaacattatgtttgagatctattcgtgtgatatatccattaactgttctataatatccagtgtactaatgagtgtaccatatttttctgtcttcctactgatggacctgtggattatttctgatttttttttactaaaattaagctgcagtgagtattcttgtacatattctctgtgcacatatatgtgaccgtctctattatgtgtgactaaaagcaatattgttggatcatggcattggtacatcttcagttttgttaaatggttgttatgatttccttttccattggcagtgtatgaaagctattattattaatctgacaacacttggtagtcttaaagagtttaactttcatgaatctggtaggtttaaaatgatgtcctgttattttaatttttatttttttgattgctagtgagactgagttctttttttgtatattcactggtcattatgtttttctcttgggtaaattgtcttttgttaaataaaataatgatatgtacaagtctttatttgaaatattagtttgttatctgttgtaattattgtaggtatctactcctggtttttgaccttaaatttgataatggtgtattttatcaagtagaaattttaagttttgtgaaggccagagttgtttgcttttttattatgatttttactttgtaatggcttttgaaaaatattgttccctacctcaaggtcctaaaagatagttttctgtattgacttttagtagctttaaagttttgttttcgtattgtttcttttattactctaaaacaagagcggaagagcagaaagggttctgtgttgaattgaaagcaggataatcaatgcactgatattacatttcagagcctgagtgacatatggtgatggtctgcacttgggaagtagtggtggagatagagacacgtttgagatctattttggaggatttgttaggttgagtctttasactggtaagaattacccttggagcaataaaatctcgattctccaagattgcctttaaggctttgatttattaagtctgcagtgaagcttgatattcttgactttccaggcagttttgatgattattttgaaaaaaaggtcaaggaaaatatctgcagctaaaaaagaaaagtagatttaagagtttgtattttttattacccagaataatttacattgtatttgttcagtaaaaataggagttttcatgctgttscaattttgttaatttatttttaaactttcagttrtgaatgaakgaatraactgacaaaatgatttttgttcaatgtatcaggatatgttctagtttctaactatactattgaaggaagaataccttttatcttgatgtctttttctacttcttcagactgttggatataataacattttgggtctttaaaaactcattgttttctagccattgagttgtctctcaaggaacaaaggcagcagtcaaccaccctttccactttgtatccaagcacatccagtctcttaactaaccaccaacatgaaggccgaaaagttcgtgctatatatgactttgaagctgctgaagacaatgaacttacttttaaagctggagaaattattacagttcttgatgacaggtaatgttaatattacatttaaaatttgtatgaaagtgtgtatggcttctgtgtttcatattattcctgttgattgcagttaccaaatacaataataaatattgacccagatgctgctctrtatgacagttggctgatttgcttgtgttatactgggtggattcttattttgttgtttaatttttttcttatttattacttagtttataatttgttttggaggcctagtttaatctattcattttcggttccacctaataatatagatggttacattatttaaaaggttacagttttagaaaaacactgagtatgtatatgtacttaatgcaatttgtaagaaatatataatctattgagttttttttacacagaacagtatagccatagggaacaaatttattttgtatggaattacacatttattcaggaggtgatacagtgcatcagtttatttttttactatagctttgtgatgttttacttgaaaatgaattgttactgatgcttgttactgataatgaagtattaaaatttgcaggtgttttttaaaaatcagttcaaattgatttaaagttcttcctgtagtgtctctcttacttactgccttagtccatttgggctgccrtaacaaactaccgtagactaactggtttataaacaacaggaatttatttctcacagacagattgactgtgtgttgaaggcccactttctggtttgtagaaggctgtcattttgctgtgtcctcccatggcagcaggggcaaatgagccctctggggtctcttttataaggtcgctaatctcattcatgacttaatcgctttccaaagtccccaccttctgataccattgctttgggkgttaggatttcaacctgtgaattttgggaagacacaaacattcagacatattttaacatttttttttttttgagtggaagaaaataaagtttgagctggttagctggaaattgcccaaaaccttacgtctgttctttcaaaaacatgtattgagtgcttgctagctttccatatactagagtttacacctaggagtgtactctttgcgaatgttttgcactgtgaacagtgtcatctttgacattcgttctgttgggagaaaaaaaaaaccttgctgctgtgtaccagaaagagcaatgatttaggaatggagactgaaaataagagcctgtctttatagctcattacaaagacttcttactctggagcctgtgaaccrtctgaagctgacaattttttcgtattggtgcctctttttttgggagagagtccataactgcagagcatgcattggcagtcaagaagataaacaactgtgtgttgaatagcttcttaccttttctgaggcttcttcttctttygtaataaaggaagattcattggctttttcagtgggttattgtgagattcaaattttgtaatagtgtaagttgaatactacaaaagataaagatgtacagaaataaatacatttgttatggtaaagcattgttttttgtttgtcatagtgatcctaactggtggaaaggtgaaacccatcaaggcatagggttatttccttctaattttgtgactgcagatctcactgctgaaccagaaatgagtaagtattttccagcctgccartaaatgatgttttctaatccttttcttaatggaagttgagtaaactgaactttttagagcagtgttgcccaggctggagtgcagtggtgcgagctcggatcattgcaacctccgcctcctgggttcaggtgattctcctgcctcagcctcctgagtagctgggattacaggcacccgccgccatgtccagctgtttttgtgtgtgtatgtatttttagtagagacagggtttcaccatgttggccaggctggtcttgaactcctgacctcaggtgatccacccgcctcagtctcccaaagtggtgggattacaggcgtgagccatcgcacctggcctaacttttctttttcatatgtatctatgtagaggtcattgtaaaaatgcaaattcattaagaagtcttacagaatttatacattatatatttttcttaccagttgattacagtgtgacaagtacagtataacctcagggaggatttttcttgttcaaaggttgggaccgtttctctagtgtgtagtcccagacttgaaagcagtgttctccaagcaacatgtcagatattcagaaggagccatttttactaatcatataaaagttttttgtttgatttacaaaccctgctgagtaggataataaactagaaagtggggccgtggagaaaaagtgatactagtggcaggcttaacagtttcaggagacatagctacatagtcggtcaaagtagtgagagacagtttactatatttctacataatattgtgctttaatgaatcttcataatgatgagtttagtcatcaagcaaagtttaagtcataatctcccctctaggaaaacagaaaaatatgttcaaatctagaaagatttgtatttgtaataaaatatttaaaatttttaaagagcttatatrtataggttgatatgctacagttatttggcaaaatatctcattatcgttttttaatgctagatagaagggatcaaagaaaattacaaaccacaagatgcttaggtgttttttagtttataagaattttaagaaaaaaaatctttgtcctggtcatctttttatttccagcagctcctaatagtgagtcttataatacatactacatatttatagaataaatgatacagaaatatatatgttaacaataaagagatacttcacttctctttcaagagaaggcttgaacagcaaaccagaaattacagatctttaagaaaatggtgcgctctcatagttattgccagggtgtctggtgtcatttttatagagacagattggtgagacccagtctttcaatgatgttttctatgtctgtgagaattcaaaaacatgtcaaccttgtttaaatggcattgcgtagtgtgctgactttttaataacctgggctggtaatgatgttttgtttgtttttggactatttttttgtcctgaatcagttcctggagaggatagaattgcttggagttctgttcaagataaggtcaaggatctcatgtagatcctggagccatttcatctttttttttttttaagtcatatagcaatgcagcttcaatatgagttttctagtttttctcatgtttttcactctggacratctaaaagagaaactgaagcatcagagcctatgtagtggggttgtagttctcaagcgtggagaacaggtgcaggtgctagcatgatccccagagcatcattcttttgaggaaatagaagtctatttcacttagcctgtcaaagagaaatagctgccctatttagcttgcttttggtttggagatacagtaaaatattgtgaaatccctttgttatatattgtatataaataatatatttttttacacacacatagtattagttcctgtgagaaaaggggttgcaaacttgcgygtcaagagctgttagaatatgaagtctgccatgtttttcttatgggtaatggccaatgcagtgctatcccagctttctacttgtaatagctcaagatataaaaagcaaaatgtctgcagcagatgtttcttttcctttataggaaaatgaatcagctgtagaattttgcttttggtgacttgaatggaatgattatatttcttaggttggaaattaagctatttctgtgttatacagaagcacacaacacggagtacccaagtgattggacttcatgttctcggggtaaaatcactggcacaggccagatttcagtagtatgggctagtagagcaagatagattggcattcaaatccaggctttgtcatttattagctttctcttttacaaaastttttaatctttccaaactaccttatttataaaaagggcatatctcataagattgggagattcattggaggaaatgtaatattccatcaagcatattcaatagtttaataaacattatttcccttccttaaattgccccctcctgtcttcctttccatcatgattcttaatatttttatgaattgattgaccacattgatgcaaggattaaaaatatagaaagraagtttgtttagtagagttgtatatgcctttcagtagtatttggaggttgttatatagctactgttatgttaaatygtttttaaagattgctttggtgagtaggagaaatctgtgcttctggccaatgaattgttgatccctcaatgaccactttttaatgtcaaatgataatattatataactagaaaatacaggctgatttgttggaagactgagacccctgtcaaggccacctgcaaagttctccactggcatggayggcgctctctaaacgcctrcgtggcacgccagataatacatagctgattttcccattcattacattggagtagtgtggattttctgtcaaaccagattttttttttctaccaaatgagattttttcttgaaggattagtaatttaaaaagagggtttattttaaattgcagaattcacttaggccattgtaaaactttgcttttgtcctccagcttactaaactctgatgtgtagtaggtgattaaccttttttcagaaatacaactcttattattagtgaaatctctttttatggaaactgtaaaatgtttacaagagaaaattaagaaatccaatttcataaagtaatgttgtgttattactgccaaaatctgcaactcagttatttcttaaattgcgccttttagcttgctgggagtataagaaaaatccccaaatctctcttggaagttaaagtgctttaaagtagaattttaaatgtattattaaaaaaagataacttttacatatcttacagttaaaacagagaagaagacggtacaatttagtgatgatgttcaggtagagacaatagaaccagagccggaaccagcctttattgatgaagtaagtggtttccatggtgataggagttggtactttgtattgaaatttaaatggttttgctttaagaaaaaattgattacttgagtttttttgttgtaaaaatttttgtatttttttataaaaattcaagcaatatagacgatgcagactgttttttgaaacttcctctccagtcctttgtttgccgtgccagagcctcattattttaaattcctgctgaatattctgtagagtggccttaccatgatttatttaatctattgttgaatgcctaggttgtttacagtttttacagtgtagtagtgagattttttttttttttgaacatctatctttgtgtttctttagggtagatattcaggagtgaaactattgagttgaaggatttgtgtattttccatgttaatagataatgtcaaattgttgagcaaaacaagtttttacactcgtattcatatcatgcgagaactcctgtttcccagcatactcamcaaggatattaagattgtttgcacatgactgaggaagggacactcattgactatctattgaaacaaataaattactgttgtaaaaataaaattgtcattaaattacttctacataaatcattgcataaaagcagtgctaatatattgaatatcattggagatgattcatgattcctccttgtgttgaacactttctagtatttgaggaaaagcttacgctaattttatattaaatgtcttcatatgtcattgtcacacctgaaacaatgtatatttttagtaattatgctcaaaaatataatatcaacttggtgacacaccatactttttggagccacataatggtacccaaattggtattattgggatttaaatttgagatttcttgaattaagttaatcactcctatttagttaagttttatagaaatatctgctgttactgcatataaagaaaakattaaaactggctacctttttcatctttaagcgtgtttatgaaaaaataaaaagtatgtttgtggttgtctttttctactcaaacttattaccatgttttaaaaataacattaacaactgttgagttaataatacattaaattatgcaactagcaaaccattaaggatttttgaagtgtcacattgtatagatcaggagttggcaaactcttaggccaaatttagcctgttgcctgtttattggaacacagataaatttgtttatatattgtttggctgcttttgtgctgcagtggaagaattgagtagtagcaacagagatcatatggcctgcaaagcctgaaatatttactggcgggccattacagaaaaagtttgcttggcccttggtatggataatttaaagagaatcttttccgatcctcagttaccatagcattctttcctaaaattgatctgcccgagaacattctctcctaccattttcgtttttacccccctcctctcccttttcaattcttctctccaactttacggaagaaaggcttaccgcttgcccgtagtgaagattactgtggtacattgcctcagagtataagaattaccagggatgatttcatatactggttttgstattaagaaagtcatggctctaatgactagttaacacagctgagatggttccatattttttgtttttaaaaaataggaccaaaatgaattttcagctagtagatcattaaaaataatttttaatgacagaccactgtcattccattccatctttcagaagataccgaaagaacttaatgaaattgctataatagcttgattatatgaacaaaatttctcctcactttcaactataaaaacaaaaaataggaatagaactggtgctgaatcctggctcattttacttttcaaaacttgaaatatagttaatgttgttttgaccctttgcatattaataataataatcattaccttatacmtatgaatgaatctaatactgagagtattatcagtttacatacttttagtgcaaagaaatcccatatggtcatcggtagaaaactttcaagtatattaggataaaattttggaggggaaattgagtagaaatatgataagttcaaggaaaaaaacaatttgaaatacatgacagagactgttgtttgaatggtaatggtgagtgcagattgctgtggtgtttaaattcctttggctatatttaaaggaatttttgactattttattttaaaatgtcaacacttaatgtcctgggaatcttatcctttgtaacattttaaatgtataagaaatgagatgttatctttgaaatatgtgaaggggtttatgggcttttagcaatcttttatgggaggcagaaacaaaatttgaagagcgaaacagactgtggaagactgtgctaagggcaaggaatccacctgggctaggagaagtgatgtttggctgattgcattatataagaaaatgctggccaggcgcagtggctctcgcctgtaatcccagcacttcgggaggccgaggcgggcagatcacgaggtcaggacattgagaccatcctggccaacatggtgaaaccccgtctctactaaaaatacaaagattcgctggacgtggtggtgtgcgcttgtaatcctagctacttgggaggctgaggcaggagaatcgcttgaatctgggaggcggaaggtcgtagtgagccaagatcatgccactgcactccagcctgggagacagagtaagactccatctcaaaaaaaaaaaaaaaaaaagaaaagaaaagaaaagaaaagaaaatacttgcagaagcagactaatcatctatgtagaaaccctacttctttgacactaaataattttaaatattgtrtagtattctgtaagcaaacaaaacggaaaccatctgtgtgttaatggactctcactttcatttgacctttttttgtgtgtggtaggcaaactttcttgacatgtgcttttgttttttaagactgcttaaaatgaaaattgtgaataatttacattgaaaattggtatccatttcaaaaaaacagaattattttgacttgggaagagttttttttttttttagcatacttatgtcactttcactctctgatgattaattcgtttctcaagctattttccttttacacagaacatagtttttaaattttaaataattactttgcttaggattagtagtctttatttgccctgcgtacctatatatagtagcataaccatgtaaaaaccatgcatggagaaaggtttgtaattattttagtagtggtcatggtaaagtagatctgtttggattttttaaaaaacatwaatamatatatacttatatatcgtatagatgtgtgtatgtaataatggtttcattcattccattggtctgtacaacaaaagattctgaaatagatctgtgtcactggtttgaggtaccttccagcctctcccaaataggaaaatagagaaaccactagtcttcctccttccttttatgaccaactgaaacactggtagaaagaaaatgtggaataaaccctaagagtcccacttagaagagcagctgtgatacagctgagctctgccttactgaaacagctgctgtattcaccatgggcaagtaggaatgacaagttgttagtcataagcaatgccatcttgagatggatagtacacttgttggcatggctaagctaaagctgctccgaaacaaagcaaaatcctctrgcatgacataagaggtggaagaactcacgcattgtaagtttaaatgtggcttgatttcttctcgcttaagagaatctctgttagcagttggttggttggtttatttatttatttaaacagggtcttgcactgttgtccagactgaagtgcagtggcgagatcatagctcactgcagccttgacctcctgggctcaagtgattctcccacctcagcctcctgagcagtttcaaaaatatataggaagtactttcaaggctctgacttcatgcagtactagagagaataaatacatgggacactgamaacataaaagcaaaattggagtctccataactatgaatttcaaaagtttgtctagttgataataaagtgaaaacataaagttgcctaaaggttggtagctttttatattaactacttaattcctgtaggataaaatggaccagttgctacagatgctgcaaagtacagaccccagtgatgatcagccagacctaccagagctgcttcatcttgaaggtaaaacttttctatttaccttgcaaataaagagtagttagaggttaataactggtgtcctgttaaagaatgggttttgaggataatattaaamatggaacatttctcacttctccttgacccaggctcactctcatatgcagttgaaaccttgggtagaatttgaattcttataattttctatccaaacgaagtgttctgttcaacattttagaacctggtaaaatgaaaaayggcactttaagattttyagattaatattttagattaagttgtcaccattatactttaagaaaatcaattttgggttctgtagactaaggttaaagaatgtatatttttattactccaaattaaatcttttattccttaaattatacaaatatctatcaaaggttcacatttttttttcttgtactttcttatatttcttcacatcttgtcattttagcaatgtgtcaccagatgggacctctcattgatgaaaagctggaagatattgataggtaaaagaacatgggtgcatttatgttgtgtaccttctttcctgaagctatcactgtactgcaaagtgggctataactgccttttaaaaaaaaaatattgtggaggaaccaactctcattcacatatcttgtgctagatgtggagaattagactcatttgtccttttttttaaagtgaggatttgatcgacctttgcaatatagtcaaaaggaccagcgtagataggtcgttttaaaaacaagggctagctatgtaattctctttgctgaagtggcattaccagagctcacaaatgacccatatgttagtaactagggaaaccaagatatttctggtacagtcaggtacgataagacggagttcccttagcacagcacgtaaaccttaaacagtttgggttgcttcagggctaaaatgcaggatatttttgttataagtgaaatttttaataatgtctactagtactactttttgcyatttttgatattttgatgtatcattatttagagcattatatcattttagtaacagctatgcttcaaattattgtgtcatgtttcagaaaacattcagaactctcagaacttaatgtgaaagtgatggaggccctttccttatataccaagttaatgaacgaagatccgatgtattccatgtatgcaaagttacagaatcagccatattatatgcagtcatctggtgtttctggttctcaggtaagcttttagaagcccatgttgttttaaattctcaaatgcacagtgaggtgtggtagctcatgcctgtaatctcagcaatttgggaggccaaggcaagaggattgcttgagaccaggagtttaagaccagcctgggtaacatagtgagactctgtctctaccaaaaaaaaaaaaaaaaattagccaggctggggcatgttccttggtccctgctctcgaaaagctgaggtgggaggatagcttgagcccagaaggtcgaggctgcagtgagccgtgttcacaccactgcagtctagcctgggcaacagcgacaccctgtctctaaaataaataaataaataaataaattctcaaatgcatttgagattatttggaatagctgtttgaaactttctaaaactaatgtttaaaattaaaataaagtttaacrgaatttttttacttggcagttacagcatataatatactaattatgctaatagttttttgttgttgttgttgtttaaaggaaatagcttttatacagggttatgcagcagaatcagccatcacacttttgaaaaaaattacagatatatccatcccactccagacctattgaatcagaatcctcagggttgaggccctttttttttttttttttttttttttttgaggcggagtctcactccgtggcccaggctggagtgcagtgctgcaatctcagctcactgcaagctccgccttccgggttctcgccattctcctgcctcagcctcctgagtagctgggactacaggcgcccgtcaccacgccaggctaatttttttgtatttttagtagagacggggtttcgccgtgttagccaggttggccttgatctcctgacctcgtgatccacccgcctcggcctcccaaagtgctgggattccaggtgtgagccatcgcgcccggccgaggcccatatttttaaagcttcgtatgtaattatttacttaagaaccttagttcttcatcaggttgtgtacactcaatatgtatagccttttgcaggtcagacatatctcaataaagtagtttcgtaaaaaacacaaaatgcttttagagctaagaaaactctcttaaatatctaatgaacttctagttatccttaaaaggaaaacttaaatgcagtgaaaaaaaaatgaggtaaaaacctgtttttattattacaaaccaacaaaatatatttccataatttaaaaactgctttaatctggaattttccctgctttacatgagaatgcatgcaatgcagtgtagagccgtttgctttcttttcaccccaagcaactatttcaaggacccccttttcacaaactcatcacggtgaggtgaggttatagggaataactagccagatactggccgggtgcggtggctcatacctgtaatcccagcacgttgggaggcygaggcgggtggatcacgaggtcaggagatggagaccatcctggctaacatggtgaaaccctgtctctgctcaaaatacaaaaaatttagcctggcgtggtggtgggtgcctatagtcccagctacttgggaggctgaggcaggagaatggcatgaacccgggaggcggaggttgcagtgagccgagatcgtgccattgcactccagcctgggcgacagagcaagactccacctcaaaaaataataataataataataataaataaaaacaaaactagccagatactccattttttccatgtaaagtgggcacggactgtgttcagattaacgtttagcagaatgaggggccagcaccctgtagatgaacagctaggcccaagaaacttggggctagagggcacctgctttagagtcttgatcaccagtttgagacaaggaagcaaaaaaccttcatgttcaattttcgaagaatgacaaaataaagttaggaggactggtatagctgtgtttataatgaagaccctttggatccctgtgtgggtctgtcgtttaacagaagtgctaaatggaaggatctaatgaatactgcagaaaattaggacattatgtgttttagactttgggtagttaagacttcaatctctttagattaaaaaaatgcattttgaaatacagaagtagacaaatccagcctgttgcctgttttttttttttttaataaacttttttttgagacggagtcttgctttgtcgcccaggctggagtgcagtggcgcgatctcagctcgctgccagctccgcctcctgggttcaggccattctcctgcctcagcctcccgagtagctgggactgcaggcgcccgccaccacgcctggctaattttttgtatttttagtagagacggggtttcactgtgttagccaggatggtctcgatctcctgacctcgtgatctgcctgcctcggcctcccaaagtgctgggattacaggcatgagccaccatgcctggcggctttaaataaacttttatcagaacacagccactctgatttactgacagagccgagtagttgtgtcagagactacatggtccacaaaacttaaaatatttacgtcaggccctttacaaaaaagtttgctgacccctgctttagaaagttagcttgctctattgttcaataaactgcagtttaggaaatgtgacttgtatccattgcagtctatggctacaaaacaatgagttcaaatacactttctaaatatcctttgggattccttaaaaaataccaacatgcagaatattaaaatatatttaatgtaaagggagattagtataaagtttcaggataagtttctttaatgcttcagtatggagataacatgagtttagcatatgtttaactaaaaatgaaaaccatcaacagcctatttcattgaaaagcgtttttcaaaatgccygttgacagaaataactttgaaaaaaggattccagagtggtgatttttcttgtttttgtaactgaatacctctacagagaaagttcagtatgcttattaaaattttagaattgaatatgatttctctttaaccatcgcaggtgtatgcagggcctcctccaagtggtgcctacctggttgcagggaacgcgcagatgagccacctccagagctacagtcttcccccggagcagctgtcttctctcagccaggcagtggtcccaccatccgcaaacccagcccttcctagtcagcagactcaggccgcttacccaaagtaattttactgttgatkcttgtttggagttagtgctgttacagctgtttawgtgcccccagttatctataactataaaatctggctaataaatayctgtggtyagcgtcatgcggccgccccatttgtgctaatgagtggtggagcctctgtggtattccagtaccagccagcaagctggtcctctgctcccgactcgctcaactcatgtaatctggtttcagccttatatttttaatactactctaaccataagtttttattgttgtttttatttgcatctatgatatttgataatgtctttaatgaaatttatgtttagtgactataatttgtcatttttccacacattttgtataaaatctaaattccgttattttaaaatatatagttctgagctgtctctttaagacaaatattttcttatttttgccctgttttggaatttagtttatattatatcaaggtaccccatttgaaacaagaagataataagaaggtaagcacccttgtttctcaggaggcagatggctgaatatgtgatgacagaggcccatttactttgccatttacttacagtgctgtctgtcatgtagttaaatgattattgtgtgttttttctgctttaatgggactctgagctgaaatcttttccttgaagcaaataaaggataggcttttaagagtttaccaacgtgtattctagaagttacgacattctagctggcaacagaagtttctaggtagcacaggcacaacttctagaaacctttccagcagtgttaggattgcccaggaatgctcctgcactgccctctcttgcactactcatcctcaaagagttacrtgttagagatgcttggggattttcaagcattattcggttgtcagatctagtatcccgaagtgaccttaagggggatgatggcaaggcccacatgtcagaaaacagggcattccctagtgggttctgtatcttagaaaaaagtgttaagtgtagcttgcactcttgcaggatttttttttaagttgaaatctggtggaaatgaatacccttctggaaaataaacagctgttcttagagtagcatgttgctttacaactagatacaaaggggctagaaggtaggaattgttgagaagacactagggttcctgacttaataggaccctgcagctattttagtattagccggaactgccacttttcccctgctagtcctctgtttgactatgtcacatgctgctctaccttccttgttactagagattacttgagactcattcttcaaggtcggggccttgggaaattatccttgtgaatgagataacctgttggtaggtgctttaacagtgaagttctgtagcgctgtggtaccctgctgctgttctctgtgtgtgactctgcttctgcattcgggatgtgaaatccctggcataggcccaaccctacccatagagtgtagctattaatgtcacctctcaaggaacacatgtttatttcaacaggtgtcttttgaagaacattttcttgaaatatttagccctctcgtcctggctcattcctgcatattctttagttgttagcttagctgcatttttactgggacatcttccttgcttttccacctctcagcactgttcctcctgtgtgctgtcagaggactgtgtgtgtacttccgtttcctggctggtagttgcctttttacttgtttgtatccccactgaagacagtatcttgagagctggcactgtctttcacctctatagccatcctatgtagcacacagttttacactggctaggaactcagtaaatattttatgaatacatgttttagtgttaatgacaatttcaagtgctatattagaccagttaggtgtattttttaaaaattccttgcaaaggcttcacaaaggcttagaggccatttaaatatctatatataaaggtacaatatgtaatatctgtttatcaatatataaaaacagatgtgtgtttgtgtgtttcaacggggaaatgaggaattgctggtagagcaaatgtaggatgaggaaattggaaggagcgagggccagggttagaaatttccttactagaggtgtcctgcgtatttgactcgagctttctagcggcaaatcaaggtcagtgaggattgttgttgtttttggtaggcaggttttttagcactcctcagtttatatatatstgagaggctatctcttgttacataaaattttggtgttaaagctcactgtttttcagacttctgtcatcctaggacagtcttattgttagttggggaaggtgtcactgatgacggttttctaaagctacctgtagcgatggtagtattataaggtgataataagtgacaattactgttagtattttgagaccactgaagcttatgtatttatttgtctctgattttagtttactacagtcagcatgtgccaggcactgtgttagacacctgagagtcttctttagcttcaaggtgcttactgagtagtaggggcaaacacataaaaaaatataattttatacaacatgatttataaataaagaagatatatgccttgtaccttaggagcctcagggtttgaggaagttttccaagagggttattcttagccagtagaaaaaaagtgaggaagatgttctgtcacgtcagagatgtggtagcctggaatggcatggtacccatggagtgagcaaagatgggaggtgtgaaaggcgtggtatgtatcggcattccagcagcacacttaccaagggttgaaagcgtgtaggggagcagcgagagacatacttgaagacactgccaaggtcgaagaatgcttgttctagataccatcttagggataatgaaaaagttcagaaagggctttaaatggcagtagcgtagatggattcataggggcaagattagaagctgggagaccatggatattaggcaagaaattatgagtatttgttggcaagatacagtgctattaattggaaagagttatttaggagattagcaaataattacacattgggtgacatggttgggagacagctcagtgcagagataagagaaagaagtattggtgaattgcatggttttgccccaggcaactgggtggacggtggaactgtaaattgagaatgattacaataatgctaacatttaaggggtatttagtatgttmcaagcactgtgctgtatgctttacacaaagtaacttattcctcataataacctgtgaagtcggtaaactattacccccattttatagatggggaagctgagacctggagacaaaacggaagtcccacttagctaagattctaaaccagacattctgactccagaacccagcgcatagactctatattacggcaatattatagcccataccattgtcaataatagtatgaaatttgacatctcctaatcaactttatatctcacacatatggagtgatgacaaataatgccttaggtcaccacattagttggagaaatgtagcattaaattaccgtctcttataataaattaccatcaaataatgaatttgtgccaagtacaagagcaytgaatttcccaacaatagatttataaataacaattggaggaaagtttagaagtaggcagtattttgaaaatttggcagttgctttttatattgcttgttttacatttttaatacaaatgtagggggaattctcagcatcttagtacttctcttcacatagctaacctagtgtcttacagtggaaacgcatgtattccgttggaaacaggaagacaggaagtagaggcagtggataaagacaaccctttgaagaatttttttctttctttttttartgggagcagtgcacaagtgcagggacttgagatgggagtactggcagcggagcggtgggagcggtagggaagctcagtacgtgaggggtgcagctgcagagagttgatcagtgtggtgttggagcgtgtgcttccgtattttcaaggaaataaaagaaatgaggttatgaggccttcccttccactagtcctttgggaccgttcttgtcaagaaccctggtgatgcccatactgctagactcccggtcagttcaccattctcctcctcctccatttgacagttcgtgattccctcctcttttctgaaatgctttcttcacttgctggtgaccattctcttttcccttctgcctcaccgccacttcttctcagcctcatttgcctcttgcctctttatcttctggacttcaaggtccagtgcacagtagatggactgcctttttctctgtttgcagccgctccccaggggacctcatgaagcccggtgattctgaatgccgtggatctgccgaggattcccagatgcgtatttctcctccgtacttccccacaggacagcaggcttgaatagctgattgcctatgcaggacaacaggcttgaatagctgactgcctatgcattctctttgcttgccagttttttggacatcaaacttgacagatccaagattattactttgatcttccccacacccctcccacccccgagtctactatggtcccatcatagtattctgaaaatcagtgaatggccactctaccagttatttctaccagtttttaggttctaaacctcaggcattctggactcttctgttcattatcatattttgaaggcattatcttcaaaatctatctagactctgaccctttctcccatctccaccattactgccgtggctcttctgctggtcggctctctcctggtggatcgtaataacctgcagtcagctatcctggtccagagggagcccgttaaaccctgtggaatcttatcacgcttctgctcagaacgagccagtgtctttctgtctcactcagagtgtaagctacagtccttattgtggccatcaggtgctgtgtgttctccagccccctccccaccaccgcagtcctgccggtgatcttagctgctctcccctcggcaccccctgcggccccctctgccgcagcactcgtggcctgctgttccttgaacatgcttggtgttttctctcctcaaaggcttctttctgtttacctgaaatgtactttcctagggaatctatctggctcactcgcttactttttccacatctttgcttaagtattgccttattggagaggcaccctaccataaactagaatcccttgccccagctgctctttgtcctccgtattgggctttgtttttgttcttaccagttagaaccacttgacacacgatacatgtgtttgttacccttttctaccactagaacagacgctccatggtggtatagacttatttccgcaaaccaccccccccaactttttttacacaatggttaaataacacacatatttttaatgcaatgcctgatatcacaaagcctaaaataacaatgtttggcacattatagctgtttagtaaaaggttattaaatgaattgactatatgaatgaatgcttagtaaatagcttttccatttatctgtagttgctctataaatcagtattgatgtaattgagtgtttttcttcctccacagtacaatggtcagttccgttcaaggaaacacatatcccagccaggcgccagtatayagtcctcctcctgccgctactgctgctgctgcaactgccgatgtcactctgtaccagaatgcaggacctaatatgccccaggtgccaaactataacttaacatcatcaactctgcctcagcccggaggcagccaacagccacctcagccacagcaaccatattctcagaaggctctgctataggacccggtgttcctcttggtggcagatacctgctaaatgccactgacaaygttatgagattcattactatcttaagatgtgtttatcctcagcttataggaatctctccaggtcaacaggttcaaatattcaagaaggtagaactctcctcaatttacactgactttttagaggttcttccccccccgcccctgcagaggaatgaaactacttacaacatttaattcctttcataatatgaaagaattgatacaaggctatttgtctcgtaaacctggtctgcagaaagtcaaacttacaaaaactgttgtgacaaatgttatgtacatatawtgatatgtaactgcattagtggccattttgaatcacagtggtgatcgtgtgaatatatttaacactgtgttaaattaatttacgttgctattttattttaatcataaacaactaccatgtttcttaatgttttgtgtaaatttaaggtaattatactatccttttaaacttcaagaaaacaaarttgttagcgtatttacatgaaggcgcattatgttgtcgtgtgtttcagtttcacattaaactgaaccttttactaattgtgagctaaagagrtatatatatatatgtgtgtgtatatatatatatctacatgtctttctgtagcctctgcatactactggctgtcatcacaccagcgtacagtagctaaatttttggtgcaattatagcaaatgataatgttcccttttgaacttttacattttggcatgacatttcagagtattgtgggaccatgagacaaaattaagtacgatcacattctttatttctcattttaaagaaatgatgttggtttaccttttcctagttgaagatagtaattaggtttctaagctgtatactgtgtttattggtggcagtgacaccaaagatagaggcaatggatagaaatttttaaactggaaagaaaacctgaattacactacattttcgaagtctcttgtaattatttgggatatcaacaaaatttgattcgtctgtctaatcccttgctagtattttaaatatgtctttaacacattgtatcctttaattcttcattaaaatggaaataagtagatgtttcaaagtaatctacattcctggctttgcttaacgtttatataggtattgttttctttcamactggatttttgggttgctctttctggccttttaaaattctaatggaattattttggcttcttacttgggaatattttcaaatgaatgcttttcttttaattcatgcgaaaaatgttttccactgacattgtaatcttaaatatttacgatttccctggttgggctatactattattttagcactatttaaacaacggaaaagttgagtcgaacatcatatttaatgaattgatgtaacaggtttcatactataaatgaaaatttcatttttattttctaagactgttgtaatcaggtagcttgtttattttctttttgagagaagattaaatctttagccagtaatcttaagggtgactaatttcacagactcagatttaaagcaccgtagttttaaatctgagcctgtgaaattagtcacctgtaagattacttaagggtaacttaagtgtttcgctcaagtgttgtgttctgatttcctgtgtttaaaatatgttgccctgccctgaagtcaaatttcacattttaaatactataagttagtttttgataaatatctgtcggattataatcttttccactccaatttgagtattatggtttaactgatatacttttctgcaatttttctttgtcttttgataaattcctgtttaccaatgttaaatgtatcattttcccattttaattttgatatctttcatgctgaaaatcaatgacatagtctctactatgatttttgccctataaaagtcaagtaacagtgaatagaaaaaactacccttattacaacccatatacatttttctttaccttttacattactagccttataaaggtttaaatgatgagtactttaaaactgttactgtgttagtttatgccttcccattattaaaaatgaaaataccagggggaaaaaatccaatgaaagtgaagcactggcttgtctttcaaatgacaagacgagggtagaaataggagggggccagttaggatcatgaatgactttaagttctgaaacctgcaggtcttgcactttcaagaaatctttcattaatagctgtccttattttgaaggaatagaataatttataaaatgaactagctgtaacataggctggacgcagtgggtcacacctgtaatcccagcactttgggaggccgtggcgggcggatcatttgaggtcaggagttcgagaccagtctgaccaacatggtgaaaccccgtctttacaaaactacaaaaattagctgggcgtggtggcaggcacctggtaatcccagctactcaggaggctgaggcgagagaattgcttgaacctgggagacggaggttgcagtgagacgagatcacgccactgcattccagcctgggagacagagtgagaaataaataactgtaatgtaaactgctgtgaagcaaattctatttctctttttttaaaaaataaaatttgagattggttttccgtaaaatagtgacacgtaaatggaaaaaatctaatccagttacgaactagcatatatagccaacaggcccatggcctgtgatgttataccagtgccctgaacctgtaagaggatttctaatgcatacctaatgtgactttacagcctcttctaactccgtctttctccttcactgttacctatcttccctatgcagcgagggaactttttatgtgcctaagattccttttttcatgtacttctggtgctttgtttctatacctcatagtttttgtatttaaaatgcttaatagaccagtgtcttttttctctgatacatacagctttcctatgcgatatgtataattcagtttgaagacatgttttttccgaagcttcaagttgatgtgagacaaattagcaccctacacgataaactatgcaactataaaaattatggaaattgcccatgcctgtgtcctgaatggtaatgcctaggttttcttctaaggttcttatggttttaggtctaacgtttaagtctttaatccatcttgaattaatttttgtataaggtataaggaagggatccagtttcagctttctacatatggctagccagttttcccggcaccatttattaaatagggaatcctttccccattgcttgtttttctcaggtttgtcaaagatcagatagttgtagatatgcgacattatttctgggggctctgttctgttccattgatctgtatctctgttttggtaccagtaccatgctgctttggttactgtagccttgtagtatagtttgaagtcaggtagcgtgatgcctccagctttgttcttttggcttagtattgacttggcgatgcgggctcttttttggttccatataaactttaaagtagttttttccaattctgtgaagaaagtcattggtagcttgatggggatggcattgaatctataaattaccttgggcagtatggccattttcacgatattgattcttcctacccatgagcttggaatgttcttccatttctttgtatcctcttttatttccttgagcagtggtttgtagttctccttgaagaggtccttcacatcccttgtaagttggattcctaggtattttattctctttgaagcaattgtgaatgggagttcactcatgatttggctctccgtttgtctgttattggtgtataagaatgcttgtaatttttgtacactgattttgtatcctgagactttgctgaagttgcttatcagcttaaggagattttgggctgagacaatggggttttctagatatacaatcatgccatctgcaaacagggacaatttgacttcttcttttcctaattgaataccctttatttccttctcctgcctaattgctctggccagaacttccaacactatgttgaataggagtgatgagagagggcatccctgtcttgtgcctgttttcaaagggaatgcttccagtttttgcccattcagtatgatattagctgtgggtttgtcatagatagctcttattattttgagatacttcccatcgatacctaatttattgagagtttttagcatgaagggttgttgaattttgtcaaaggccttttctgcatctattgagataatcatgtggtttttgtctttggttctgtttatatgctggattacatttattgatttgcatatattgaaccagccttgcatcccagggatgaagcccacttgatcatggtggataagctttttgatgtgctgccggattcggtttgccagtattttattgaggatttttgcattaatgttcatcaaggatattggtctaaaattctctttttttggttgtgtctctgccagtctttggtatcaggatgatgctggcctcataaaatgagttagggaggatttcctctttttctattgattggagtagtttcagaaggaatggtaccagtttctccttgtacctcgggtagaattcggctgtgaatccatctggtcctggactctttttggttggtaagctattgattattgccagaatttcagagcctgttactggtttattcagagattcaacttcttcctggtttagtcttgggagggtgtatgtgttgaggaatttatccatttcttctagattttctagtttatttgcgtagaggtgtttgtagtattctctgatggtagtttgtatttctgtgggatcggtggtgatatcccctttatcattttttattgcatctatttgattcttctctctttccttctttattagtcttgctagtggtctatcaatttggttgatccattcaaaaaaccagctcctagattcattaattttttgaagggttttttgtgtctctatttccttgagttctcctctgattttagttatttcttgccttctgctagcttttgaatgtgtttgctcttgcttttctagttcttttaattgtgatgttagggtgtcaattttggatctttcctgctttctcttgtgggcttttagtgctatcaatttccctctacacactggtttgaatgtgtcccagagattctggtacgttgtgtctttgttctcgttggttccaaagaacatctttatttctgccttcatttcgttatgtacccagtagtcattcaggagcaggttgttcagtttctatgtagttgagcggttttgagtgagtttcttaatcctgagttctagtttgattgcaccgtggtctgagagacagtttgttataatttctgttcttttacatttggcgaggagagctttacttccaagtatgtggtcaattttggaataggtttggtgtggtgctgaaaaaaatgtatattctgttgatttggggtggagggttctgtagatgtctattaggtccgcttggtgcagagctgagttcaattcctggttatccttgttaactttctgtctcgttgatctgtctaatgttgacagtggggtgttaaagtctcccattattaatgtgtgggagtcgaagtctctttgtaggtcactcaggacttgctttatgaatctgggtgctcctgtattgggtgcatatatatttaggatagttagctcttcttgttgaattgatccctttaccattatgtaatggccttctttgtctcttttgatctttgttggttgaaagtctgttttatcagagactaggattgcaacccctgcctttttttgttttccatttgcttggtagatcttcctccatccttttattttgagcctatgtgtgtctctgcacgtgagatgggtttcctgaatacagcacactgatgggtcttgactctttatccaatttgccagtctgtgtcttttaattggagcatttagtccatgtacatttaaagttaatattgttatgtgtgaatttgatcatgtcattatgatgttagctggttattttgctcgttagttgatgcagtttcttcctagcctcgatggtctttacattttggcatgattttgcagcggctggtaccggtttttcctttccatgtttagcgcttccttcaggagctcttttagggcaggcctggtggtgacaaaatctcccagcatttgcttgtctgtacagtattttatttctccttcacttatgaagcttagtttggctggatatgaaattctgggttgaaaattcttttctttaagaatgttgaatattggcccccactctcttctggcttgtagagtttctgctgagagagctgctgttagcctgatgggcttcccctttgtgggtaacccgacctttgtctctggctgcccttaacgttttttccttcatttcaactctggtgaatctgacaattatgtgtcttggagttgctcttctcgaggagtatctttgtggcattctctgtatttcctgaatctgaatgttggcctgccttgctagattggggaagttctcctggataatatcctgcagagtgttttccaacttggttccattctccccgtcactttcaggtacaccaatcagacgtagatttggtcttttcacatagtcccatatttcttggaggctttgttcatttctttttattcttttttctctaaacttcccttctcgcttcatttcattcatttcatcttccatcactgataccctttcttccagttgatcgcatcggctcctgaggcttctgcattcttcacgtagttctcgagccttggctttcagctccatcagctcctttaagcactcctctgtattggttattctagttatacattcatctgaatttttttcatagtttttaacttctttgcctttggtttgaatttcctcctgtagctcggagtagtttgatcgtctgaagccttcttctctcacctcgtcaaagtcattctctatccagctttgttccgttgctggtgaggaactgcgttcctttggaggaggagaggtgctctgctttttagagtttcc

SEQ ID NO: 6819 - DNA, 70780 bp, Homo sapiens
gttattaaaaagagaatgtagtgctgagcatagtgtaatcccagcactttggaaggctgaggtgggtggatcacctgaaattaggagtttaaaaccagcctggccaacatggcgaaatcccgtctctactaaaaaatacaaaaattagcttggcgtggtggcacactcctgtagtcccaactactcgggaggctgaggcaggaggatcccttgaacctgggaggtggaggttgtggtgagctgagatcatgccactgcactccagcctgggcgacatagtgagactctgtctctgactctgtcaaaaaaaaaaaaaaagaaaagaaaagaaaagaaaagaaaaaaatatatactcagggtcaaagaaaacatatgggatttgattactacatagtcagactggaaggcatttgtcaagcccaacaccttaagaaaccagaggaaagggtgctctgccagttctatagtcacacatttatttagcggcagaaacagagtcagaatttgtctcttgaccttgacctctaggctgtgctgcccctctccaaagcccagttttgaagacatagcttggaagggattgtgagaagtcaacatcatgaacagctggatatactctcttccctttcccatattttgcaaaggtcccccaaaggcttcttgaggaggggataaattacggtaaaaaggaatactccttaaaggaagagactgccatagagcttccctgagtcttttccctcatagggtgggagggtctgtgtgtttcaaagaacacttactctgtatgtttctaattcatttgcacttagctcatcaatatgttgtttgtgcaagaaccatttgatgttcaagaaaccctctgggcctcttaaagggctttttaaaaaatttgagccagagaattgaactttgccaagagtaaatggaactcagatatcaaaaggtctgagttcagttttcattgaatacaaagggtgagtagattctgaattgagccaaatgcattctcccacccttaatttacagtacattgttttggcagactctacaatcctgaaagttggcttgtcttctcccattcctttctagggtgcaacctcaagcctatcttttagttaactttacaaaaaataaggccatgttataatgatttatgagagcttcactcattactgttcttgtaactatcaattttattagaacaaactgaaatgtttgaaaaggttaaaactctcctctaaagctataattttgtttgatctcctacagggatttctattttttttagtcctctcatctgggagtttatcaagagatgttgctcctgtttcaataagtggtcaggtcatcaaccaattatcaaattgaatactagagggctactattacttgtagtgcttggatttggagtacaaaacgagttccttggctctgccttccaaggagtaagggccagagaaattattagtactttgagtttcttgttaataaaaaacaatctcaaaaaaatggcaaaattaaaatcagcccaagttctgccacctcaagatatgcactaagattttgtggatcactttccttttattctaaaaaagtacttactctgggtgtaatggctcgtgcctataatcctaacactttgggaggctgaggcgggaggattgcttgagcccaggagtttgagaccaaggctgggcaacatagggagaccctatttctaccaaaggaaaaaaaattagctgggtgtggtggtgtgtgcctatggtcccagctattcagaaggttaaggtgggaggattgcttgagcctgggaggtcgaagctgcagtgagctgtgatcacaccactgcactccagcctgggtgacagaacaagaccctgtctctccctcccaaaaaactctgtatctatatatccgtatcagtatacatagttatggatatgttataaaaatgggatattggccaggcgcagtggctcacgcctgtaatcccagcattttgggaggccgaggtgggcagatcacaaggtcaggagatcgagaccatcctggctaacacggtgaaaccccatctctactacaaatacaaaaaattagccaggtgtggtggcgggagcctgtagtcccagctactcgggaggctgaggcaggagattggtgtgaacccaggaggcggagcttgcagtgagccgagactgtgccactgcactccagcctgagtgacagagcgagactctgtctcaaaaaacaaaaaacaaaaaacaaaaacaaaaaaagggatattatattgttttataatttactttttccctttgttagttcgtgattgtctacattaataaaatgatatctactcatgcataaaattcaatggtacagatggttacttaagtaaagtccagtgggacatctggtttaaggtgttgcaggatgcagcactcaaataacgttttgaggtctgcttctcccctttctatttgctctgtcttctgctgccttggtgccattcacatgttgcacatagaggcagcagttcgagtatatgcatccaggatcttggctggcagaaggaagcaagactctattcccatagcaatatctgatcctatcattgtagcctatgcctgggttacatgatacactcttggaatccaagtgttgcacttggataacatacatagagaatggggaaaggagggaagtagggagaggtgggccccagagggaattggtaggatggttatcagaaggagaatgaatgaatgtcgggtggcccaaaacacaggtccacaatctatacacggacatttggaacttgttttacattggtttcctagggctttcgtaacaaagcaacacaaactgcgtgatttgaaaacaaatttgttgtctcactgttctggagggctggaagtccaagatcaagatacccacagggttagttcactccatgggctgtgagggagaatctgttccatggctctgtcctagctttcggcagtttgttggcagtcctggtgtttgttggcttgtagatgcatcgtcctgatctctgctttcgtgttcacatggtgttcttcctgtgtgcacagtgtgatttctttttctgttttaaataaagacacttcatattggattagggatccttcctactctaatatgactgcattttaattaattacatctgcactgatcctattgccaaataagatcacattcgaaagtactaggggttagagcttcaacatatgaatttttgaggtcacaattcaatccaacatatttctacgcatttaatatttctggctacatctaagacccacccggtctgggtgtgaatgccaaaaccagctgtctccctctttctgctgtgtgggctaggagactggatgaggccacctctagggtcccttccagataacttcgcgattaagtgtcagggctaggaatccatcctgctgtctgaatgtatgttacagtaccaccacttactagctcagggactttgggcaaggggcttaacctctgcaaatttcagtctcctcaaccagtaaaatgaggataagagtccttcacccattggtttgttgtgggttagacacatagccttcaatgaatgtcaggcagtgtgactgttccacttctttgaggatgcaaggactgtagagccaggagaagaacctatataactcctggtgttctcattctctcatggtaattcagtgctataacttctccagaggttctcttgttagaacttcaagagcgaggccgggcacagtgggtcatgcctgtaatcccagcactttggaaggtcgaggccaaggagttcaagaccagcctgaccaacatggtgaaactccgtctctactaaatacaaaaaattagccgggtgtggtggcgcatgcctgtaatcccacctacttaggaggctgaggcaggagaattgcttgaagccgggaggcagaggttgcagtgagctgagattgtgccattgtactccagcctgggcaaaaagagcaaaactccatctcaaaaaacaaacaaacaaaaaaacttcaagaggggaaagggttcctttttttatcttgcaaacaggaactcaaatccagctcagggaatgcaaggtatttctctctctcccctgaagctggatgccgtaaattctgagccaactccttttcttttaggcaatgtgattattaaatacctgtcccccttaagtttcacttatctctctctctcttatctcgttttctcttataacttgatttttcccaccagctttcagatgtgggctggaaccagtattttatttacaatctctctgtttttggcttcataaatttggggaaatgcaacagatgtgtgctgctttcccaggaagcacatctttagttttttcatgctttaactacacagtctaattcggcttgcctaaatgcttattcaataacgactttgagttcttgcaggtagcagaacctagctgatacaggtatattaggccttacaccaaggtcaaagcaggaggaggtgccattcacctttaaaaaaatgtggtcactttcatttagtgccaggtgttgttctaagcaccagggaaataacaatgaacaagagagccaccatccctgcttttgaggagtgcacattctgaaacattcatttctgcagaaaatatataatgagaacttatgacatgttagatattgttcatcattaaacaaaacagaaacaatctgcactgatggttttgttgtgtgcgtgggtggtggcaggagagggggaagaatacagtacacataagtacattaaaagaatcctgttaaaaggtggtaagtgctatggaaaaaatgaagtagggtaaggcggattaggaatattggaatgatttacaaatttaaataggatggtcagggtaggtgatacttgaacgaagacttgaaggaaaatgaggaagggagcctcaatatttgggggatgagcaagtccaaaagccctgggacatgagtgtaccctgctttttcaaggagagccaggaggccatttcagctgaagaagagtgaggaaggtgagaacaggaggaaatgtggctgggggtagatcaaatggagcttttatgctgcgtgaaacgagaaattaatggaaagtgctgagcaaagaagtgacctggtgtcacgcttcaaaggactggtctggcggctttgttcaggctggactgtgcaggtgcgggatggtgaggggatatttggggggctgctgtaaccacacgggtggggtggtacaaccctctgatgcacatcagagggtaggaggtggaggtggtgtgacacggccagattaggggtctattttggaggcagggccaacaagattttgctggcagattagatgtggggtgtgaaagagaagaggcagggaggattcctaaattttgcctcttaagaatagagtagccattgattgagatggcaaagaagactggtggagaacgtttttgctttgcttcggtgcattgggagttccaggagttccgtttggacgttaagtttgaaggggctatttactatccaagcggagcggagagctggattttgaagctctctgggaacatacttttggggacatttctaaagcttgagaccctgttccaaagcctcgaagaccctgtcgaggttcttccggagccggccacgtccctctcttctcagccctcctaaattaagccggaaaatccctgggacagtagcccctttattcggcaaagccctttttcctctttgaggaatgacgacaaaaacgaacaaaaatgaagacactcagcagcactgcgtcctttccccgctcgctgcagggagaggcaatgcggactggtgtggaagggcaggccccgctctgggccgcaggcgctgcggccgcgaaccccaggtccgggagtgtgggcggggcctgcgtgtgggcggggccgcggcgccagcgcccgccacgggcgagggcgtggccgacccggcgctagcccgcccgcccgcccgccggctctcgcgcctccttcgcgccggcccttccgcgggtgatcagctggtctgcgctcccctgacgtgggctggggcacgtcaccgccgaatggcagcctccagaaagccaccgcgagtaaggtgagggcactccgccggcagccggcgtccgggcagcgtgcagccctcgctgcgcggccgcgcgtgttgcacctcggcgggcagggacgcgcgggtgaggagcccggcccgccgcagtctggcgagggccgcgctcgccggagccccggaacaggagccgggggaaggggtccatgaggccgggcgagatccggttcgtttccggagggtcggtgggcacggggcsgcccgagtctggttcctggacgcgtatgcccgcggaactgctgcactcggcctgagggggcggcggccgtcacagttcctggcccgcgggaaggccccgttcttggaggaagttggcccctcttcgtgtccggggaggtgggcgagcctttgccctcgcttctgttacccaggaatctaaacctcaagttacaatctcgacaatactgactcctgcaattcactctactgatctgtcaccgccacaaggatagacggtcgcgggcccctcccyacccaaatggtttcagaggctgtgtaagggaatattttggtataatctccaggaaaatccccccagtagcctgccctgggctctccttgggcataggagggtgagacagataatttcccggcctcaagttaaacatgttttagtttattcccctgccataaccaggatgtacttatcagagcctctgacaaagtgggagacggagagaggtgttcagagttcatggaggccacaggccagactccctggccatccccaaggggtcacccacctgctaaccacttgagacatgaatgcactcactttgcagcatggccaggctttcttgctgaacacagaccatggctcctgcttgtgtttgtgagtaggggggtcccaaacctaccttgacctggatttgccgttgccacagcttgttaagggtgagcagaaaaccagacccaccctgtggaagtatgtgggaggggtggagaacttccatctggaaggagcttcctgtaagtgaagtgctggaaatggagtcaggcaagtggataatgatgagttaggctgtaggcctcaggtggtctttagggggccaaggtgatctgtgctagatttatagactcacagccttttaggagcagaagagtcttttctacaccagctggtagagtcttttttacctcaaaggaaagtccagtgaaaggctgagagaggggaagccattttccacaggcgcctcccctactggtagaatttgagtgccattccttgtaaaagtgagcacttctttcagtttcggtaatggaaactgaactcaaattgatttacctaaaatggggttgagctggcttctagtgtggctgaatccgggagcaccaccaacattggcttcagacttctctttatcatctcttggctctgatttattcagtatccgcttcattctcagggagactttctccttatggcaggttatgacagttctaggctgacagccccagcagagaagttgagccctccttcctaatggagcagaagtccctgatctgatgctcactgggctgccttaattctcatgttcatctgtgaaccaatcattatggccagagggagggattgacctgctttgggtcccagagcctgttaggtgtttggataagactgctttgaaccccttgggctgaaatggagagggtacattctcaaaaggaaaaccaaggttcccatcaaaaggagggatggattctgggtagacaaagacaacrttgcttacttcccaaccttagaacttgttccagtttacccttgtctcatccactaggtgtgattgagcatcttgttccttgttttgccccatgctgaacgctacacatgtgtgattcccatgaactgggggttgcaggggggtgaggtattcagaaccctgccagaatttcttggaaaaagagggagaaggccttttctagtgctaccataaccatcttatacaaagattgaaagtgctctgcatgcttcttgccccttacccactttgtggctcatcatgaagttgagaaggtgtaggtcgaagaagttctgggaagggtaggagcactgagctggatgttgggaggctggaacgctggttctagctctgtcagcagttagctgtgaggccttgagccagtcatttgatctttgtttcttggtttcctggtctagaggagggaattgagttggatagtccctgaggtatattcttctagttcttaatatttaatgataattgtgctttgacagagaacttaagaattttatctgtccaaacaagtgaaaggtggatagatcttggactctgcggagaccaagatacgacaagagcagagcagctgtagtattgagctgcttcgtagctcctgtgatcctgacagaaaggtggaggtgttgatgctcacacagagagtttgagctcacctgtcagacctagtttctggtcttggctttgcrgctactgagttatatggcctatggtaagttatctttgtttttttattctgtaaaatgaatgaataggattaccttaaggtaaccttggctaggcacggtggctcacacctatagtcccagcactttgggaggctgaggtgggaggatcacttgaggccaggagtttgagaccagactgggcaatgtggtgagatcctgtctcttcagaaaattattaaaaaaaaaaaatcaggttggtgtgatggcacatacctgtagtcctaggtccttgggagattgaggcaggagaattgcttgagctyaggagtttgaggctgccataagctaagattgtgccactgcactccagcctgagtgacacagcaagaccctgtctctaaaaaaatgataaccttccacctctgtagtcatgtgtctgaaccagtcattgggatcagttacttaccatcttagaaacttacgtatgaagtaatgggaaattcggtgagaatctgacttgtatccctgtccacaagaaagagatgttataaaatttataatggctttattgagatataattcacttatatacaattcatctgttaaaatgtacaattcaagttattagtatagtcacagagttgtacaactatcatcacaatcattttagaacattttcttcatccccgaaagaaatcctgttacctgtaatcagtcactcctcacctcagcccttggcaaccaccaacactgcatgtctacttcctgtctttaccgatttgcctattctggacattttatgtgaatagaatcatatactatgtggtcttttgtattaggctttttcccttagcatgttttcaaggttcacctatgtcataggtgtgatttctttcttttctttctttttttttttttaaatgagacggagtcttgctctgttgccaggctggagtgcagtggcacgatcttggctcactgcagcctccacctcccgggttcaagtgattctcctgcctcagcctcctgagtagctgggactacaggtgtgcaccaccacacccagctaatttttgtattttcagtagagatggggtttcaccatgttggccaggatggtctctatctcttgacctcatgatctgcccgtctcagcctcccaaagtgctgggattacaggcgtgagctaccgcgcctggcgtgatttccctttattggcaaagaacattccattatatggatagacacttttatttatccatttatcagttgggcatttgagttgttcctacagtttggctgttacaaataatgcagctgtgaatatttgtgtacaactttttataaggatatatattttcaattttcttgattgtgtacctaggaatggttttccaaagccattacaccattttacattctcatcaggaatgtttgagggttctaattttttctataccctcacccgcacttgttactgtcaatcttttttattataaccttcctagtgggtgtgaagtggtatcacattgtggtttcgatttgtgtttccctaatgactaatgatgagcatcttttcatgtacttcttggtcatttgtgtacttttgctggagaaatgtctattcagatccttagcccatttaaaattgggttatatgtctttttattgttgagttataatagttctttatatattctggatactagactcaacagatttacagatgttttctcccattctgtgggttgtcatccattttcttgatggtatcctttgaaacacaaacattttaaattctgatgaagtccagtgtatctcttttttcttttgttgctgtgctttttgatttgtgtctaaagaagtcattgcctaatccaaggtcaggcagacttatggttgcgctataagagttttacagtttagcgcctacgttcatacctgtgatccatttgtgttaatttttttttattttctttctttcttttctttccttcctttccttccttttcgttctttttcttttttctctctctccttccttccttccttccttccttccttccttccttccctccttccttccttccttccttcctcctttcctttctttcctttctttcctttccttcctctccttcctctccttccttcctgtcttcctttctttctttccttttctcttgctctgtcgcccaggctggagtgcagtggcccgatctcagctcactgcaagctccccctcctgggttcacaccattctcctgcctcagccttccgagtagctgggactacatgcgcccgccaccatgcctggctaattttttgtatttttagtagagacagggtttcaccgtgttagccaggatggtctggatctcctgacctcgtgatctgcccacctcggcctcccaaagtgctgggattacaggcgtgagccaccgtgcccggcccatttgtgttaatttttgaatatgatatgaagtgggttaaacttcatttttctttttttgagacagggtctctctgtgtcaccaaggctagactgcagtggggcgatcacagctcactgctgcctcaacctctctggcttaagcgatcctcctgcctcagcctcctaagtagctgggaccacaggtgtgcaccaccaaacctggctcatttttgtaaattttgtagagatgggttttgccatgttgcccaagctagtctcgaaccctgggactcaggcagtctgcctgccttggcctcccaaagtgctgggattacagatgtgagtcattgtgcctgggcttttttgtttttttgtttttttttttgaggcagggtcttgctctgtaacccaagctggagtgcagtggtgctatcatggctcactgcagccttgacctccagggctcaagtgatccaccccacctcagcctccagagtagctgagactacaggtgcacaccaccatgccygactaatttttgtattttttgtagaaacggagttttgccatgttggaaactttattcttttgcatgtggatattcacttgtcccagcaccatttgtggaagagactattccttccccattgaatggttttggcatcctcaaaaatcagttgacagttgtgagggtttatttctggactgttaattctgttttactcatttgtaagtccattcttatgctagcaccacactgtcttgtatttaggtttgaaattgggatggaagagttcttttcaagattttgttctttttcaagattgttttggctattctgggtcccttgcatttccatatgaattttagaatctgcttgtcagtttcaacctccaagctagctagaattttggcagggaatgcattgagtccatagatcaatttgggaattactgccatcttaccaatagtaaaccttccaatccatgaccatggaatagcttttgtttatttaggtcttcttcagttactttcagcagtcttttttagtttttrtggtgtacattttgcacttcttttgttaaatttatttctaactattttttgtttttgatattgtaaatggacttttcttaattttatttttgaattgctcattacaaggatatagaagtcaaattgattttttaaatattgatttttgtatcctgcattcttgatgaactcagttattagttctaattttgtttgtggattctttaggattttctgtattcaagattatgtcaattgcaaatagagatagttttacttcttcttttctaaactggatgccttttgtttcattttcttgcctacttaccctagatagaacttctggtacaatgttgaatagaaatgccaagagtagacatccctgtctactctgccaagagtagacattccctagattatagrggaaagcattcagtctttcagcattaagaatgatgttagctgtaggttttgtaataacttttgtcaggttgaggaatttttcttctagtttgctgagtacttttaacttgaaggggcattggattttgtcgtgctttttctgcgtttgttgagaagaccatgtagattttgttctttattctattgatatggcctgttataataattgatttttcatatattgagccaaccttgtattcctgggataagacccacttggcgatgatgatcctttttatattgttctagattccgtttgctggtattttgttgaggatatttgtatttatattttagaagacatattggggtgtcttacttttttatgaaagaataatatgtttactctcgttaagaacatcccattctgtccagtaaaactaaagtcacagccatatgaaagcaggcctagagtcattggtaaagctgcctggttatctggttcttaccgtgtggtagactgagctaatgtgtccctctctgtctttaccaacatgtaaaaatgcggttaaattataacttaattgagttcatagctgagtaaaattcaaaaccttttctatggccccacagtaggccccctggtgcctcaatgatgttgtctctgaaccacttacctccccatcccctgatacaatcacactgygctgaccttcttgcttttcctcaggtaaactagacatactcctgcctcatggcctttgcacttgctgttgtcctggaacattgttcccctagccgttcacatggcttgcttcctcactctttttaggtctgtgttaaaatgttgtctgttataatagaggctgtccctggctaccccatatgaaataatccttccccttacctccttgatgctttcttccccttgctgtgctttactttttttcacaaaacacgttcttattacttgacgtattgtgtacttgttttgtgtctgttgccttctcttccctgtcttctgcccatccccctgccttgccccatcttaatttgttaaagtcagagatcttgtctgttttgttcactgttgtgtccagaatagggcctggattatggaagatttttcaataaatatttgttgactgaatgaacttgaaagaaagagaaatcctcaagtgccaaaaatgtagagggaacctaacgcctgagtggtatgctagtaacctgagcctgggaaagttaccagatgcagatatagaccttcatgcctggtgtccagggcattagactatccccatatgggaacaagaagtttgtgtgtaaatcttctagctaataaattaatgtgaaagtcttagaagcaaacaataacagaactgcttgtacaaaccaggacccatcacattctcatagataaatagcctctattgaagataagctcttaataaaagatcacaaaacgcagaaggaatgaaccaccaagagggagaggcagcagacctagcaaacatgagggttagtctcccaagatctatttgaaagtatgggagaaattataaaataagggcctacagtaatgaaggcacaaagagaaggcatagaaaccagagtgcaagaataggacaccataaagaaagaacgggcagatgtgaaaaagaaccaaatagaacttgtgtaaggaaaaaacattgaaaataagtcttcttagtctagttaaataggaggtgtgagaatttatgaactagaagctgcaactgagaaggttaacctgccatggggatgttttacacctgcaagttttacatcaaacttttatttattctgccactgataatgggggtgaaagttcttctgactcatgttagagaactgctaagttaagcgatgcctcctctaactgagccttgccacgtttattgtggtcaaagtctgcaacttcctgttctttctctccttaagggtgaatcaccaggattttcaactgagaaatttaagaataattgaacctaasgaggtgacacactcaggagacacaggtgtggaaacaggtaataattttgtctggaaattagatggaacatctgtaaaggattttagatctccaccccaaccccaggttgggtgagaagaagagggtaaggaattagtaacagatcatgactgggggttagtatctggaagttaaaaaccattttattttttggcttcctaagtggttggttactgtttctatatatttaccattttttttttttttttttgagacggagtctcgcccttggtcacccagcctggagtgcaatggcgtgatctcggctcactgcaacctccgtctcccgggttcaagcgattctcctgcctcagcctccggagtagctgggattacaggcgcccgacaccacgcccagctaattttgtatttttagtagagatggggtttctccatgttggccaggctggtcttgaactcccgacctcaggtgatctgcccgccttggcctcccaaagtgctgggattacaggcatgagccactgcgcctggccattaccatttttttttaaggtagtaagttagagaattacaactttttttttgttgtttgtttttttcgttttccatttttgtcagagtggtggtggtggagaaggagataggttattatggaaaatgttctctatttctctaatatagtccttcattatcttagaaattagctttcaattttgatcataagattgcaaaatgagaaaagcttgtaatatattattgtcctttataaattgagtgtgcatttaggaaagtctttttgggaaatatttcttggctgtcccttctccccagaactggttaattgtctgatgggttgccagaaacctgaattctgaaaagtggtgtattactgtatttctatcccagtaagccagtactgctctaacgactactaaggagaaccatgtgttttttttttttttagctgactgaaaaattgatctcttgaagtacataagaaaccatgcccgtctaatctctgtttggaagatcagtgctataattgcatgcaattttagatcctttttctttaaaaaatatagatgtatccaacacattttggaccatattaggaggtagcagaggaaggaggaaaaagagaaagtaaagaaaggaaaaaagtgatggaatcattaaacttagagttggaagataacttctttttctttttgtaatgtatgaggaaatagaggttaggtagcttcagttgcctgaggttgtagatcccagctggaaactggagctcacttgttttgcttctgttggtcttagaacactttaaggctctattatgtcccccagctaatatggtgtaatagagcatggacttgggaattgcatagaccttgagtcccggttcctgatgaaccagctgactttgggcaagtacttaactccttttaactcctgttcctttatgtgtaaaatgagaatagtgaaacctcccttggaggattgttgtgagaattagccactaatrtatgtaaagcccttagcgttccctcagctgtgcaacagagaaacaaaccactacctctaaagctattgatgctggaagagcatctgtgcccgtgttaagatgctgaaattggagtaaactggccccttccattcttataacgagacttgggaattccagctggtgcttcagatccagattcaaatatttcttgagctcctgcagtgtaatagatgctgtgcatggtgctttcacacacattatcatgtttaatttgcctggccaccagtgaggtaagtatggtgtgcttttcatgtacaatcagtgaaaaatcttgtttgtgataaaggctgaaggtgtgggaacttatttctaaaagcagacctgtatatgcaagacttttaagtgagtcattctctgtaaggcatagtttgaaaatacctggcagtgtatgggctaatgtttcatcgtggactaggcctgttgctcttggcttcctactttgctgcatactttgcttagctcttggctgtttctaacatttctgaaaagtcataggatgtggaatgagcagatgtcataatacagcaccttgcaagagcctatctgtcactgaagattcattactgttcattgagactgaaaagatcatagatccaatgttgtgaatttgatttagccatctttgagtgagcatatgtatatgttaattgtagatacatggatacagagatgacatcatccctgccttccggagaagtggtatacacacctgtttacacaatttatcacattgcatttatggttagttgtgtgtctaactctaataacattaaacatttacatgacatttgttatgtgccaggtactgtttctaagtgccatatgtatagtaactcatttactccttatacaaattatgagggtcattagctacaactttcacttcctccatcttggctgccttttcaaccagtgccacctcaatggctaggacttatataattgcaccaactttgttctctccttagctccagctgctcactcattcaatcactttccatcacctgttttccttgtgggtacagctgcctcaaccaccagggcccactgtattcacttcagtggtagctgcctcactgcctcagccattgcctgttgctatcttcttcaccttcactgttgctgccactgccccttaccacatcctaactattggttatggtattgggacttctttcatcatgtctaatattgatgataaagaagtagctgcattkcacccagaacatgaatgtgatcggcctgaaggatgaggaagtaggaagagggaaagtgttgagtgttgatgggggtaggtagcattgtggaggggagtgtcagtgagactgataaagctgatgattctgtgggggtctgatatgccagtcaccaggggaaacgtgatgatgtgatggtggtagtgatgaagatcagaatgtgggaatgaggaggcaggttgtgatgaccaggaagcagaggatgtttttgaacagatccagtttgtttttgttggtttttagtttgcagttgaagattttgtgctcatgattggttgtgttaacgttattgatgaagttagtgactgataatattgatactacaatcagcactaaacacccagtcagtgccaccaaaatccttacgtcagaatgtacctgaatggaaggcagagtctataaagaaataaatgatcttgaaagaaagtatattagactcttatatttttgcattttaaaactcctgaagccaaggctgtactccagaccagttaagtcagatgtttcccggatagtcctaatgtgcagccagtgttgaagtcctgctcctaaagaaagcttcatttttgcttgactgtttttaagaatgataacttgctcagaaatatggtttgaaaacacaataaatctattctgaagctcctgaaagatatcagagtaaaatttttagatgctggcaagcttgggagatcacaatgggctttattttgaacccccagtggaggtgttgacatataaacttggatcagaccagatacttccgatccctttttctctgataggtgagaaattataggcccagtagattagaygaaaggatagctggatgtggtggtgtgtacctgtagtcccatttacttgggaagctgaggcgggaggatcacttgaacccaggagtccagcctggacaatgtagtaagaccccgtctcccctcagaaaaaaaaagaatgcccctctgaacaatattcagaagcaggtgtaatgcaaggaacatggatatgcttgagttatgagtaggacagtttccattgactcttcctttgagtacttctctcttctgagactcctgagggtgagccctaaggcctgcttttgaagttgcccttgctgcagatgataagtggggcactttttctagctcaagatcagtatggtaccccataggggattctattggagatcaccataacaactgaggcatagaagcctaaggtgctggtgatgatgaaaaggaagaagcaaatgagtatgttaaagaaaaagatccaaaaaggacctatgcccagcagggtttaagctacagcaagtcaggatgtcagtcgttgaagatcacctcatgtaattgtcctgatttaactctgtgttacttacagagttatgttacaatgtttttgactaagtaaaatatttttgttaaaaaatgagttggcaaactccaaaacaccaaaaacaccaaatgagttggaatcttacgtccacctaaaacctgcacacagatgtttatagcagctttattcatgattaccagaacctggaaacaaccaatatgtccctcagcaggtgaatggataaatggtggtacatccagacaatggagtattattcagggctaaaaaaatgagctatcaagcaatcaaaagacatagaggaaccttaaatgcatattgtcttttttttttttttttgagacagagtttcgcttttgttgcccaggctggagtgcaatggtgtgatctcggctcaccacaacctctgcttcctgtgttcgagcaattctcctgcctcagcctcctgagtagctaggattacagacatgtgccaccatgcccagctaattttgtatttttagtagagatggggtttctctatgttggtcaggctggtcttgagctcccaacctcaggtgatccactagccttggcctcacgaagtgctgggattacaggtgtgagccactgtgcctggcttaaatgcatattcttaagtgaaagaaatcaatctggaaaagctatgtattgtatgtttctaactatatgacattttagaacaggcaaaactatggagacagtagaaaagctcagttattgtcgggttagaggagaggaggaaggaggaatgaataggctgcatgtgcatatagaattttcagggcagtgaaagtactctgtgtgatactataatggtggatacatgccattacacatttttcaaaacccatagaatgtacaacaccacgaatgaatgcaggagtaagctgtggacctagggtgatgatgatgtgttaatgtaagttaatccattttaacaaatgtactactctggttggggatgcagatagtggcagggggctgtgtgtgtgttggggctggagctacatgggaactctgtattttctgctcagttttgctgtgaaactataactgctgtaaaaaatgaagtctattaaaaatgagttggaaaaactcattattctactttgaattctaatagtatagttttgtgccagtatatgggatatagtgaaatatgcatgatcactattctgtaattggctccttctgaagttgttttgttatgtagacataggactacagctatgatgtttatcagaacattaactaatatcagtgattgttgagaaaaggtctttttgaagaaccaactaaagtggttaagtcagcttgtatcatctgtgcttccactaagtgagtacaagagactattcctgactatagatatagatgaaacmagtttaagaatttctagtaggaccagagttaacatctttaacatttcattttaattagttttatatttctattcctattttgtattttctaaagctggtgattccarctctggttttatttgaatggtagactcccctggagccttgggacttcgtttgaaaaccttgggtctcatccactcccgccatactttatttatttatttttttgagacagagtctcactctgttgcccaggctggagtgtagtggtgcaatcctggctcactgcaagctctgcctcccgggttcacgccattctcctgcctcagcctcctgagtagctgggactacaggcacccgccaccacgcctggctaacttttttgtatttttagtagagacggggcttcaccatgttagccaggatggtctcgatctcctgaccttgtggtccgcctgctttggcctcccaaagtgctgggattacaggtgtgagccaccgcacccggccactcccgccatactttaaagaggagaacacagagcattgaggccctggtccccttctcccttgcacagctggttggtagcaggtattcactagaagataagacttttgactcctagtggacggaactttcttctctaaatctgtagctggatatttaacaaaaggtttataaaacatactcttttaaagcagtcaaatttaaaaagcagaaaaatacaagaagacaataattactccaaatttacttacccaaaggtaaccactcttaacacttgggtgactgtccttctagaaacttctctttgcatatatacatacacaattttaaataaataagaacaatctatatttttttcctttgtcatctgtttgttttgttttgttttttgagacggagtcttggtcttttgccaggctggagtgcagtggtgtggtctcaggtcactgcaacctccacctcctgagtgcaagtgattcccctgcctcagcctccggagtagctgggactacaggcacgtgccaccacacctggctgattttttatattttgtagagacggggtttcaccatattggccaggatggtctcgatctcccgaccttgtgatctgcctgctttggcctcccaaagtgctggaattaaaggcgtgagccactgygcccagcctgtcatctgtttttaatcacccacaaatgttgtctaggtatctttccaaatcaaatatataagtctatgtaattcttttctaggtctgtgtaatttttaatgagtacacagtatactgttgtacgtattatagtttatttaactgaccatacacttctcctgcttttttctactataaacaaagataaacacctaaatttctgtgtacttatctcctattcttgaataaagtcctaggagtgaaagaggtaaccagtcaagttggaaatggttagtagctgaacttttctggccacaaatggctatttggaggtagtatttaagaactgtgaacattagtgtttctggcagctttggtcttggtctggtggtggagtgrtcaatttgaagacctaactgggagtggggcagaacgtrgaaggcacttctctctgtggcccayttcgaactggacgttgaattgctgggggcaggctggttttgaaatttgctctcctgttgttgcagacggcagaatgcctccaaaggtgacttcagagctgcttcggcagctgagacaagccatgaggaactctgagtatgtgaccgaaccgatccaggcctacatcatcccatcgggagatgctcatcaggtactgcatggcaatgggcctctcctttcttttcagtcttttttccccagccctaatgtgtttgtaggattctaattgtcaacccacaaccagggccacaaccaagcccttccagggcttgctatggggatctgtgtccaataggtctcactgaatgcttgtggattggccctagcttccttgattccagtgacttagccatctttcaatgaagaattagtgggcaaattaagggacagaagttctggaactttctgttgctggcatactccacatctcctctgccacactgtgttcctagcagaattgtttgccctgtctctcttttgcccaatccaggagagttggagaggcagagacctcatgtgatagggttgatgggcggtagggtaaaaggattctaggatccactgtgaagtcattgagtcagcaagtgtttgagtgcttacactgtggttatggtgctgtagggtgcaaagatgaacttaaggttgaatgtctgctctcactaggcttatggtttagtgagagatgaaataatataagagtgctattcttccacagaatcatctataagtacagtttttcccagcctttacttatgtataaggccctacccatctcaggtattagacatgatatagagatgaggattgttcctggttttaagaagcatacagcttaataatggagtttagatgtacatgcacatacctgtattgtaaggtaaaatgtggtaagtgtgatcaagaaaatctggacagaaggctgtggaagtttgagggtgagaggggaagatgatgaagagcttcatggcacaggggagacagttgaattggaccttgaaggatgggtggagtttgggtaaatagagggatggggtggaggaggaggaaagaggttctaggtaaaagtattagtggcagcaaaggcaaagaaacagggaagcttcggatgctcttcagaaacagtgggacaggtttccctggcaagagaccagggaagtaaaaagcagtggtgggaaataaagctgttgttacaggattcttcagttgcaggtaatagaaactgccttgagataccttgagcaataaaaatgctttataaggattcaagggcagagccaccatattggcacaactccagattgtgaatggtgctctcagagttatgtgtgtcagggcctcagatagggtgtcttgtggaacatgagggcaggaatgtagcaggccctcaagaagaactgggacgggagggttttcaggtcttgctgcatatcagtttctctttttcagccaactggttgggtcatataaacctgacaacacctacatttatatcttttcctctcttactttcaagataccagattgaactagaaccttaatcccccaaattcaaagtccaggatgagaacttgattggtatatgtagcaacttggttctgcatggtcctggttactctgtgtgtgtgcacgtgtgcgtgtctgtgtctgtgtgtgtgtctgtgtgatgtcagacatgagtaatgggggtccaccagtccaccatgatggagggggtggtagataagggtatttctgtaagttgagcaaagatcacaaaacatgtccattctggctggctgacttcctgcctctccccagaggtcctggtctacatggttgcgacaaggtcaggcctgtattaacctgggaacaactcaacctcaagattggatctctgcctggagacatggatttcctggccttaggagcaaatgaagggcttgaaatgaataagcaaagggatcggatatttgaggcaacagtatgaagtttaggatactttgatgtttagaacagtgttccccaaactgtgtgtgttcttcagtattcctgttgtgtcttgtaagatgctctacaaaaaatatatttgttagttgagaaaatagtgaaatgagctgaacagtgtttttttattgtggtgaaaaatgtataatatgacatttattttaaccatttaaaaatgtacaatactgtagtgttaactacatgcacatattgttgtgcaacagatctctagaactttttcgtcttgcaaaactgaaactttatatccattaaacagctcctcccagtctctctcctcccctcctatccctggcaaccaccattctactttctctctctaagattttgctgggccagtcacggtggctcacgcctgtaatcccagcactttgggaggccgaggcaggcggatcatgaggtcaggagttggagaccagcctgaccaacatggtgaaaccccatctctactaaaaatataaaaattagccaggcttggtagcacgtgcctgtaatccctctgctcaggaggctgaagcaggagaatttgcttgatcctgagaggcggaggttacagtgagccggccgagattgcagcactgtactccagcctgggtgacagagcgagattccgtctcaaaaaaaaaagtttgcctgctttagataacgcatgtaattggaatcatgcagtatttgtctttttgtgactggcttatttcacttagtatagtgtccaaggttcatccatgttgtaacatatgacaggatttctttcttttataaggctgaataatattccattttatttagagactttttttttttaacctgttcatctgtggatggtcatttcagttttttccacctcttggctattgtgagtaatgttgcaatgaacatgggtttgcaagtatctttttgagatcctgttttccattcttttggatatatgcccacaagtgagattgccagatcatatgatccttctatttttaatttttgggggaacttccatactgttttcygcagcacctgtactattttgcattcccaccaatggtacacagcattccagttcttccacttcctcaccaacacttgctattttttgttttgttgtgaggtgatggctcattgtagatttgatttgcattacctgatggttagtgatgttgagtatcttttcatatgctttttggtcccatttgtatattttctttggagaaaatgtctattcaagtcctttgccccaatgagtttcatagctgcaggacttctcagggcctttaatatgctgatgtgcactctgtacctctaaggaggggataaagtattcagcatttttcagacttaaatgtccatggaattttcccagttatttcaggggcggggtgggagactctagtgtttcatggaatacctttatatgttgttctgtgatagtacttttcatccgatgatgggtcttgcatgtagaggtggatgaagggagaggtcagagtgagaggtgtattcaggcaccagctcactggctgttcagcctggcagaatataggaaaagtagaatatcaagctggaatcggggtggtggcatgtgaggaagccatgaggctgggtgcataactgttagatctagtaggcagtgggaaggtaaggatagacttggtgaggttcgtytgtgttcattagaatagacaaataagattggtcaacttcaggctgggtgtggtggctcacgcctgtaatccgagcattttggaaggttgaggcaggtggatcacctgaggtcaggagttcgaaaccaggctggtcaacatgtgaaaccccatctctgccaaaaaatacaaaaattagctgggcgtggtggctcatggctgtagtcctgagtacttgggaggctgtggtgggagaatcgcttgaacccaggaggtggaggttgcagtgagctgagattgcgccactgcactccagcctaggcaacagagcaagaccctgtctcaaaaaaaaaaaaaaaaagattgaccaacttcatatgaagcaaaatatcatcttgaccaaggattgggtgaggaagtaggctggccactgtgatttgagcctgagttatggtatgagtcgtaggtagcagaggagctgggcactcccccatttaagaagggcagaccattgccttgtcttcaaggaattttgttttttcttttctttgggcccctctgatgagctcttccttgtttcctgtcagtcctaggcctcagcctttggatgtgggcttcatgtcacctggattctctgctggattcaccagtggcatttttaattttctgcccttcaagcattggacagttgccctaggctgatttgattgcagtcaccctgttagtgttgagcagatggtggttcccgcaactggagcacatgatgattatgtagcagttggtttgggcagttctgtaagtcccctggcacagttgtctgaaattggggccctcctccgaaagggttctcacaggtsgtcatggagcctcagctgaagactcctaatagctctactatttgtgaatctttacctccaggggaggcctcagtgtacagaaagattcgacctgctaatgttacttgaattaagagttgaaggtttctggttaagggtgtgttggaagctttgtagtgtttgtatttcartttcagttttcttttgcctggagttaggataytatctgtgtgtttactagtaggagacaccgacatcttatagctgagtcaagtttatcttgatgttcttggtcctgggtgctgttcctttgccagctttttttgtttgtttggtcatcataaagctgatttttggacaccctgactgatacttaaaaatgttctatctttgacagtaggtgtggcctattacacccgaagcaattccttctgggagtggcagtgaggccatctaagccacaggggatgttccaggctttccctcagctctttatctcctactaatgatcctgcaatatcagaattagatggcttttccctccatgaggaaactgaggctctaatctgagacagatgtgttttgtagcaacatcctgaaaatacaaaatgtatcaagcttgcttggtgttagctgttgctcttattgcagaagtcactgtttagacttcacagacttacatttttgcactcttgctgtccttccatcttcatcacccctctccactctttcttttataatcttaactgtcatttctattgctgtagcttagctgtctgtcttacatacgtggagaaattgtgtttkgtttgtttgcatgttttctgactgctgctcagggctaggtctggggcaaatgcagagggcaggtagttagcatataggtaagcgtatgagctctagagcctctctgggttcagatgccagatttgctacttactagttgcttgacatcaggcaagttacatgaaattctgaagtgtcarttaaactttctgggtctcagtttctgcattcgcaaaaaggagattgtgacagtgtggtatgtaccgcatgggctattgttaggatgaaatgggttcatactgtagatgtgaatgcttgaagcacttgaatgcttgctgcttgaatgcttgatgtcacttgaaaagtctcgtcatattagctgccgctattgttgttattactgttgtggagatgaatgagattccctttgaagagattaaataataggtaagccacagtcataaatgagaacacaaaaagaaactggtgaatgtcatgggaaaggacctcattagcactgtctaagtagaatctgtgagatacacatgtaatattcaatgttctcatagacacattaaagtaaaagagcagtgaaattaattttaacaatatattaatccaacatatccaaaatattattttagcacatcatcattataaaaattattaagaagatactttacattcctttttatgctgtggtttcaaatatgggaagtttttacatttacaaaacttcgcaatttgaatgtgaaattttcattggaaatatttgatctgtgtttagatttcataagactgacagttgaaaaggtggactcacgtacccaagttgttctaaacatacttagaagttttccagtaactgaatcttgaatatcagtttttaaatttgtatttcaatttattaaagtgaaataaaattaagtattctgtttctcagtcacaatagccacatttcaagtgcttagacacatgtggctggtggcaactgtaatgtaagtttacttaaagtgtgaactgaattcaaaggtgacagagtattttaagctggcaggatcagggaagtcttcatggagaaagtaggatttaaattggaacgtgaacaggtagaatttggatgcatggaaagagggagagaagtacaagaaataccatggaaatctttttttaaattatactttaagttctagggtacatgagcacaacgtgcaggtttgttaacatatgtatacatgtgccatgttggtgtgctgcacccattaactcatcatttacattaggtatatctcctaatgctatccctcccccctccccccaccccatgacaggccccagtgtgtgatgttccattgttcagttgccacctgtgagtgagaacatgcggtgtttggttttctgtccttgcgatagtttgctcagaatgatggtttccagcttcatccatgtccctacaaaggacataaactcatccttttttatggctgcatagaattccatggtgtatatgtgccacattttctgaatccagtctatcactgatggacatttgggttggttccaagtctttgctattgtgaatagtgccgcaataaacatatgtgtgcatgtgtctttatagcagcatgatttataatcctttgggtatatacccagtaataggatggctggatcaaatggtaagaaataccatgggtatctatggaattaggagaacatgcatgacaataagcttgaagaagggagaacagtggcctggttaagaccatccatgaattacccctgactggtcatggttgtccttgaccaccagaatcaggattttagagtgacatgatcagakggagcagtgtttagtatgggttggagaaaggagactctgggaattgagaaacctgttaggccttgcaggatctcagagttggggtaaagagggcctggacttgggtactggggttaggagcggagaggaggggtaggatttggagaagtagtacaacctggattaaatgtggaccttgcaggcaggtggtagaggggattgggaaggtttgaagcctgggagtgtttgtggtgccatcaacagaaggaaatgggttccttgttttagttcctgtggagaagagccacatagttggggcgactctgttaagtgggactctggatccttgctgtgattgtgagaacaagaaggaagggctggcttcatgtgtgacctgccatagtagcctcctcagtaatagagaggctgctgttccctgtggctcttgttcctaattgtttcatttcagggtagattctgggttgatggagtttctcctacggctggggaggggagggtgttggagaagtgaaggggaatcttgaattctgtcctttgtgtactttccaaaacacaaatatacacacccacacgctgttccctgcaagagagaaaacgtacctcaaatgcataattacgcaaggacttggcactgcagtggtctgcttctctctgtcctctgcaactctaagggtttcttctttttaaactcagagcaagggttgtggtattagggttgttgtattaatgagcttgggccctgggggacttttatagcaaggaatcgtctgttctctctggtaatctggatactttcatgtaccatcctagtcgtatattgggattcgtgggcaccacttgcctcaaagcaggagaatccttggttggagtcagagctgtgccagcactgccttttagaaatcttgattcctcatcctcctcatccgtagaccccatattatgttgttgggcttggcttagtcaaagggtgatgttttgtcagggactgactctgccaatgtgaatttttggctttgtttgtggttcctcctcctggaagacatgawtcagattttcctaaactctttggaccctactccattctcctggagtcagcttcctgttttgttttgtatttcataaacaggctttctcttggggtggggttaatgatttttatcccacagtgattttatctgttgtgttagaataatgctagctgtggtaacacatctcgaagtttcagtggcctggtattgtaaagccttatttcttatttcatgtagcagtatagagtgggtgttcctggttggtgggggacttccctctaccttgagggaaagtgattcagggatctaggctcttccatcccatagtaccaccattttagctrgtggaaggggacagagtatggacagggcacactcatttgttagagccccgacccaggtatcacctctcacccacatttcattggtaagaataagtcatgtgacctcacctcaatgtaatgaggcatgggaatgaaggcctggctgggcagctactttccagtgactcttctacactaaggaaggagcacaaatctttggacagctgtcagtttttcccacataccctgacttggtttcatttaggagagaaaaaaatgccaataacttatatttggaaacaaggagtccacatctccattcacagtctaacttttggtacttcctgtggaccgatggccatttattcattcagtttcaattttcttgagaaccttgtatatttgaggcacagtgccaagctcatggctgatgggagaagagggtcagggaaggggaaagatgtcacgctaatgtggactctagtaactttagtcatgcttatcttggcagtcagctgtcagctttacttggcaagttccatcggcatgtgaccagccatgttgatccctcttcttaaaacccagctctggtcatgtcaccaccctctcttcaacttttagtgtctctctagaacttgcaggataaagttcaagcctcttagtctggtgtttgaggtctttgactatttgtcttcagacggcctttacagaaatctctgcagctgctcccttgaacttcttgcccctgccattaggctaattgggtgtcgcctcatgacaggcctcttgcctcttgcttctgggccttgtcacasctttccctctggactgttttcctgctctcttcgcctatccttggtggcccagtcaaacctctgagcttggtctgatggatctaaggcacatctgagcatcctttaaactatagcaaataccacactgcatgttcagcatcgtttatatggctgtttattagtgttaatatttcatggaatatctgtctactattgccgattgtccacttcgagaagatagtttcttatgtttgctatagagtcaagctcggtgcagttcatagcaataagtgctgcagttcatcagatgttcggcatgcgctaattgctttatgtcacacctcaacccttcaaggtgggcattatgttcatccccattttacagatgaggaagttgagccccaggttcacccagctagtaagtggggaaccaggcttgaacagagttctaactgctggttgtaggagatgtctattctgtggctgatgaaagtagaggtaagtgcrgcatacacctcgtattccttgttccctcagaatttataatccaattgtgagactagatgtgtacaacttctgtacaaaagtagaagaggttgcttggcagcttgcaagggtatgggctttcgaaagtcagacctgaggctgggtgcagtggctcatgtccataatcccagcactttgggaggtcgaggcaggcggatcacttgaggtcaggagttcgagaccagcctgaccaacatggcaaaaccctgtctctactaaaaataccaaaattagctgggtgtggtggtgggcgcctgtaatcccagctacttgggagactgaggcatgagaatcgcgtgaacctgggaggtggaggttgtagtgagcctagattgcgccactgcactccagcccaggcgacaaagcaagaccccatcttaaaaaaaaaaaaagtcagacctgagttcagatcttggttctgccatttactgtggtgttaccttggggaagttagttatttctctaagcttcatttttttcatctgtagattagcgagggatgataccttccagggctgctgtgaggattagaatgagaggaaatgaatacagttattgactagtaggtgttgagacaataataaacaatacagactaaataatcttagctaacattatttgtcagcattatccaaggtagggtatggataagtgccaacatggatggtcctgtaaaattcagaaatgtgggagcctctgaaagctgaagtgggtcaggaagcttcatggaaaagggagcacttgaaccagatttttgagagatgactagctttttttttttttgtagtttacagatgctttatttggctatgtattgtttatattgttggaattagatgccaacatttaaaaattgggtartttctcatgaacccatatttctggcttcttctgaaatattgaaggttagcaacatgtggcctgcatttcagaaatcagagctgagtaggagctgctgtctttagaaaagatatcctttgtcctgtaccctgaggtatttgaatttgaaaccccatttataatcccttacgatcttttccccattagataatgtattagtttcctatcactgctataacaaattaccacagtgacttaaaacaaatttattctcttatggttctggaagtctgaagtctaaaatgggtcagcagggctatgttacttctgcaggctccagggagagtccatttccttgccttttccagtttctggaggccacctgcattccttggctcatggtcccttcgtccatcttcgtagatatggttgaggttttaactggatgtagggaaaagcttcatgtctctttctgcttgttcatttataatacaaatgtgggttgaggatctagtcacctgtgctgagtgcagggacaggacagataccctgatctcatggaacttatatgcttggggttaagatgggggttgaggaacaagmcaataaacatataaaaagttcattaagaagagaaacattgcccagcatggtggctcttgcctgtaatcctagcactttgggaggctgaggcaggctgatcacttgagcccagaagttcaaggccagcctggcaacgtggtaaaaccccgtttctacaaaaaaaaaaaaaaaaaaaggtgtgtgcctgctgtagtcccagctattgagaagattgaggtgggaggattgcttgaacctgacaggtcaaggatacaatgagccataattgtgtcaccacactctagctagggtaacagaaggcgatcctgtctccaaaagaaaaaaaaaaaaaaaaagacaaatatctagagtatgtgtgtgctatacagagacttaaaagtggccaggtggctattatagctgggtagtacaggtaggcctctctgtagaggtgatatttgatctcaaatgtaatgatgagaaggacctagccataccatgatcagaaatacttttataggcacaaggaagcacatgtgccaaggccttgaggcaggaatgagctcaggatatgcaaagagcagaaaggaggtgggtrtgtctggagcatggtgaatgggagcagagctgcaagaggactggcaaagtcagatcagctggtaccttgactgggccagagtttggattttatcttaaatataataggaagccattggagggttttaaggaggttgctaacatgatcttagatatttggaaaagctcactctgagtgtatgtgcagagtggattgtaggggcggtagtccaggtagagatgatggaggcttggactgagtgctgctattagaaatggagagaagtgggtggttttgagaaaaagccagcagctgtgcttctttgtgcctttttcctagcatgctacagctttggtttattttaggccctatgctgtgttctaaggagaccgcccctgggcgttgccagcttcatgcctgggagaaggagagtgacagccctgggcccagtgcttgtctggcttctgcatagcctgtcagtgtggaggtgaggctgtggccagccttgcttagcaatgtctttctggaatgttgaccacttaggtcatgtctggacattcttaccccagaccttgtctccatcccaaactaaacatgtccatttgctgttaattccacctccctttggaggaactctttccttgcctttgctgatggagaagtctaggtaaaccctgcggatcttccatctctcccaagcttgcccagaaaggggtggggcatccctagagtactatgtccctgartggaagagtccagccgggctcagacctgcactgcattctctgccagtctttgccagtatcttcaccctgtgtcacgggtggaagagccccaagcctgtggcgtcatgttggtggagagtgccctcactgtgtattccccattgtgcgcagtgatttttagcacaagagttatttttaacttagttttcccagccccttagatgtcttctcactgtttaggaagaagagattaataatatctcttccattgcatatgtgcagcactttcaagtttctggtgagttttgaaagacattaacttactgtttctcacaagagtcctaggagatgtgtgggccacccttccccccgttgttactttttaataaaaagtcttgcacacagtaattactcggttaataaacaagtgaggattctgcagttcctaaacgatgctggtggccatttctttctatttccttagtgctgttgaccgaatgttctttatgctttaggaataaaacgtgcttgctgttgcatttagcaatctgaaatgacctgtcttagagatgaggaaatgaggctgagagagctgccaggacttgttgcagactatgcagctgggcctgggctagtgggcaggtggcccagagctgctttatcctgccattgtggttctctatgctggcccttctagtatctccctggaggctggtttgaggctgtgattgccggtgccttggtgaaagaggcagwccttttttttttttttttaatttttgttttaattttttgagacaaggtctcactctgttgcctaggctggaatacagtggcacaatcatgcctcactgtgcagcctcaacctcccgggctcagattatcctcccacctcagcctcctaaatagctgggactacaggcacgtgccaccatgcctggctaattattgtattttttgtagacatgaggtttcrccatgctcccaggctggtctcgagttcctgggctcaagcagtcctcccacctcagccgcccaaagtgctaggattacaggcatgagccactgtgcctggctgaaaggggtagttcttaaccatatagcaggaaaggaacatgagggccttttccccctacatcatgttgactgtcctaaaaatgccttgggtctggccagcagccccattccccaccctaaactttcttaaccttgccaggtcctttggcttgggagaatcctggtaactgcagaaggagcagcagctctgtactcaggcaggcctggctttggatcctgacctactattaacttgtaagtgggcagcttacttaaagattctctctttgaacctcagttttctcatttgctattggtcttatcctagagagtgatgagggcgagagataaagtgtcatgcattggcagcctggcatagggcttcagagtccagactctggagttgactgcttaggttcaaatcctgcctctgctacttaattagctgtgtgatttggggcaagttacttaaactctctgtgcctcactggctattaccagaagttgcacactttgacttgtaccctttgcccacgcgtaagaatttcttactttcttcactccctaaccccttccatacagaggcaaggggattatcagctgagaagaccttggttttggacatgacattttattttgctgaagcctcctggattggatgaagcgtttccgctcactctgtagcaggaagggacagggtctgcatgggagagattggtgatgctacctcagaggaggacccaaacaggaagtttggaaacaagtcagtatctacagaaacttaagttagggaattgttggtgcttaacacagaaattcagccttacttttcagaaaaataacagatgcctaaatgtcagtggcaaggaggggagaaggctattattggtttgatttttgagtaagatctcagtgaagaaagagcagtttttatctgtttctcctgatgtgctttggttctcctaatgaggaaatagaggctaaagggaacagctctctctgcccttaattaattcaatcttctgcagtgtgtgctaatctgttgttttcagctagactgttggcttcttgagggcgggggccaaggattccccagtcttcatagtccccgctgagcctagcacaaggctaagcaggcagaacagtctgctcatgactgatcgaggcccactttgttgtcatctttgttttccagagtgagtatattgctccatgtgactgtcggcgggcttttgtctctggattcgatggctctgcgggtgagtcactactttttctctgttcttgctgcacctttgttcgcctcctaaaaataactgaaccgagtttcagcctgtgatatagaagcaaaaagaaaatgcaaaccagatgctccacattgactctctgcagaaaggtgtgggttcccagtctttcccygctccccaaggtcacctttcagtaaccctttttattcctctctgtatctttgcttcaaagttttaacaatttttatttttaaaaagtttttgaactttttattgaatataacatacatataaaagttctatcaattaaactgaatatacctgtgttactagcaccccaaataagaaatgagactttaatatagtttcagaacctcctctcttagcttattggtcccagataattctcccaagtgcttggcttttggtttctgttttcactcttggcttaaataacaaaggttaactctaagctgcattggtgttcctcaaaaccrttatgcctttgagttttagggtggactccccacttcaggtttgttctctaaagcaagctggacaaggtgggagctcccctcccctcatggttagcatgctgcttcctttggcgtaagtgcttgtgttggttggcgcattaggattggctttggctgacacctctgccaaaaccccaagttctgccaggcctgtgggaacggagggcagataaaggtaggaggcataagcttcctgctagtgaccacagcaggaacactcatagggcccacttggtctttctccaggaaaggtgaaacagctcccctggggtgtctggtggagcagaggagtggctgtaattgctgagcaggaaccatccctccctgtgtcttgttgattatacgagaccactttggccataggtctacagttctccattctctgttcttgactcatactgtgcaagtggagtcctttttgtgcagggaccagtgccaggtagcttgggtctcaggactgttctttcagagcttgacacacagcttgttttcagtagtgtggtcttctcttgcccagaggtttctttggagtcaaggacccatctgccccactaggagctgatgcctcttactgctcttgcctgtctactgtcattttgtgcagcttctgagcagttgttagaaacctttcttcttcttttttttttctcccctgcttcaggcacagccatcatcacagaagagcatgcagccatgtggactgacgggcgctactttctccaggctgccaagcaaatggacagcaactggacacttatgaagatgggtgggtacaggcatggctagcccaaacttagttggcctgatctgggcagggatcctagaggtcctcaggactcctggatcttaatccttttatgcagtcatggacccttttgagaatccaaggaaaactgagaaaaaaaaaaatggcatgcctatacatacgtaccaatgtgcattcaattttggaggacgctggttcaggatacttattttactgaggggaaactgagggctagagaggacagttgatttgctgcagatcacattgctgtgcatttcactcctgtactgggggccttctactatttgctgcctcatgattcagagtgagataaaggcaaggagtcwttggcaacagaagccagaaagctttcccctgaggctctctctgaggatcttggatttgcttctggaagcttagctctggagaagagcagcattcaggacaagcgaacaggtctggaacttgcttgggctagtcgcttcacttgagtgctttagtttcctcatctgtaaaatgggttaatcacagtaagtaacatataaagtggtgagaattaaagcattactatgtggaaagcatatagatcaatgtttattgaataatgtgtgtatatactctgtgttttcatttaattttctgccgtgtgtactttcctgtcattaaaatagtctttagaaacacggttttagggactgtacaaagtctttgcttcctgaattttgaacttggagaacagaagataaggaagggccaagtgagaaagagaagatgaaacaaaatacctgatgcttcttgtttgttgtaggaaataatgaggaaagaaaatagtcctcagactcacarcaggraacagaggactagaccatgaccttgagatccaggcagccagctgactgaggggtgtgtgcactcaggtgtatgccacacaccctccacatacacacacatgtgttctttgtcttagggaggaacaaggaacatttttgtcttggcattggattaagtttctatttctcaaaaatcatttcataaatataaaaacaccaaagctacagattgttgcctgttgctgcagttgatttctctttccctttctctctctctctctctctctctctctcacwcacacacacacacacacacacacacacacacacacacacacacaaaggcaggcatttgaagctggctgttataaatggacaagctagtggcctttaaatttttttgtttgtgtgcttctgttaatgggagtcaagcacccgcaacatgtatgtatgtttgtttatttgttatttatatgtgctagtgttcctctatattccaaatatcaaaaactaactttgtaatttctttataaaaaataaatacaaatagaagctctgttactttcttcttgcacccagtagatcattgtgtccccctggggagcaggcatctctctttggggcccacggattccagctcttaagtctgttagcattttgggggtcagaggcgcaaacactgcctgcctgttccttaatgtaggtatgtggcagcaagggggtggcagagggagtgagtcctcctctcctccaggctccttcctagtttcctcagtcgagtcttctgtgtagggagattctggtgggtttggttggccagtgagtgattcatccctggggttttgccgaagatctgtctgctaggaaatgacatgacttcatcctgtgaaagttatattatgtagtgtactagggcattaggagaaactgtattaataagtggcttgtttagtggtttgaaaaaaaataggaaagaatcaaatagcagaatgaaactcaatgtcagcttctaggcagttttttagaattggaattcatgagcttctttctttataaacctttgcacttcccttctatggttatgtggttgtatcagtagtcagtagagaaaatagtaaagataagtttctactgttttagaatatgtgaacttttactctaaatatatgtatattttatcaagatgttaattgtttggccaaaacctcattggttaaaaaaagtatacatttcaaagataactggctagatatggaaggtgttggcttagattaaaggaaaactggactatagaagtaattttagttctattctggaggctgatatagtgtcctatgactagcgtcttagaaacagaaagggctgtctcatcctgggagttggggaacccagaggctcatgttaaaggcaacaggatggccagcactttgggaggctgaggtgggaggatcacttgaggccaggagttcaagaccaacctggctaacatggtgaaaccccgtctttactaaaaatacagaattaactgggcatggtaattttgagcctgtaatcccagctacttgggaggctgaggcaggagaattgcttgaatccaggtggtggaggttgcagtgagctgagatggtgccaccrcactctagcctgcataacagagtgagactctgtcttcagaagtaaataaataaataaagacaaccggacaggtgcctgtgtgcctctcttaaaatcttcggaaagatctctttgctgccaagacttgtgcttagccctctattcagaggctggttatggggcagcggccttctcttggccaccctgcccttgcagatgaggggcgggcactgggagcatgttatcaccttacctggtatgtgatatgtgggagtctcccagttcccagacttcaccaaatcactgcccaaattctcatcaagtgaccagtagtggggaagtgactgaacgctgaggagacaatctttgtggtgacrccatgtgtgtacgtggcagtgatccccaagatatttttacaaggggtcaagtgaaaaatcatacttttttcccttctgtctcacccttgtcttatgtttttcatacacaaaaacttacacttctccctctctgtagccttccaggattaagggaggttcagattttctaagtcctgtcaatccactttaaagaagctgcttaataaagaccctgctatcatgatgttagagaattgtatctttctggtgggataatgagcgtgggcccactgggaattgtttcttatcatttcttccccctgtaggtctgaaggacacaccaactcaggaagactggctggtgagtgtgcttcctgaaggatccagggttggtgtggaccccttgatcattcctacaggtaagtgagcttggtccctttctgcttgggtaaggaagtggcttctagattcccctccattctcctcatttgcttgtggggtgtggagcactggggggctcagcatgactgattttatagtagaggtcagggtgaagagaagagttccactggtggtgaagatgtgcttttacagttcctcatcctgcacacccagctctgggccatggcaggaccacctttctgaaggttctggactttcaaggccctgctccstgccctgctgcaatgggcgttcggctcatggctgggccacaatgtgtctcctcagattattggaagaaaatggccaaagttctgagaagtgccggccatcacctcattcctgtcaaggagaacctcgttgacaaaatctggacagaccgtcctgagcgcccttgcaagcctctcctcacactgggcctggattacacaggtcagaatcaatggttctgcccagcagggcccctgccattgtccccccacctcttgctattgtctccarcctygtcctccgaatccaagtcgagttggagctgacaggaggattttgccctactctgccccagtgggatatttgaagaagcaggagctttgtttgtttccactgttgccacctacttgccacttagtttggctttggttattttcgcaaagctcgtttgggtggctttttgggtgctgctgaaaagactgagttttttttatccactcagctgctaactgccactcgaacgtatttgatattggaaatagagcatagaggtttctaggttccatttcccttcttatgtcagcatttgtagatttaccttcctaggcctttgtcctccatcttgtaccttctgctttagaggctttggggtgtgggtgtgtttccttggcctgtgcgatagtgatgggtaagcagcatgttctctgaaccattgtgtggatttatgaagcagtgagggggcagagagagaggcctggaggtggggctgcaggggagggcgtcttgctgtagaaacagaggtagatgggggatggctgtggaatgtaggcagattgcccagaggggtcctgggaagaaagcgtgacagcctagattctgggccaagttttaaacagcattcccgaactgatcttcagtgcagccctgggtgtgggggcagccccagcctgctttcttgtgtgacatcctcaccagaggggtattgcggaatggggaggatgggtccagtgagtggcccagggtcagctaaatattttccatcagcgtggtttgaagtttttttcactagagcagaagctctgacttgttgcttataggagaggggagagcaaatgttgctgttcagtacacatttgggtgcctactatctgcaggatgctgtgcgaggtgctgagtgaataagacagatgcccaccctgctcacaggtggctgttccctgagttatgaatgctgccctggtagggtggttgtggtggcaatggggtgagctcctctagcaccacgatttcatcttgcagagcaacagagaggccttggcagtgtctgaaagggcaagtgtgatttggaagtggtaatcacagtgagtcagactacagggaattcctaggtcttagcactgaaaggcaagtcttgcagcccccaggaacatcaagtggtgggtgctgttcccctgacccctgagactgggtgagttccctttgctgggtagtgtgttgatataggtccctgtgtgtcccctgttgcatcagtatttacagtagtgtgttaattgctggtttaattatctgtcttcccttctatattgtaagccccatgaagacagggactgggtctggctcagatctgtaaccacagtgaccagcagagtgcctggcacgtatctatgcctggcagatctagatgttacacaggcatttgtgggatgcgtaaatgaatgaattttactggtgaggcaatcraggctcacgacagtcaagtggcttggacacttcttgtatagggcttgaatccaggcctcctgcctgtttaagtagcgtgctcctgtaagaaatggtgctgattaaagatgtttagggtaggttctttcactgggttcctacygctttctgggaccagggctggagttaaagcacatttgtttcttgcaggcatctcctggaaggacaaggttgcagaccttcggttgaaaatggctgagaggaacgtcatgtggtttgtggtcactgccttggatgagattgcgtgtgagtgctctggtttygctgtttgggcatgttacccgatctctcctttgggtctctgggtatctgtgtgttcatgccattcaactttctgagtggccagggaataagaagaagactacgtcaccaaatgggtataggagatgccaactaggatgaaggagaaagaattacagggagctggggaggggagtgaggcttgtccagagcagtattacagctgggtgatgcccacctctggccagtccctcaggaccatggcacctctgaggaagggcatttcctacaaatattttatgtctgtcagcctctgtaggtgtagaagtgggctcataggagaggccttctttctttacacttgtcctgtggtttcctaaggtctttatagtgagaatgttctgggagcatttctacctcagaaaactaggaactaaaagttcctccccaagccctttgatgtaatagtagtttctcagtctttggaccttaacccaccttcatgcagttgttcagcaccttctttcatctaaaacctgacggaatctggttgaaccttcctgtcctgtcttctggtttctgagtggatttgacccagggcaactgagaagaggcactgctttatctttttgccttctcactagagaatgagaccctactgcagtgtcctctctcttcagtccctgcatcttccatycacaaaacattgtcaagtgtgtcagtgacttacatccctaattaacttaatgatctcaacgtcagagaaaaacacctgtaaaacttttctctctccctgattgtaacaaaaacacaatcccatgatagaaaacttggaaaatgcagaggaagtaaaaagaagaaaaaaaaaatcacgtataaattctgttacttagagataatcagtgtcaatattctatgcatatatcattttatagcctgattttttcactgtatcagtacactataagcatatacaagcataattttaagtgagtattaaatactccatcatgtgrttataccataatttatttaactgtttccctaaggatgacctttgggttatttgcagtaatcctgtaatttattatgatgctaccatcaaaatcttggttcatgaatccatgtcttagtgtttgataattttcttcctatttctggttggcttttagggcttttgactcatcttgccctttgtctgccagaaagtttgcacctttgtatttgaatttgtctgtcttgccacacctgaacaccaggtactgtcatttttaaagaagtgctagtatgataggtaaaaaatggtgcctcatcactttaagaagccattattttaaaatagaggttatacttttaatgcccaggcgtttttttgctctgatcctcatgagaacaagtgacggaagctggaagtcctgggaccagaactgtgctctctcctggtctgtctagttctcagacgttcagcaacatcactgttactggctgtccgcaggtcccccacccagtcgtggtgccagagcagacccatgggtgggctgcaggctctgatttcattggtgagctgcagccttgctgactcactgcttttctttccacctctgacaggaagctccgtctccatggggctcactgacccttacagaggaggcttgcctggcttcccttgtgggagggtctcagtttttctaccctaggtcatctgcctcagaagggagagagtgctcgtctccttcctttttatttgggagcgccagaggtttgtcggcttcaaggccaggcctggcaggtcaccactaggyggatcatttcaactccttgtgggggcagttctcaggatttcaactaatagcttttattcccttctccgggcagtgatgtggaagcctgagaaacagctctggtgccatcacgtggtggacatgagcaattgcagctcagaggtggaaccagacgggagtcaggcttccagcctttctgtgcgattccactgaatccttgcgcagcagctggactccaagctgaagctcttccctcccgctacaagcgaccccttaacatcttaagtcagacaggtgacagggattttgatttcttttctagggctatttaatctccgaggatcagatgtggagcacaatccagtatttttctcctacgcaatcataggactagagacgatcatgtgagtgtttgccctgcatctggaactcccttccagagctcctcagagccctagtgtgccctttctggtcctggcccacccatcactgcctgatatttcactgatgtgcttcttttttcttgcccttttaacattttcccttcttgttttccttagcagtaggtgtttatttatatcctgcctctctttgagcccccaaaatggtttgaaacgcatgaaagtgtctatagttcgggccacccatttgatgtcaagttttctagcagccagtgttaaggggtatatatgctcaattatacaattctgggtccacaatgcaaataaacccagtcattttgaaggtcaaaaataatatgggaaaacccctccaactacgctttgttgaattgtcagtttattttttcaaagcatttcgtgtggccttcttttcattactgttctatttcaatagctttttgcattaagacaacacatttattaagtgctggtgatgtgctaagggtctctgttaggtgctagggtgactgaaacaggacggggtccttggctggagttggggagatgagcatgtcctctttctaaagtatttgggcacataagtgggcaccagtctgcttgtgggacagatacaggtgttacgagaggggcctgacctagacttggagatcagagcagactcttggggaaagtaatattttgaagcagagagtaaggataaatgtgggtgagttaggtgaatggcagggtgaggaggggcggggaaccatgatccaagcagagggaacagcattttcagagactctggacagtagagagcacagtgcatgtggaggacctgaagtggttcagtgaggtcagaacatagtgaggccagaatgtgagcaggggccrcagaaaagagaggccttgtgggccacattcaggagcttgggttctttttctgaacaagaatagtgggaagctattgaacgaatttttcagagggaaccacatgttagatgtacaagttgtaaagaatattatgactgaaacatcggtagatggggaaagacttagaggctgtggcactaacccaagtgagagatggtgggacctgaacctgagtggtgactgggcgaggctgtagatgagctggacagattagatggagatttaggctgtgggtcccaaggtcttaatgaaggacgggaagagggtcatcagtgaaggaggacactgcccagatttctggcttggcagattgggtggatgggggcagggaatgcaccttggagggcaggatttgggaaaggagtggggaggagagaaaaggggcttggttttggttgccaggaaacagagcctgatgtgtatgtgtgtctgtgttgccacctctcactcatgttccctcctttttctgccacccacctctcctccatctgcaggctcttcattgatggtgaccgcatagacgcccccagtgtgaaggagcacctgcttcttgacttgggtctggaagccgaatacaggatccaggtgcatccctacaagtccatcctgagcgagctcaaggccctgtgtgctgacctctccccaagggagaaggtgtgggtcagtgacaaggccagctatgctgtgagcgagaccatccccaaggttggtgaccccactttggcccatctaaactctgccacccccttcccagttctggtattgtctttggagcacaggcagatttctgaggctgcctgttggatcagaactgtggtctccatggatgaggccttaaagctggagccatagcaagagcctgagggcccttattgcttgttgagtcttgtgttttccagagtgtggcatgagagattattttaggtggtacacattattatttaggtttrcttaaatatatctgttttaacagcatttagcatataatagaaaaaacataactagcatgagttcatgatataattatttaaaataaagttgaatttaataaagctgatttaaagatggtctaaagtaaagtactaagtgaataagggtacagcagttaagaagctagggtaaaagctgtgcaggtggtataagaatgcttgaagcttgggaaatgcttctctaccccctccttctgccrcaccacattttatagctaaggacacttgaggctcagagaggattggggagttggggatttggggatttgtcaaattcaagtgatagtgatagccttgccctttactgagcccttgctgggcagtgctaagcagctgacacttgttgcctcattttcattagggtctgrgatgggactggaatccaggcctctttaraggtaggcttttctactgtcctcccctgggcctctggctgccaagtggcctttggcaagcccagtgatgtcctttcttctccactgagcagtggggcatcctgggaagaatccaggcctggctctctagatctggcttgccattgtacccctgccatcatcacacacagtgtgactcctcctctctctctctcctctctctctggagagaaagagaaaaggagataagatcacaaaagcaattttagaagctttgtgcaagtgccaggtgtgctgaggcccctctgctggattctaacttgttctcaaattggaaagggtcttctccagcccttcaagatcagattattatcagtagctgagataggaccactgggcgggaagggagggagcaggagacctcactcatcaggtcatgtgcatggctagacagggagaaaaagccccctttgtacagcaagagaagggtgatttcggtcaagctttcagtgttagtgaactctaaccacaaccacagtggcttggaaagcaatgtcttgctgacggcaggcagccagcagtctcaaagagctaagggagtgagggatggaagagagacaccttgtttgatgtacttactctttttggttgagcttaagctcagggtcatcaatcaaaagggacaggtcgttggggccccaggggatagctatatgggtcgccagtgggagctcttcaaatgatttgtctaaagtaagttttgctgagcaaaaaggttgttgccttggtcttgggtgggtggagccggtttgatttcccaccctactgcyctttgcctctaggaccaccgctgctgtatgccttacacccccatctgcatcgccaaagctgtgaagaattcagctgagtcagaaggcatgaggcgggctcacgtgagtagaggagctggtgcagaagatgggatgtgaggtggtcagaaggcccggctccttcacctcctctgtggcattgagcctggcacaaggttagaatctctctgagcctcagcctcctggccttccaggaggagttattgagggaatgaaataaaatacttgatggattagayctttacaaagtataatacacaatacaaaaggagatattgatgttcacagtgtagatgatggtgatgacgtgatgctgatgaagaaagattttgggcccagaggtggcttttgatagtggcctgttttttcctggcccctgtagggttcttaacctttaagttaaccttttggaggagctccctgtgctctgaggtggggcccttcctgattgtacctgaactactgaatagcagaggagcctttccctgataatgggagttgctgcacacaccagcttcccagaaatgtccacatgtaaagctctggttgctgatgatgtgtggccctgcaggtacagccttctcagtattgcattagggctaggctctgaatctggtcacgtgattttcagtgataacttaaaaaatgtctccattgtttgcacagattaaagatgctgttgctctctgtgaactctttaactggctggagaaagaggttggttcttagtctttgtttaatatgtggatatacattattcagacctacctatatgtgattctaactctagcatctcccatgctctgctgaccatgagatctgagatcttcatcaaatttttgggctctattttaataattctctctggaaatttggtgtgtgtagatttcaaaattccttaattatgaaaatagtaacaagaatgaagaaaarttccataatagagtggatgctttttgggttagggaatcataactaagtggaatttcattataaggaaaaatgagtcttataatattattataggcaagctgattgtattaggagaaaaagatctttgtgtacattttgaacttcagtttaagccttgagcctttttatattaaattgactcttggccattaatttcttgctctagttgacaagagggtggtttctctgtggtgttattaaacaatatcatgttccctttaagtattgtataaacaactctttaattgggaaaagaaaatattgtctttattcccactagtgtaactttttccctcatgtttccttctggtgattgttcatctatgtaaattattattattattttattttattttattttttgagacggagtctcmctctgtcacccaggctggagtgcagtggtgtgatctcggctcactgcracctctgctgcccaggttcaagagattctcctgccttagcctcccaagtagctgggattataggcgcctgccactgcgcctggctaattttcgtagttgtagtagagatggggtttcaccatcttggccaggctggtcttgaactcctgaccttgtgatccacccacctcggcctcccaaagtgctgggattacaggcatgagccaccatgcctggactttatgtaaattattattattacatttttattatttttttttatttttgagacagagccttgctccatcrcccaggctggagtgcagtggagcgatctcggctcactgcaagctccgtctcctgggttcacgccattctcctgcctcagcctcccgactagctgggactacaggcgcccgccaccatgcttggctaattttttgtatttttagtagagacggggtttcactgtgttagccaggatggtctcgatctcctgaccttgtgatccgcccgcctcggcctcccaaagtgctgggattacaggcgtgagccaccgtgcctggccgtaaattatttttaaaaatataaattatttttacatgtctcttagtgtgcagataaattttttttctttttttttttcttattttgagatggggtctcatctgttgcacaggctggagagtagtggtgtgatcacagctcactgcagcctcagcctccccaagctcaggtgatcctcccacctcagcctcccgattagttgggactacagcccasctgattttttctgatttttttgtagagataaggttttgccatgttgcccaggctgatctgaaactcctgggctcaagcgatccacctatcttggcctcccaaagtgctaggattataggtgtgagccatcacacctggcttagatatgattttgtgttttattttattctcttagaatcatagtgtgaacattttccatgtacattgaggccttaaaaaaggatccaaatgaaaactgcatctagtggctcttctgatttactaacccagtcctcctatttttaaatgtttgggttgtttttaattttttgctgttatcagtaatcctgcaataatctctccgcatttatcttttttatttctctagaatgattttcttacgatgatttcttaggaggggatgcttttgaatttttaaacttagatatgttgttttgggaggttttaggataaaatactgaagcacaatagttgagtgaaaaattaaatgaatagaaactattggattttagatagctttggtgagagcctttgggagttctcccttgctaaagatgtgtcctgtagattggtcagttgggatgaagcarttgaggaaaaagtgagcttttaatgtacctcctctaatttgtaagaggcacacatgaatttatctcaccagatgatttataagcaattttctcataggttcccaaaggtggtgtgacagagatctcagctgctgacaaagctgaggagtttcgcaggtaaggatccatttgrggggacccaggagcctcgtgctgattttcttgctagttgaatgaggctggaagggccctgaatcttagcacagtaaaaacctttaagccactctgctttctgtcttkctgttacaggcaacaggcagactttgtggacctgagcttcccaacaatttccagtacgggacccaacggcgccatcattcactacgcgtaaggcatgcggaggagcatgctgcctggccttgctgcttctgcacaggagcctgagcaggggagagacattattttaccagaggcctctgtgcccaccttcatctgtctgttgagactgtaaaatgaagggaaataagacttctaagattttattttctcccaatccccaagcctctgccttttgggagcctcttcttaggctcagtatggcactggcattctctgcagggtagtcagatgggtgtccctctttcctttytgaagctgcaggaactgtatgcatagcccttgcatcttgatgactaagtttttttttttttggagacaaggtcttgctctgctgcccaggctggagcgcagtggtgccatcacaactcactgcaactttgaactcctagactcaagcaatcctcctgcctcagcctcctgagtagctgggactataggcatgtgctaccactcctggctaatttttagatttttttgtagagatgaggatcttgatgtgttgcccaggcttgtctcgaatttctggactcaagcaatcctcctgcctcagcctcctaaagtgctggaattacaggtgtgagccactgtgcttggcccatgactggaatttttgagtagttttctttcttggtaacagcagctgttttgtactagtccatacatcttgtgagctccatcagttccataccaaaaaaaaacttagtagtaggttgtgaggcaacctgttttgggtggagagataatcagtaccctctcttcctgtccccctgagcctgaagcctggcatcccagtatgtggtttttttaccacgtggtctacaagaacccatggacccacagggccgagcctcccttccttgtgagacagaggggcactgatatgtctaggactgacagatcttcctgtggagatggggggaaatgtcattaggtgtggccattgggcttcagcctcagctctgcctggttcaaaccgcttkgctttgcactgggtattttgagttctgtgcatccccatctgttacatgcacagccaacaaaagaacactgtgcttgggcacacacttttttcccccttttaataattgtttttagagcttttagtcttggggcagattttgaagctgtgtgtgggagacagtcacagatgggacagtacagtttcctcacttaatgcttctgttccagcataaaaatatcagagggacttcagtttttgtttaactcaggatgaatttcctggctggatactatcctagaattttccgtataattaaaacattaaacagtttcatgccagtggaaraaatttgcctctgcgttggcatttcttcattgtgggtggttggaagcctgtttagaggcggggttctggaggtactggttgtcttttttagttgttcagcttgtgtgtggactggtgcccttattgctgaagagggggtggtacctggaaatggaggacaacctcacttcagctgcagggcagagacttggagtgctctcatccctttgggtgtttcccagtgcagtgatattgttttgaaaacggtgtggggaaagagatcactttttgaaaatacctcatgtttgtttgaagcagaagaatatcgtgatccattccttttcccagcaaaattcctttagtttttctcccaagttgagacatccactcctgcctgtctagcagtctggggagcgagtggggaggtacctgctggggtcagggctgaaggaggggcctggaggctgaggcaggggcctggggctcccagagacaagcaaggctgcagtgactccaggctgctcctgtcccagttcccaggactctagctaggtcctgttgcatctaatcgttctcatttttttagcttttagaattatctcttgaacacctattttgtttcagacacaaacagaggtagacataaagaaatgtgttacttttcctttgttgagctctttatctcagctggggagataggttgattggatctttgaaaagtagaagtttaatattagttgaaataattcattattgcataactttctattttgatataatttcaggcttatgtaagttgcaagaatagtacaaagagctcttgtgtgtcctcctcccagattcactaagtgtttacatttgtggaataattaatttttaattaactttgttaggccagkccctgagacgaataggaccttgtccctggatgaggtgtaccttattgactcgggtgctcaatacaagtaagtaaaccaggactgctgtggaacttgactatggattcgaggcagtggagaaggtggacagctgagctccrgctgagagcactcagctggtcatcgccctctgtgctggccactaatggaatcgttcctgtgtcttgtcatttttttcacccctatttgaaatagcccagttgtgactctgttctcacaaaagactgtttgatagaaatgttacagtccttggctggaagttttaaaaatataagtaaacaactgtgaagtaaagcaagcttttggaaccgttgaaagttttccaccccagcccatgaaccgcctgccggttccctgtactctcagctgccccagggccttatgaagtaagggattaattttgaatgaataaatgagaaatgagggctgcccccacatttctgaatttctttctccatgttttgctgctttcacggctatcatctctggaacaaagtttctcagagaagaacccaagatttggttgggtcttgatacggaacccaaaagaaggagtaagaatagaccctgtctgcattaagagggcacgagcaaggccttttttttgagacagagtctcactctgtagcccaggcaggagtgcagtggcgtgatctcggctcactgcaagctctgcctcctgggttgcagccattctcctgcctcagcctcccaagtagctgggactacaggtgcccgccaccacgcccggctaattttttgtatttttagtggagacggggtttcaccatgttagccaggatggtctcgatctcctgacctcgtgatccgccggtctcggcctcccaaagtgctgggattacaggcgtgagccactgtgcccagccgagcaagaccttttagtgctgctccattccccactgaagttgggactatggctaagggaggacctaattattgaatgagctcagccaattacgtggcaaccatgcctggccttgggacacaggggtgttaataatatcagcctagagctaaggattgcttgataatggtgtaaacttttcttcacttctaaatttttagcaggattctagaagttatcctttctatgtcagggatatagtctagtgtgtgttaagatatgtacttggatatttttagggtctctgtccaggaaaccccctgctgttctaacaggagaagttgggttttggccctcttttgctagagatgggctcctgttttctttgccttcttctgtcttgttcataaccccagtgatagtgtctctcgtgaaacagcccttatgctgtagaccaagaatgygtgtrtcaggggctgacgtcactcccagtttatttagccatccctgcattcacactttgtttcattttttaaaataacttcattggggtaaaatttatgtaccatgtaattcacccacttaaaatatacaattaattttttttatatattcacagagttttgcagccatcagcacaatcaattttagaacattttcattaccccaaaaagaaacctcatacccaatagcggtcactacccccttttccactaccctggagaaccactactctcctttctgtatctatggatttgcctattttggacccttcatagaaatagaattgtattatgtatggctttctgtgtctggcttctgtcatttagcacaatgtcttccaggttcatccatgttgcagcatgtatcagtattccatttctttttaattactgaatggtattgcactgtgtggataatcccccattttgtttatccattcatcagttgatggacatttcagctgtttccatcttctggctattatgaataatgtggctgtgaaccttcatgtacaagtttttgtgtggatgtatgttttcagttctcttggatatataactaggagtggaattactgggtcatatggtgactatatttaaccttttaaggaactgcgaactatttgcaaagatggctgtgctattttacatgcccaccagcattgtatggggcttctcacttgtccacatgcttgcctgtgtcatatttgacttaaagcttattttgacgggaaaccaatttgtcctttttttggaaagggatggcaccacagatgtgacgcggacaatgcattttgggacccctacagcctacgagaaggtaaggtggaggtaaaaaactcaagaggtcctctctgctttcttaagaagagcattgcttttatgaaaagggattgtataaagaagtaaaaattacatgkggggtagtaaaattgctccttgctgtggagtcaggcttatctgctttacgaggttcatttaactaattattggaataagacatttggmgaaatttttaaagcattctgctaaggttagggcagctcaggtgtaagtttaaatatartagctttggccttctcttgagtcaggaaatgcctttgaggctggggatgagakagtgaaatacatgctttataagcagtgcctagatttgattttgaaggccacccccttctttttttgagattcttatttacaggcttaactctctggaaactttctgaaatgacagactctattaagtttctggtatgattggcatggaaaggggaaagagagctgtgaggcagagagatgtgtactaggggtctggagacctggcttcagagcttctgtgccatttactagctctgtgacgttgaacaaagcagtcaccatccataaaaatgaggataaaaggacccaccttcccgggtggctgtgaattcccatgagcccagcaagttcctggatcatagtcactgctcagcaaatgctgattgagcacctaagtgaatctgtttgtccaagagagctccttcaggaagattatccaaggaaaagggttttatgcaatgtagtggggcaggtttcattgtcttggtcccttgccttttccatttgtattcaccagtgccttagaagaatttggaccttgcgtctaggattcttttggtgtgactctttttgtgcttttcaaagagctcaaccaggctgaggagcatggagttttagtcctgactctgcaccttactggcaagctgctacacttctgagtagcacttctcttgtccggacagtggggataacccctgaagataggatggtggtagggagcacagctgttgaagcaagagtgcctggctccaaggccagatgctgccacttaggcactgtgtgatctgggcatgctactgaatctctctgtgaagcgaggataacagtagtgcctccatcgtgaagtgtgggatcaaacatacagtgcttagaatagtgcgtggcacagaggatagctcagtaatgttagctagggtcatcagtactttttattacttttccattctttctaaggctcacatgatggagtatgtcagagtgttcattataaagtcatgtggggtcatctctctgacagtgctcttctactaaattgaatttcaagattttctgggaaattggtccygtggccaggctttttttccaccagatttttttctttttacttacattttctctatgatattgctaaaaactttagcaggcaggattttctgaactaccagaaaactacaggattasacatctgtccccattctgcaacatgcccctgggttttctttgcaggaatgcttcacatatgtcctcaagggccacatagctgtgagtgcagccgttttcccgactggaaccaaaggtaggtggtgcattctgtcacatggcaggctctttttcttgtttgagaatcaaatatgtctatgtttgagtgaaagaacatgtcgttccttcactgtgaggtccccatcccacttcaggcccagccaggtgctcatggggtgagtctccataacccactgactgagcccagaggcctcagggagccgggttaggattgggcccagtaccccctgtgcaccattctcctgaccacttatggtattggatgacacatgtggatggctcccaggagaggacaaaccakatatgaaggtcacagggcctgagtggaagttggtgcagcctcctgtctgccctttagtactgggccagtgcttcctttcgggattcttaggatttattttactgggaccctgacttcagctatgtactactttgcttgaggcctggtgggtggagcattggactgggcattgacaagacctgggctgccttgcttttgggtagattagacatgtactcatctccctaggcctcagtttcctcatctgtcatgcctgcctgtctgcttgcagtctggttagagtctcatctttgtaattctgaaaccttagggtcgcagagctggcaagggaacrtccatgtctgatayggcctctgtgtgctgtaggtgtctatccccgctmaccagcatcctgaatggatgatcgcctagcttcagactgagctctgatggtttctcaggagctctgattgttagaaagttcttccttgtgctgtgctgaaatctgaaccctccagtaacttacctattggtttctgtttcacgttctggagscacacataataaatttaatctctaaagcgctgtacaaatacaattaagtggctctttatgtctttcaggtcaccttcttgactcctttgcccgttcagctttatgggattcaggcctagattacttgcacgggactggacatggtgttgggtcttttttgaatgtccatgagggtccttgcggcatcagttacaaaacattctctgatgagcccttggaggcaggcatgattgtcactgatggtaagtgtccctcacatagagggcatgcgtggatccttgagcctttttgaaagctattcrttgttttgtattttttaattagtttaaagtaaattggcaatacttttcccttccaacaaacttttctgattatagaactgatacatgttcattttagaaaaaatgagatgggaactgtgtaaaaagaaaatgaaaatcatttgcaatctaaccactcaggggaaacatgacttagtgttttactgtattagcttttggtctttcaggtatgtagatagcattttttttttaaatcattgagatcttactgggcatcttgtcttatgttctgctttcttacttgatacattgccttttctcaggtcattgccaagtctttgtaaatatattttaatgccttcattattgtgtcttacggatgtgaaccatgatttatttagtggatccactgttactttactccttaccctgtagccagtgtgcagggacttcagagtctagctttctgcacctcaagtgcctataaaaaagtggccatatgagagaaggtggcatctctaggctcttacaccagatagagtgggctcttcacccgtttcttctcctttggagtagggcagtcatccaaggagtgaaagtttctctctgtagacatcttcatcgtgggctgcttctcatttttgggatttggtttgttttagagcccgggtactatgaagatggggcttttggaattcgcattgagaatgttgtccttgtggttcctgtgaagaccaaggtgaggatttattaaaaaaattttcctgtttctattagcaataatcacgcctcggatagacctcattggctacaatactgccactgcgcaaagcttaaaaattttcctgtttcttagtgtgggaagatgaagacttaatgtctttggagccaagagtatgccattctggggccaacatggagccttcttctccagatatcagggactttcctggaaaccacactccttccctgcaaagccagaaagaaaatccttaatgaactgggatctagaactgggattcacagaccctcaggctgatgcttgcttcacatgatttggggctctgagtttactataggcggcctgttgtctcttctgctaggggtgcctattcaaggcgctaatttccagggcccctcccagaccctagaatttccagggtggggggcctggaagctgtaattttgtcacactccccaggtgacttttattaggtaaagttgaggaaccctgagttatccatgggtcagcctcaaaggcaatacaagacaggtgtttcaccctcttcccccatcagtgttaccaaggttgcagggttttaggctctaggctttacctaaaagacctgtttgtgcctcctccattggtggaattgaacaattggagggaagtagcttcctgtgtctacaaggaggttawctgcggggatctgctctctgctttggcatggaagtcactattcttggaagtgacctcccatcttattcccaaaagctgccatgaacagaaacccgacatgttcttgtgtgctccagtggatagatgtgttgtcgcctgatgggcctggctgggtcaaggcagaccacacagttgactgttataaaaatgattttgaggacttacacccctgcatcctggagaaccaaaaccagagatgcccctaagcccagatacccccatatcctgcccctgtttcctatcacagtagacattagccttgggacctgttgctgggagcccctcagcaccctttgtttggcctttcctgatggcacaggccattgtttgcccagtggaggagctcttggaaaatggcatcaggttccttgtgtgtctgtgaaaagtggtgaccagctcaccacttcttggctcccagttacccctggctctgagggatggcatgctggtggaatgacctcatggtgcttcagcatagtaaagaggagtaaaagcatctgttttcttctttctcccgcagtataattttaataaccggggaagcctgacctttgaacctctaacattggttccaattcagaccaaaatgatagatgtggattctcttacagacaaagaggtaatggggaagtcttggtgggcaggcatgttactaggggaggtggagactaccttaaatagttctaatccatcctctaaatcctaaattctctaatccagtctcactttgtaatttttaaatttagaggtctaggccagttgagtctgaaagccctaggttttctgaggactcctgagcttttcctgtatttgttgggcctccaggtggagatagtcctgtttcccgcagccattctggggctgtagggtttgtgggtggaactcgtatgccattgtttggctgtactattcctccatagctgcagtgaggcgtgtttagcaaatatgagcctatgtgtgtccctacaaaaagccagatggatggtggggcctcttggccactgtacataccagattgttttcttgtgttacatgaaacattaaggaaatggaaagcaaaatctattatcgtatgtcctgttttcacacagacaaggagaaagatagtaccagcccttctcggttactactgtggtcactctggggcagtgaaacccttcacaaagcctggggcacaacagtgcttacttgcccagctcagagggttatgggtcttaactccttcagaccctggactggtaaggccaggtcagatggcagtcctggggacatgagaaaggcctgaagaatcacacagatgttcaaggtcagagcagaaacaagggtcagaaatggggtaggaactgttagcactagacagacaaaacagttcccaaaccaggaagctggaagccaggaggacacaaattccagagcaaggcaggggtcagaagttccaatgaaaagcaaatgactggtgggagccgaaggcagggtaagcacggtgggttactctcggaataagaatattttgttatctgaggcagccaatggcctttgagtgcctctcaaggcaggaacatttcctcactggcgcccacttgggcctcgttcttgacactgtaaaggaaagggtctttgggggttaaggaccttcccttccacaggagctgtggaatgggattctcccagctagaagcctcttctgcctgttccagttcacaggtgggtgatgagaaagtccatccacttcctgcttagctttcctctgtgcttgagcgcctctgcttaaccatccgtgcccttggttcagctaaacattcccactcacaggacccacatgggccttgctgataccgggtgggttatgcagcttgtagatggatatggaaaaggaaactcagcctatcagcacaatgtctggtgtgtctcttcagcaggaagagtccttccagtgtccaggggctcttgtccagcccctgtaagtgttgccttagctgagaggaaatgaaaacacataggtgggcatgggacccaccctgcttagaatccctctgccccataggaaccagtgtctcttgtaatggcccttgggcacagcttccagggacttagcaaggggctttccagtaataagtcatttcgcactcttggaagtccaaggctatggattcctgccaagtaattctaggtcatgcagtccttcctgtccacataaagtgtacccatcaggaggcatttctcccatatgacattcccctttatccagggaagtagtatatgaggaagtttaagccaggccatttttcctcgaaggagaatcagtctactcccgtgacattggacatagaccagggatctgtgttacccagtgtttcattgctgcaccttgcatgcccacatgattgaactattctttcggccagttactctttgtagggcagataatgtcttcttaaaatatctggcttttaaaatatctggtcatttgccctttactatttagcctttattttggagtcactttagggagtttttggtttgggtctgcatcgtcatcacttatcaccagatggcagcaaaggaccttggtcagatatgaatatggccagctgcagactgtcagggccttgtgctgctcctcaggctccaccgaggctgtccacactcccacttttccctccctacttccaaccaaaagggccatgggcgtttggctgtggccccaggcttacaccaggatgctgccgttgccttactgttgagctgctttggacagtaggctgctttgtagccctgctggccttgctgtggacacatagcagtttgcctgcttttgacatcctcccctgcccccatcacttccctgactcccagaaggggctactaggctcttctcagtagggattggaaccctggctgggtcacagccagttggtaacaccaccctatctgtctgccctcagtcccttgtaattaatgggtttgtgtgcccatcctgaccccagctgggctttggtacctggctggattgtagtccctgaaagcagtacttctgtaacatcgctgccctccaaaatggcctttgactcatttatgacaagcacagccatggcactatcagtctcatcagcttccagacagctacccccatagacagtgatgagagtggcttgttgtcctcttggtaaaacctgcttcactccagacttcaccttttcccgtatacaaccaaggaggagagttcaccctttttcctgcctcagagcttttgccatcatgtctagtggatcagcccctgcccaggcaccaagtcctgccagcaggtccttcctttcactctcttttttgtctcctgctcttgtggcatgttgagttgagagtctgaaaactaagtttactcccagcgccattctgctgcaccacagtctttaaccaccgcaggttttgggttcatctaggcagctacactcaaaagacacccatgggcttggctgatcctagttttttattcagctttttcagtggatataggatatgtagcccagtgtgttggcaggacagcttcgagtgtctctctcagcaggagttctcacagagtccggggctattcccccacttaccacctcccaggatggctcaggtttaagggaatgaagccacacaggtgggagcaggagctactggcttagagactgctgtctataatagtaaactgttctgggagccttttcaccagaagccatgaagtctggtcctatgtatttccggggaaacagaacacaaggaaaatacttacctgtgagtaaggagaaagggtgttgcacaccttttctctcagcttgtgatcttagcacatgggggcctttgctgttgacctgtgtagccagttgttaaagatgtrgtggtgaataccgtgtctgtccttctcttccctgcagtgcgactggctcaacaattaccacctgacctgcagggatgtgattgggaaggaattgcagaaacagggccgccaggaagctctcgagtggctcatcagagagacgcaacccatctccaaacagcattaataaatacctccccggttttgtttttgtaaaatgctctggaggaaggaagaaacgtggcagatccctgacatctttcccctttcctttccttcttccctacctcccctttttactttagactttaagaagaacagaaaatcttcttatcctctttgatattttattgcaaacaytcagtcttttatgattttttaattgttgagaacaagccaagaataaaattgctgcaccagaaggagggtccctccaaagttgaacacttggtgaaaggaagatgccccgacttctttggccagtgatggggaatcagtgagtgctccatgatggtcatgttccaggtgctagtacatcattcatgatcaccttaatgctcatgagactatatttatgatcagtgaataaaaatgtcagaactgtgctttgtcttagctgtctctttcttcatggtgctgtcccccggcatgtcgggtgagctgatctccagggctgctggctctgtggcagacatttcctaggtggaagggcccctttgagaagagacccctggcctccccgcacatttgggggcttagttgtaagctttttcttttctctagaaaacctaatattatggtgtttttatctcagttttttttcctgattttaaaatatgtcattcctatgcaaaaaacaataaaaattatgtcaaaagtcagttttccataactcaccctatagcagatgccacaagtgtcttacctacatggccacagctctcattgttccgttacttgtaggcaggattctgtgacaagtgcctgcgactcccattctgcaggatttcttttgacttgtatatgtggggcaagctccaagggttggagagttaatgtccctgagatctcagaccatcacgtttggggatgggatgggcaaatagacttcctcatcctttggctaagatatcagaggtatgtcttacattgtcactcagggtttcccagtgggattgagccccacttgcccaccatggtaacttgctcaataaccaaccctttgttttctttcttctcttccatgtcctactttcttcctgtcccattagtgtttcctggtaccatcctgaatgaaccatttacatgcaaatccttgttttagggtctgcttttttattaatccaacctgacatactccttagatataaccactattatctgctttatatttttgctgactcctttttttttgtattcaaaatttactaaaatactgattatttgtgtatgtatgaaagaatatgccatatatgaacatatcacatttacaaacagtgaattattctgtacgtatacaattttatcttttaacttggcaatattttagattgaattatttttaatgacttaattccatcgtatggttatattgttttaaaactagcctcattaactttttaaaaacagtaatactagcatttagacataattttttaaaaaatgtattagtcttaaatcatatagaaaacaaaaactggaatcacaagctatcagtacactaatactggtttttataattgcccaatgtatttatttttcttgagatctttatttcttcatactgctttgggttactgtctagtgtcctttcattgtactttgcagaactcctataagcatttcttgcagggtgggtctagtggtactgaactccctcagcttatgtttacctgggaacctcttaatttctccctcacttttgaagggcagttttgctggatataggattctttggttgtcagtttttttttttttcttttaacattttgaatattggcccactgccttctggcctccagaatttctgatgagaaatctgcaggtaatctcactgaagatcccttttacgtggtaagtagcttttctctcactgctttcaagattctctctgtttttgacttttggaagctcgactataatgtatttttgtgtgtatctcttggagttaatcttacttgtggtttattgggtttcttggatgtttacattcatgtcttttaccagatttgggaattatacagccattatttcttcagatattctctctgctgctttctgccttctcctgggactctaacaatgtatattttggtcagcttgatggtgtcccacaggtcttctaggctctgttccctttaatattttttctgtttttcagactcaaaatttctgttatcctatcttcaagttcactgattttctcttttgcttgctcatatgtgctttgaatccctctggtgaatttttcatttcagttactgtacttttcagctccagaatttcattttggtttctttttatgttgtctgtctctattgatatttcctttttttctgtggatttttcttttcctctgaatgggccatactttcctgtttctttgtatgccttgtgagttttggttgacaattggacatttgaatctaataatgtggcaactctggaaatcagattttcctctttccctagggtttgcccttttttgttaatgtgtgttattattattatttattgttgtagatagtctctgggccaagtatcagcctgaggtatcaacttaaggtcttctcaggtttttttctgagcttgagcctttccctggatatgtgcagtcagtctctaatttcccctatatgtgcagttgtttttgaatgtcctattacttaatgtctggctcccaacgagggaaaaagaaaaatgaagggcaggaaaagggtactggtcctttaaatcctctggaagtcacttcagccagaaggggagaagggacttctaacagtcgggggatgggatgtacagcaacagtggctgcccacctctttgtctgcgtctctgtgttcagaagcagttaccagaacacaggtctgcagtatttggagggcaagtttccttttgttcattttggctcccacaagctgtatgccagttgctctgggaacgtgtgcataagttcctgccaaggggttaggagtagacattggtagctgctactgtgctaagagctgaaatggattgaaattaacgttcatttaccatccaagttgtcctctggaagttgcaagcgttcagtagactccagagttctaaagtagttacatcaggcagattctgccagtgcaattgttgtctaggtggagagacactttccgagtgcttcctaccatcttcccagaatcctctccttaaatcctaaaccatatatttaattcgaatggctttgacaaatgaataaatataagcatactttggccatttaccaaagcatggctgtaagtgcccattactttctccacctggcggagcagaaaatgaaatgaaacaatctatatttaccattcagaaccagggtggtcctacatagagtgcctaaaaacaaatgaaccagcatttgtttgcttttcgtctcccaccctcctctttttttttttttttttctctcaaggatcattgatttcaatgtgctatgtgggaggaagcaagattcactgctgcctctcggtatatttctaacgaggtcaggaaagcatagaagcagtgcctcccaataataggacatattttgatccatcaaagatcaattcttgaatgccttttgtccatgcttggtcatatttctaatatgtaccataacattggacttaaaagagaaatttctccccaaatgatagaatgtattaagcatgtttctcatctgtcattcctctggaagttagaagatttcccttaggactcaggctgttgtcttctctgatatcccaaagtcttctcttgctgaggaaatgggaggcatgaatcgcwgttgatttggagttgaaatagtcgtaactcaagtgtgacggcaactccactgtctgttcatcaggctgttaaacctgttcttccccaaggcagcctcagagcaaagtttgatttaattggctgtagcccgagaagcaaaggtaacaggtgctgggtgcttggagcttcctgcctggacctgctttgtcttggcattaagtccaagagacataaactaggcaagatggccccataaggattgaggaccagaataaaactctaatgtgccagagctcagagggaagatgaggagataaaaatgtagataaaaaaaaaaaaaatcactcttcctcacttttaaataaatgataaaataaatgttgggtaggaaaatgggcattgtgttgaatttaaagaaggaagctgatctcgtttctttgtcttgctcactgtattccctggtgaagttttatgtataaggtaggaggattcaaggaaggggacagatgtggggcccctgctgtgaacactccagggactgacttgtgggacgcttgttcgccttctggaaagagtccatctgtgcctcctgccagtgagggggctgcccccaccaccccagctctcaccacttctttagcttgagggctgtgcctggcatctggctgcctgacagtaaccatcagttgttcctcatcaggctcattcccggttaggggtgggcaattgtgaaaggaaccaaggttgaactaacaagccatgagggaggtgttgccctcgtgtttcccagcaactgggggtttataccagtaatgatatgaagacaaagtagagtgctttggggcatctttcaagcaccgttggcctctagcaagagacaagatgggggactgggagggctgcgagaggggaggaaggatactgtgcttgctagttcctgcaggtagctggtgcagcagttaagaaattcatagaatcatggattaagaacaacgatgcagatcctggcaaggtggcagcagttgtgccatagtgtttgaatctctccaaataacttcataaaaacacggataaactggggtagcaaaactaaaattcagggatgagctttgcaccaaatatacaggtgtcaagcatctccacaaacccttaataagagcacgtgaagactaaccagcgtattatcagcatctgtgcaggaggaagctgaaggaagtgatggggtatctgatggacctgagaacagaaccccacaatagccatcaggagctcagaatctcacggagccaatctgagaacagccactaacactgggagcagtttgcacctccagtgggtgagtatgagaggtttttggtaaggccyrcaggggctggagcagtcagcgtcccaggaactcccacgaccaagccccacgctgagggataggagccaaagaggagcaggacaggtacagcggaggcaaaggagaaagaaggttcttttggaggggaacagagccaggagatctccaaaagtaagtgctatatttttgaatacttcaggaaatcaacagaaaagggagctctagagccctaaataagaaaaaaactattctaaagtctcccagaagttcagaaaaatttcacataaaaataagaaacagaaaaaaaggttgaggtaaaatgctatgtaaacttagaaaggaaaataaggtgcagaatgacgtgcctacaatgaaacacatcacagagacatgcccataaacagatgaaaatctgtaatgttcaaagcacatttacaggtttaaaaacagtgtatgcaaaaacaatatacaacagagaattagagaagctgaggaattaagtgagagaactcaggaaagaatgagaaaaaaatcaattgaaataatgaagactaaagtaggaggaacacaggaatgaataaacaccacagataatgtcttaagataaacaggagatgactaaaaggagaattgaaaccaaaatgaataaaaattatttaagtgaaagaaatatagaagataggcaacaacattcaacatttacataataggtttcaacaaagaagaaagctaaagggaacagaacaaatataaaaaactataagaaaacactcctgagataaaaaaaagttcgaaactacactttgaagaggcatgccgtataactcaataaataaacctagaatagccaacagggcatacttatggtagaattactgtacctaaaaaaaatttcctggttaatcagacaaaagaccaagtaacttatggtgaaaaaaaaattatattgccatcagaaattttcaaagcaacagtttaggccagaagaaaataaaatgacattagttgtagtgacaagggtgctcattatgtaattcaataagccccatgtttgctttacatggtgttttgcatctgtgttaagtttaataacaaagtttaacccagcaatcccattactgggtatatacccaaaggattacaaatcattctataaagacacatgcacacgtatgtttattgtggcactatttacaatagcaaagacttggaaccaacccaaatgccgatcaatgatagagtggataaagaaaatgtggcacat

SEQ ID NO: 6820 - DNA, 74580 bp, Homo sapiens
  misc_feature (1)...(74580): n = A,T,C or G, or insertion/deletion polymorphism (see Tables 1-2)
ggcaacgatcctgtgagacgactatggcaaaatctcaaggaggctaagtagaccgtcttagtggagttgttaaatactggagagttaggttttccgagatctggattcaagtgaaaatctgccattactacccgtgaggccataaccaagttacataactcactgccttagtttcctctcttttacatagggattatcatagtacctatttcatgaggttgccatgaggtttaaatgagatgatgcatgtaaaccactaagcacaatgtactaaatttccatttatttatttatttatttagagatagggtctctgtgttgtccaagctggagtgcagtggtgctatcatagcccgctgcagcctcaaactcctggcctcaagctcccgagtagctggtgcataacatcacacccagctaattttatttttgtagagacgaggtcttgccatattgcccaggctggtcttaaactcccggcctcaaacgatcctcctgcctaggccacccaaagtgcttggattacaggtatgagccaccgtgcccagcctaaatttccagtttgtgatgatatccttattattaccagagaagattatttaccaggtaaattgtgaagatagtattcctctcaccaagctgcttagtgagaaaatattaaactatttttaaggtgggtagagccaaaaattatgtattaaatgaatttatttgcataccaaagtataatccaaaaaaattttttaaaaaatgaatacatgatcgctgcttcatctttacttttaaagttctaaaaattcaggaaagccaaattatcatttataaataacacaaacatctacatgtcatggccttcactgggaatatctgatctgactaaatgacatcacacccagtgttactaagtaatttctgtggctataacttcatggtgaaaatatataagctattattaactctgtgatcatttcatcaaagtatgttagacttgctcatgtcatttatagaatactgacaaacattatttgatattattcgttgatatgattaggcaattcataaaataagaaataaaagtggccaatatacaaatggaaaagtattacatcattaataatcagataattctaaattaagataagttattttggggctattagcttggtaaagattaatggataggccaggtgcggtggctcatgcctgtaatcccagctctttgggaggccgaggtgggcagatcacttgaggtcaggagttcgagaccagcctggccaacatagtgaaaccctgtctctactgaaaatacaaaaaattagccaggtgtggtggcaggcgcctgtaatccaagctgcttgggaggctgaggcaggagaattgcttgaacccaggaggtggaggttgcagtgagccgagatcataccactgcactccagcctgggtgacagagcaagactctgcctcaaaaaaaaaaaaaaaaaaaaaaagatggataataccttgttgctattgagggtgtggtgaaatttgacactctcatatgtcaacatttttctttttctttttttctttttgagacagggccttgctcggtcacccaggctcatgtgcagtggcacgatcgtgtctcactgcagccttgacctcctgggctcaagtgatcctccctcccgtctcagtctctcatgtagctgggactacaggtatgcgccaccatgtttggctaatttttttattttttgtagaaatgagggtctcactatattgcccaggctggtctggaactcctgggctcaagcaaacctgctggctcagtctcccaaagcgctgagattagaggcatgagccaccatgtttggccaccaatctttttagaggccagttaggcaatacagagcaaaaacatttttaatatgatctttgactcatcaattccacttcttgaattgtgtcttcagggaatataatcagacaaatacacaaagatgcttgtatatgcacactaactgtggaattgtttatgatgacaaaaaaattggaaactacctagatgcctgtcatgcctgtcaatacagaaatgcttaaataaattatggtatagttagacactagaactctgtgcagctattaaaaaaggattagacagatctatttgggatggcttggaaagatgtcaacgatctgtattggatgatgccagttttatatcttaacagatatacatgtggccaggtgcagtggctaacacctgtaatcccagcacttcgggaggccgaggtgggcagaatacttgaggtcaggagtttagggccagcctggccaacatggcaaaaccctgtctctactaaaaatacaaaaaattagccgggcttggtggtgtgcgcctgtgatcccagctactcaagaggctgaggaggagaattgcttgaacccaggtggtggaggttgcagtgagccgagatcacaccactgcactccagccttggcgacagacggaaacttcatcttaaaaaatatatatatatatatatttttatatatatatatatatacacacatacacatacatacacacagaaaaaaacatatataggcctaactttttcaaagtagctttattgaggtataatttacaaagcatataattcacccattctaagtgtaaaatcatcaccataatctagttataaaacccttttttattgtcccccaaaattctctcatgctcatgggcttaactttttttatttggccatgtattatgttattaaaaggaaaagcttttacaagaggctcatttccatttctttttttcataatatatgaaaaaatttatgataatatttctatttctttttttttttttttgagacagggtctagctctgtcgcccaggtgaagtgcagtggcacgatctcaggtcactgcaacctccgcctcccaggttcaagcgattctcctgcctcagcctcccgagtagctgggattacagatgcatgacaccacacccggctaatttttgtatttttgttagagacggggtattgccatgttggccatgctcatctcaaactcctgacctgaggtgatccacccacctcagcctctcaaattgctgggattacaggtgtgagcccccgtgcccagcctatttctatttcttaatggtgtcagaactttatctttgctttgctagtgactttttaaaaaccacttattgaattatgattgacatacaataagctgctcatacttaatgtatataactagatgagctgggtgataactgtacatcaccactgcctattacataaacatatccatcatcacaggcttaacttttaacagtggttaggtcgagggtaactatgagtaggggggaaggaaggaggacagaactatagacagcttcctagtttataatttctgtattatttgaattatttacaacaaaaatatactatctttcatttttattttttcttcgagacaagttctagctctgttgcccaggctgacgtgcagtggcacaaacatggctcactgcagcctcatcctcttgggcccaagtgatcctcctgcctcagcctccccagtagctgagaccacaggtgagtgccaccatgcccagctaatttttctgtttttaatttttggtagatgtgatctcgccatgttgcccagtctggtctcaaattcctgggctcaagaaatcctcccacctcagcctgggattataggtgtgagccaccccacccagccagtaatacactatcttttaattgacaaaatagtaaagtcttttctattttgaaaagaacaaaataaggaaacagacatatacccattgaccgaaatctacttttggcaatttatcctaaggaaataatcaaatatctggaaaaagatttgtgtacaaagatatttatccgtattttattaaaaacagaggaattataatctaaatatctcataatggaagagaacaattattaattgtattgaaatatgcgaagtgcaggatgcaaacctttttatgtaatacaacctcaaccatgttgaaaaaagttaatgcacaaccaaaaaaatcctgttttgaaatataagttcttatcaatggttgtgtctggatagtagaattatagtacttttaatttaattttattttttaagcatttcattttctccataaatgataataattacaaataattatagtattgttttcacaggtctatacatttgtcaaaacatataaaagtgcacacttgcagcaaaccaccatggcacgtgtatacctatgtaacaaacctgcacgttctgcatgtgtatcccagaacttaaagtataattttaaaaaaaagcaaacaagtactagcaaaaaaaccaaatgcacactttaaatatgtacagtttattgtatatcaatatattgcaataacacttaaaaaaatagaaggatctcaaggaattgaatcatcttaagcgtcttactggaaggggggttttgctatgccattttggggctgaagggcaaaatgactgggggggcagacattatataaatagcaatatatacatacattgtctctgctccagataccgccattcattcattcattcaccagatctgccttcctattatatgccaggaatgttgccgggtacttggatatcttgatgaacaacaaaccactggcctgaaagagctcccgtctggtggaggaggggaaggtaggtcaccacctgacggattccagccaacgcccacactgccccaccagggagtgctgcccaagggggctggaggcagatcaggaagtgggggccttagctgaggtggagtcaccaagagtgacaccaggtttacagttgtggaggtggccagaagttagttttaccctcaagggagtgtcgcagtcatcagttgagaagtgggggcccggcgcggtggctcacgccagtactttgggaggccgaggcgggcggatcacgaggtcaggagatcgagaccatcctggctaacacggtgaaaccccgtctctactaaaaatacaaaaaaattagcggggcgtggtggcgggcgcctgtagtcccagctactcgggaggctgaggcaggagaatagcgtgaagccgggaggcggagcttgcggtgagcctagttcgcgccactgcactccagcctgggcgacagatcgagactccgtctcaaaaaaaaaaaaaaaaaaaaaaaaaaaaagaaagaaagaaagaaaaaaaagagaagtggtcttaaacagtttttatgtatctgtgtctatcttgcctgcacacttaaaacaacaagagtaagaactaagattgagcgtttacgggtgcaggggccgcgcaaagggcttccatctattgtctcattcacaaccttctggtagggactattaggatcttcattttacggcgaggaaaccgaggctcggagaggtcacctgcccaaggtcacagatctctctctccaaagctcaagctcacaaccaccacacaaactcccctctcactgtacctggggcccgtctgagagcgaaaaagtccgctttcaggtcccaaccctaacaggtccggctttcactccacagtttttcccagatccagaatggagacaacatccgctagcacaatcaacagggtcgtcccacgggggccgctccatcaaggccgtggactgacaggatttggggcttggagggcaaatgagaaacaatcgtcagggaccgaagaacaaatgcgtccatcacaccagccccccgcaccccgagccccgtgctccgctcacgcgaaccctcgggggcagccagtctgagggacgtagcgcgcgtgcgcggggccggaggggacgcccccacgcgagcgcgcggtgagcagggcgcgtgaccgggcgggcgcgcagccgggaaagcgcgcgggcgcgctacggagtcggcgtcggcgcgcgctccaggccgaggctgtgtgggctggggagggagacaggcggcggcggcggcgccccagacccgaggggacgcgcgggccttgcgccgcgggagcggacggcggcggaggagaccctaggctcgcggcccgaggcgggagggctcggcttctcgactgcccgcctccgaggccgccggccgcttctctctcccagagtggccgccgcccctggagactcgccgtgacacgggcctaagccgccgccgcgggagtcctgaccgctcggacccgtcggatcaggccgggtgggagcgagcttgcgggcaggtgccgctcccggagggtgggccgnnnnnnnnnnnnnnnnnnnnnnnnnnnnnnnnnnnnnnnnnnnnnnnnnnnnnnnnnnnnnnnnnnnnnnnnnnnnnnnnnnnnnnnnnnnnnnnnnnnnnnnnnnnnnnnnnnnnnnnnnnnnnnnnnnnnnnnnnnnnnnnnnnnnnnnnnnnnnnnnnnnnnnnnnnnnnnnnnnnnnnnnnnnnnnnnnnnnnnnnnnnnnnnnnnnnnnnnnnnnnnnnnnnnnnnnnnnnnnnnnnnnnnnnnnnnnnnnnnnnnnnnnnnnnnnnnnnnnnnnnnnnnnnnnnnnnnnnnnnnnnnnnnnnnnnnnnnnnnnnnnnnnnnnnnnnnnnnnnnnnnnnnnnnnnnnnnnnnnnnnnnnnnnnnnnnnnnnnnnnnnnnnnnnnnnnnnnnnnnnnnnnnnnnnnnnnnnnnnnnnnnnnnnnnnnnnnnnnnnnnnnnnnnnnnnnnnnnnnnnnnnnnnnnnnnnnnnnnnnnnnnnnnnnnnnnnnnnnnnnnnnnnnnnnnnnnnnnnnnnnnnnnnnnnnnnnnnnnnnnnnnnnnnnnnnnnnnnnnnnnnnnnnnnnnnnnnnnnnnnnnnnnnnnnnnnnnnnnnnnnnnnnnnnnnnnnnnnnnnnnnnnnnnnnnnnnnnnnnnnnnnnnnnnnnnnnnnnnnnnnnnnnnnnnnnnnnnnnnnnnnnnnnnnnnnnnnnnggaggaacgcgacacgcgccagccgccggcgcgcgggagagcagggaagagaaactttgccttttattgtttttagtccttaagtgcaaggaactctgtgttgggaggaaaaatgtccttcttcaatttccgtaagatcttcaagttggggagcgagaagaagaagaagcagtacgaacacgtgaagagggacctgaaccccgaagacttttgggagattataggagaactgggcgacggagcctttgggaaagtgtacaaggtaagagggggaaaacgggaagttgtactgcgaaggtaaaacagccactggcctggagtggcgggaggacttctgctcccctggtccttatcctgtccttcttttgactgttacggttcgatgcaactttacttggctgatcatccaaggagtagctaagaagtcgggtttacggtggaacaaaatggggcctggatggagtttaaagagcgattggaaarggagacagggttataaagtctactctttcaaacttcaaaggaaatgagagtgttctttaatttataggaggggtctggttgtgcccttcaagtattttagaatgagaaactcattgcactttgcagtggatttgtctactgactgcattcgcgtgcatgcttgtactccaacagttctgtttttagggtccagtatatatatttggttgtatctagagctaatacagaactagttgggatcaaagtgattgctacttgcagtctcttcttgagttagttgcttgacagcatactataaaatagaatggaatttctgacaaaatttccaaaaaaccttcatgtggtactagttttaaatatatttatggtaagcattgactagaagtcagtatcagcgcttaagcagttaaaaacacacacgcatgtatttatttcaatagaaagaggcttggcgtttcaacctgaaggcattaatgttaactatttaatatctcctaaggaacatatgaatgatgtcattggagtattttcatcctgaagggcgaattttttatgagacagcgtttaggggaaggacccacagggttgcctagaagtgaaaacgtaagaaaataacttatgtttatacaggactttgaagtttttaagtactttcaaataatttggcccccacaaaaatcttgtgaggtaggcaggtcagtattagtatccacatttcacagatgaagatattgaaattgttcacagtcacatgagtctcagcctagacttgaactcaggtcttctgagcccatatttagtattgttttttattttaacagtcactggtagaaatgagagcattttgcctactactttcttttttttttgagacggagtttcgccccttttgcccaggctggagtgcaatagcgcgatctcggctcactgcaacctccccctcccgggttcaagcgattctcctgcctcagcctcccgtagtagctgggtttacaggcatacgccaccatgcccggctaattttgtatttttagtagagacagggtttctccatgttggtcaggctggtcttgaactcccgacctcaggtgatccgcccgcctcggcctcccaaagtgctaggattacaggcgtgagccaccgtcyccggctgcctactactttctaagcaccattacasttctgcctctgccctgcctcaaatgcatcttgtcaaaaccccagtcctcattctttatccaggctaaaatatctactcctctctgtgtgctttcagaacacgttgttcacatggctattatagcacttgtcacttattacaattaatatgtttatgtttctataataaaattaagggccaaaattatgatacatatttgggttcattcactgccttagcgtatagtgatgtgtctgtttatttgttgaaatgaaagaatgtgttttgtctgcatatgaatgctgtcgtggaagctatcataggctgtggaagttggcaaaataagctttgttatttgtgtggagggtagagtatgggcttcagcaagagcttcataagatgcaaggcttcattgtagtgggaagatcactcctgggaatcaagagttgtgttttagtgctggctgtcacaaaccagcgttgtaatcctggacaaaacacttaacttctctggacctccgttttcttagccataatattaactttcttaggagtttagattctttcacccattaaagttctgtgagtatgtaattagcctggaaaggcaaaaataaatgctcaaggcacctagaatcttgtagttagaaggtggtaggtgattatgggcagttttcatggtgtaaataagttttatcgaatayaaacagcttagtagtaagagcactggctctggagttggaatataacttagctctctcactcaatagcagcatatgaccttgagcaagtttcttatttgtcctatgcctaactttgctcatccataagacatcctcagtgtgaggattgaagaagataatataaggcacatggaaagggctcagtaaatggtagaaattactgttattacatttagagctcatagatgcaaactttgggatgagatagggaaaggaaccaagaagataataaaccattttgttggtttctaatggcatgggcagactgtgtggagatactaaagccctgtgttattctttcatgacactttctgcaaaatgtgatctatcttcctgtactgagacattaattgaaaaatttctgaagaacaagagtcttatttcatgtagttatttgagcactataaaattgtgtcaaggagaatttctgtgatcttgatgactgtattttagtatgatatttgaagagcacgggctggcactattttttcttttttcatttcactactctctgcttctaaggagtagggtatgagttttttaaaaaataaaatttgaaattaaaacttatctgtcttcttatggcctcttttttctaaaagtttttgtttttcaagattccatagaaattgaggatttataaacttccttatatttggaagaaaaagctrtggaaccttaacatagtacgtagtagtatgtagtagaaaactgtttataaacttgattctaactatcatttgcttacagaaattagtaactgttacaaagattatattgtaaatagagatgaggttgagtatcccatttcccaaatgcttgggaccagaagtgttttggattttggaattttttggattttggaatatttgcattatacttagttattgaacatctgaaattgaaaatgctctagtgatcatttcctttgaacatcatgtcatgttagcactcagaaagtttcagattttggagcatttcagattagattttcagatttgggatgtgtaacctataggtaatcatgttgtgtatttagtctgagtcattcttccatcgtgtacttgttgtattccttccactcagtccagcactgtacacatttaacagttacttccttgcctgaaaaagcttcactactttaaatttattttctcttttaaaaatagtattatttgacatataaatgaagatatgtaatatccttcacaatattttatctttgggtttctctttttttgttgttgttttgtttktgttttgttttgttttgagatggagtccctctctgtcgcccaggctgcagtgcygtggcgcaatctcggctcactgcaacctccgcctcccaggttcaagcaattctcctgcctcagcctccggagtagttgggattacaggcacgcaccaccgtgccgggctaattttttgtatttttagtagagacggggtttcaccatgtttgccagggtggtctttcctgacctcaggtgatccgcctgccttggcctcccaaagtgttgggattagaggcatgagccactgcccctcaccccctgctgaatttctcttgtttttaacagaaaaaaaagaatgacataagattatgaattgaattgcatttctagaaagctattttatctattaaaccagttgaaactaaactcttggctgtgtgctggatgaaagtagtttttatatgacaactgatggctgtgtgccttttaaaaaatagtaaaatatataatctttgtattaaaaagtatggaaacatatacatttagcagataataaagtgaattattattaacaactgtcagtgtcaaggaattctgctaacatccgagaatccctcttgcctcctttctgtatctaatatcttctctctccctaaaggaaaccactatcctatctttaagttattcatttatttgcttttcttaatcatttactatctaggattatatccctaaatgttataaatttagttttgtatgcacttgaactttatatgaatggaatcatattgaacatattcttttgtgtcttgcctctttcaaagtcagtattgtgtttgtgaggttcatctttatcacatagagctgtagttctttttcgttgtagcattgtattctattatatgatgatatcaccaattatttactattgtacaattaatggatatattggttgcttccagtttttggctcttacacaaaacggtagttgcacatatacatgagtttcactaagagttaatccaggaatggaattgctaggttatagggtagtgtatctttaattttaccagatgatgccaaactaattatacaagtttacattcccaccagcagttgaagaatttccttgccctgccaggcgcggtggctcatgcctgtattcccagcactttgggaggccgaggcgggcggatcacgaagtcaggagatcgagaccatcctggctaacacggtgaaaccccgtctctactaaaaatacaaaaaattagccgggcgtggtggcaggagcctgtagtcccagctactcgggaggctgaggcaggagaatggcgtgaacccgggaggaggagcttgcagtgagccgggatcgcaccactgcactccagcctgggcgaaagagcaagactccgtctcaaaaaaaaaaaaaaatttccttgctctgcatctttgctaacatttaatattgtcagaattttaaagttttgacaggctgataatgtgttacatttctcattgtgcatttaattcacctttcacagattactaaaagtaattcttttaatatgtttttggtaatttgaatttcttcttttgtgttcaagtctcttatccatttttctcttgaagtctttgtttgtatgttgattgtgtgtgtgtacaatatatgtgttttgaattttaaccatttgctggtgatagttattgctaatatagtctcattctgagacctgtcttttcattctcactgtagtgtctttttatgaattctttaacatggtccaatttgttagttttttcctttacagttgatgctttttgtgttatgtttaagacatttcttcctaatgtgtgatcatgaagataatcttctatattatcttctaaaagctttatgattttgcttttctttaacaattagatctataatctacctagaatagatgtttgtaaatggtatgaggtaggggtccagtttcatttttttccccatatggatacacaattgtcccagaactatttgctgggaagaaaaataattccccactgctctgcagtgccctgttatgtagcatgtgtctgtttctgcattctccgttctcttcattgatctatttgtctattcctataccagtatcccactgtcttaattaggaaagaattaaaataaatttctgctgcttcttcaacatagtttagtagtattgttggcccttagggcttctatgtacattttccagttagcctggttgagtgccacaaaaaatctgtgtttttttggagagatttcattgaatttataaatcagttttggaaaaattaacctctctttgatattgagtcttcccacctgtgcatgttttatctctgtttaggtcttttttactatcttaataatgagttacagtttttttccctagaagtgggaacacaaactacttcaaggatgttttaaatactttgtttttcctgttagaatttcctccttgtttttgttgtgtacaacctttagtagccttctgagaaaggatccatggaaaacatattttttaagaacttgcctgtctaaatatgtctttattataaggtcacaacttaatatatataattctagttcaaaagtaagtttttaaagaatttttaagatttagaatttgttagttttgaagactttcttccattcattatcttttggctgcaagagttgctgttgaatgtctgatgccatttggcttcctggatcctttgccatctttttctcttaatagcctttaggattttcttttatcctctgttcgtggtgatgtactttgatataggtcttttcttcttctttcgttttgctgtgctcttggttagtcctttcaatccaaagacttatgtccttcagttctgtgacattttcttgtattatttatttgacagcctccacccaccacttcccccaataatgactcttgccatggtcttaagattcttcatgtccctaaattcaggggacacttaccatcttacttgacctgtcattaccatttgagatacttggccattctttcctttaaaaagttcatcttggccgggcgcggtggctcacgcttgtaatcccagcactttgggaggccgaggcgggtggatcacgaggtcaggagatcgagaccatcctggctaacacggtgaaaccccgtctctactaaaaatacaaaaaaaaaattagccgggcgtgatggcgggcgcctgtagtcccagctactcgggaggctgaggcaggagaatggcgtgaacccgggaggcggagcttgcagtgagccgagattgcgccactgcactcccgcctgggccacagagcgagactccgtctcaaaaaaaaaaaaaaaaaaaaaaaaaagttcatcttttggcctttttttttttttgagatggagtctcgctctgtcgcccaggctggagtgcagtggcgcgatctcggctcactgcaagctctgcctcccgggttcacgccattctcctgcctcagcctcccgagtaggtgggactacaggtgcctgctaccacgcccggctaattttttctattttttttttttttttttttttttagtagagacagggtttcaccatgttggccaggatggtcgcgatctcttgacctcatgatccacccgcctcggcctcccaaagtgctgggattacaggtgtgagccatctcacctggcccgtcttttggcttttaagtcaccatactcttgattttccttccacctctgtgtctgttcgtcacactcctttgctggttcttcctctttctgactttaaggtgtgggaattccacagggcttgggtataggccaccttctccttttcttaagagaaccggtcttctcccatggcttcaattaccatctaagtgcaatttctatctttaccctaagacctcccttttgaactccagatccacacatccaactgtctattagagatttctgcttggatgtctcacagataccttaaactgcaagtccaaaacatgaactaattcagctcatgatgtcagtcacaaatttgctccttctgtcttcccactcagtaattaccacttccatctaccagttgcataggccagagacctagaggtcatttttaacacctgttgctgccttccccgccaaacctaattaaacaccaaggcctgttaattctacctactaaatatttctcaaaaatacttctttctttcttcactgtcatttcactagtcaaagctgctatcatctcttagactactgcagtcttattggtatgtttttgggcttcatataatcatttacatgattcttttaatcctgtaatcatttaatatattcctttgtgttgggcttcttttgccaaacattatatgaatgagtttcatccatgttgttgcatgtagtagtaatttgatctttttctttgctttatggtattttatgaaatattatagtttatccattctgtagtatttggattgttttcactttttgtatgttaaaaatatgattcacggcccggtgcaggggctcacgcctgtaatcccagcactttgggatgccaaggtgggagggtcacttgagcccaggagttcaagaccagcctgggcaacatagggagaccccatctttatttgttttattattattattttttcttgagacagagtctcacctctgtcatccaggctggagtgcagtggcgcgatcaactccccgggctcaggtgatcctcccaccccagcctcccaagtagctgggactgtaggcacctgctaccatgcccagctaatttttatattttttgtagagacgggattttgccatgttgcccaggctggtctcaaattcttaggctcaagtgatctgcccacctcggcctcccaaattgctaagattacaggtgtgagccaccatgtccagccttaaattttttaaattaaaaaccaaaaaatacgattcatgaatattcttgtgcattttggtgcacatgtgccattatttctgttggatatataccgggaaggaattttctgggtcataggttatacatatcttccaaagcggttgtaccaatttacactcccatcagtagggtatgggagttttcccagttgctctgtgtcttcacttacacttggtattgttattaatattatctttaatgttttttgttagccattctgttgagtataagtggttttatttacattttcctgatgactaatgaagttgagtgcctttttatatgcttattcaatatttgggtatctttttttggtggaattcctggttatttgcccaattaaaaaaaaaaagctctattttgaggtataatttatrtaccacaaaattcacccatataattttgtgagttttagtaaatctgtatagttttgcagccattactacaatccagctttggaagctttctgtcacccccmgaaagttctcatgtgcctattttgcagtctgtctctattcccacaccaagctcaagatagcccttacttgctttcggaatggctctgtaattttgccttttctagaattttttaataagtggaaacatacaatatgtattcttaatatgtatggctttttgcacttagcacagggtttctcagtgttggcactacagccrttttggacaggataatccttttttgtggagggctgtcctatgcactgtaggatgcatccctgaccctacccctttgtgacaacctaaaatacttccagacattgccaaatgtctcctggatggcaaaatcagcaccactggttgagtgtaatttttcaggattcatctgtgttattcatttgtctattaaaatttttggttatttatattttccttaatgatttgtaggatatgaggtcctttttccacaatgtagattgcttttcatttatttaattctttttcctgatccatagaggtatttttaaattagaaaataaatttattagaaaacaaaggttgaaaataaacagaatgaacaaactctatttttgcttgccccaaaayctcaataaaaactgttatctggccaggtgcagtgactcatgcctgtaatcccagcactttataagtttgaggcagtaggattgcttgagcccaggaattcaagaacagcctgggcaacatagcgagaccccatgtctacggaaagtagtaaaaaaacttagctgggcatgatggcactcacctgtggtcacagctgctggagaggctgaagtgggaggatcccttgaacttggtggaggctgcagtgagctgtgattgtgccactgcactccagccttggtgacagagcaagacctcgtctcaaacaacaacagcaaacaactattatctcttaaaattttaatattttttcatataagttctgcatttccttgttaaatttttgccttgatagtttatctttccagctactattttgaatgggatagttcttccattatgttttgcaattattgtttggatataagaaagctattaattactattctataatatcttaaccttattgagtgctcttattgtttattttcccctcaacattgaagtttttcaatcctataaaaatgttgatatgtaaaaaaagttgtatagagaacatacacatatcaactacctagattctacrgctgttcatattttgctatactgactttattacacacgtctatccatccattcatccatttatccattcattatctgtttctctttttcattttcttaaggattttctcttctttcaagtatttgtacctttgtttttttcacttgtctaattatgttgattaatccttcctgaacaattctaaataattcgacattggaaatgttagtaatttagtgaattattttataatatattttctggcacaattttaaagttttaaactttccttcttagttttctgttttctaccagaaagttattgtttatgtgctgacatagacttctagataaagtggcatattactttattcccatgtttcttatttgtaaatctgtatttaaattcacacagatctttaacataactctgtaacagaagcagttaattcttattttgccagtgtctctatgtcaaggtacacttctgcttgaatataagatgctattgctgttactgtatgaaatgttgcctttttattataaaaatctgtcacttttatgtaccaaaatgagaactgagatggttttgaaatttcagaaaaaattttaacaaaagaactaatcgattcagtgaatatatattttttttccttaaagagcaatcattttcagaagtagtttttaagtgataatctcatctcaagataatgggaagaaaaatgtcaagaccagggcatttattttatatccctgtgtttcttactaacgtgttttttatctgtaaggatataactactgaatgtacatatggagtataaaaacaatattttattgttcttttaatttataagatgatcaacttttccaatttaccagcttatcagctcacatttcttcctataaatcaatgctgaaatattagttaatttgagtgctttctttagaaagggaaggtatttgaatcatccctccttccatcccttcctcctttcttggaaagtgtgagcaaagttaataaatttcatttctctttgtatgttgtcattttagcatctcaattttaaagaaatgtactggaaatcaagatattttattttttaattttaattttaatatttttttgagacagggtctcactctgtcgcccaggcaggagtgcagtgccgcgatcttggctcactgcaacctccgcttcccaygttcaagtgattctcatgcctcagcctctggagtagctgggattacaggcgcccgccaccacacccagctaatttttgtattttttagtagagatggggtttcgccttgttggccaggctggtccccaactcctgggcttaagctatccgcctgccttggcctcccaaagtgctgggattataggcgtgagccacygtatccagccaagatattttatttttgcttgtaaagcatgttttatttccagttggtatgttgtatggcatgagctttataaagtctcttaaaattttaaagatctgtgatatggcttattcacatttaaagataaagtaatattacataatttatttcagagtatcctgccaaagttttataaagaatggccaagaaactagcataccatatctgattttggatctttaaattaaccttgatagaatcttttttctggcctgcttttttttggtctgtgccctgatggatgtgaagtaatatcgtccctgattactaatgaggttgagctcattttcatatgtttattggccatttggatttcctgttctctgaagtgattgttaaagtcttttgggctctctttctttttcttattgatttatgggggtcattatacattttggatacttatcctttgtccgttatatatgaggcacatattttcttttgcattgtggtttatcttttcactctctttaggattttctttttttgtgtagacattttaagttttaatatagtccaatttattaacttttccctacatggctaatgtttttgtcttaagaaattctttcctaaccaagatggtgaagatatcctgctgtgttatctttgtaaagttttatggtattgccttctacattaggtgtgtaattaaactggtgttkatttttgcttatagagtgaggtaaggaccgaattttattttttctatgtagatacccagttgtcccagcaccatgtactttaaagaccgtccttttcttactgctttgcaatgcttccatcatataatggatgtccrtacgcacatagtatatttccatgacattctcttaggttaaatttttaggagaattgttagagcaaaacaaatgattatttattaatgcttattttgaaattacaaaatttgtgcacatttatttttcaattttttaattgtagtaaaatacacataaaatttactgtcttgactattttttatatcctgtgaagattcaccatcgtcatgatttttaaatgtctagttcagtggtattaaatacattcgtaatgtgcaactgtcaccactgtctgtccatcatgcctcttatcttttaaaatgaaactctaccgtgttaaacagtaacttcctatttcttccttcctcctgccctaggcaactgttcttctactttttgataccatgattttgactatcctaagtacctcattaaatggaatcatacagtatttatcattttgtgacttagttcctttagcgtaatgagccttaaggttcatccatgtcatagcatatgttagaatttccttcctttttaaggctgaataatatttgtggtatgtatatacacattttkcttatccactcatctattgatgtcacttggattgcttgcatgttttagctgttgtgtatttagctacgaacgtgggtgtacaagtatctctttgagaccctgctttcagttttttagggtatatacccaggagtgggattcctggatcttgtaggaatctatttttarttttttgggggaactgccatattgttttctgtagctgtaccaattttacatttccatcgatttgtgcacaagagttctaatttctccacatctttacctatacttgttcttttcattcttttttaaagtaatagtcatcctagtgggtgtaaggtggtacttatatagttttgacttatatatctctaatattagtgacgttgarcatcttttcatgtgcttattggccatttgtatatcttcctgggagaaatacctgttcggctcctttgcctatttttgaattgggctagttgtgggtttttkttgttgttgttgttgttgttgttgagttttaggagttgtctgtatattctggatattaatcctcatcagatacatgatttgtaaatattttctgtcactttataggttgccattttactgtaatattgtcttttaaaatgtataacattttacaattttcatcaagtccagttccgtgttttcttttgttgcctgtgctttagtgtcatatctcagaattcattgtcaagtccagtatcataaagcttttgcctcatgctgtcttctgagagttttatagttttaggtcttacatttaggtttttctttggtccattttgagttaatttttgtttatggtgttaggtaagggtccaacttcactgtttcacatgtggatattcagatttcccagtaccattttttgaaaagactgtccttttctcattgactggtcttggaacccttgccaaaaatcattagaccatatatatgccagtttttttttttctggtctctattccattggtttatatttcaggactgcactgttttgattactgtagcttcgtagtaagtttgaaatcaggaagtgtgagtcttcaagctttgttctttttcaagattattttggctattcagggtccattgagattccatgtgaattttgggatagggttttctattactgcaaaaaatgtcattgagattttgatagggattgcattgaatctgtagattgctttgggtagtattgacattttaacaatattaggcctccaatatatgaacatgggatgtgtttttatttatgtctttgatttcttccagcattgattttttagttttcattgtacaagtctttcatctccttggttaagttaattcccaagtgttttattctctttgatgctatcgtaaatgggattgttttccttactatttaaaagtctttatttttcttgaatyaatttccagacgtggtacattttttgtcttattttaaaatatatttttgaaattgtctttttgtgttctgtttttcatcttttccaactatgcaatctatgcacatttcctcagcttctttattacacagttgtgtttgtttctgcatattcatgctgctcagagtcaataagtccttgcaataagcaggaaaactgtgtgatctgagaattggtaaaacattttggaaactgcagacttagccaaatttaacttattactgacaccattttgttgctatattttgactgaccagtgactaaattttgaatacctaaccagaacaatataaataaaatagagtttgggaatgtgaagaaaatataaggagaatataaagtatatttctttctcttttgcagatttcaggaaatgacataatccttggaatttctgtaatattttacagaaattacagaaagaatatgtacagtcgatcctcattatttgcagattttgtatttgtgaatttgcctacttgttaaagtttacttgtagtcctaaaatctatacttgcggcacttacttggttatttgtgtgtatgcgcaaagctgcaaaaaaatttgactcctctagcaagcacattcccagctaaacttgaacaaggtgacactgccttgatttcacctctcatgaagagatgaccagaggacggagacagcagagggcagtgtagtgaagtgcaagaaggtctggctgtgggggccagttggatagggtttgaatcccaagtctgacatctgtttttgggatggccttccgcaagtcacttaacacttatacacctcatttctcttttgtaaaataaagaaaggagaatctccctggatgaattgttttcaggatttaagaatataataatctatgtgaggggtgtgtgtatgtgcatggttttccctatgaacaatgtttcagtagtcgctaattcagtgcttgcagtgattttataaaacataactaccacaaataatgagaattaactctgtgtgtttgctaaatgatgatgartgattttattcttttttaatattgatacttgttcctaccaaaatcttagcaggactgaaaagatcaccataatttgcatgtaatttaaaacagataacagtatgaacagtctaaaagtatatgcttccttcagtgcggtttcctctctcttcacttaatagctttttggaactttggatatttattacccaaacgtttactctactctgtaccttagctctcccatctgtgttgctcataggttttgaaggattatgccagttcttaatctcagttccaaatacgcccttctatgctttgtgatgctggttcaaagactgcagatcacatttctgccttgctagcagctcatttctgtttcaaaagtatagggcactagagggaggctgcaaggagaaggaggaagaaatgacttacacctttgtcttgtttcctgtgaacttcctgtctgcttgttactttgaccatcacccttgtagaggttttttttttttttgctccagcatcagcagtttctttctgtagcagctgttgaatacagtttgtagtttttccaacactcacagaactaacctcatcataacccttcataacaccagcaccagttggctggtaccctgttcctcaaaagtttgggtcgcagtctcacaggacccctcttcagagacaacagcaccagctgagcagcactctgtcctcagaggtccgtctgagtttcagctctgtggaacccttcctccaagcttctgaattttaataattccaatcttttccctttgttcccatagtcctaggggtggtagcttttgcctgtagttgttacctccctgatcctttgtattattttttcagttrgcaacagagttagtcattgtttttattaaatttctctattaaaataatcaatgtgattttcctcctgtctggaccctaactgatacaaggattaaataagttactaaatggaaagtgcagagaacagtgcctcttctaatagcamgatggatattactatatacgataacatacttgaaataatttgagatttttcttactgatttctttgcaaaatactaatatttccaatttatataggtaaaaacattaaaataatcattgaattttattgatattaatatgctcaaatatcacctcggttagacctaacttaactaccctatttaagttgtaaactctggcctgtgtgctctcataccccatttcctcatcttattttatgttttttgagacagagtctcagtctgtcaaccatgctggagcgcaatggtgcaatcttggctcactgcaacctctccctcctgggttcaagtgattcttgtgcctgagcctcctgagtagctgggattacaggcgtgcaccaccacaccgtgctaatttttgtattttttggtagagacagtatttcgccatttgtccatgctggtctcgaactcttgggcccaagtgatctgcccacctygtccttccaaagtgctgggattccaggcatgagccaccgcgctcagccttctcatctttcttattagtttactttttcccacagtactaattgctaatatactgatttatttgttgactgtccactccccaaaattgtaagtaccccagcacagagagattttgcatatttgcacattgtcagcatctagaacagtaacctaacatatagaaggcactcagtaagtatttgttggaagaatgaatggatttcagcagatcaactcttttggtcaagatttgaccaagatttttaatagatttttatgcagtagttcccccttatccgaggtttcactttccatggttttatttacctgcagtctgaaaataggtgagtacagtacagtaagatgtattgagagacatcattcacataatttttatgatagtatattgttacarttgttctattttattattattgttgttagtctcttaccgtgcctaatttataaattaaactttatcataagtatgtatgcaaggaaaaaacatagtatacatagggtttagtactatccaaggtttccagcatcctctgggggtcttgggatgtattccctggggatagaggggacggctgtattacgtttcttttctagagcacatttcgctggggtgttgtttgtctttgtgttttctgcagcttggaccagtgccttgtagtggatgttcatgaacattttgagttgttcgtgaacaatttgagttgtttagtttttacattttatggttaaatgttcttacacactggacaattaggctcttcttcttttggtggggggaagaatacctcagccttgagatgaaatcaaccagattgatagaatcagtcccagtgattattttttctttttattccttrttttttagattccttttgtatttatcttacatattttttgtttgtttgtttgtttgcctttgattgactaacacctctgtgggactgaaatcatctctgttttctgtgctggtctttcagtttccagctaaaaattttattaaaatatattcttcactatgaaatactatataatgttagaaaatgtaaaaatatagaaagaaaataaatgaagatttaaaaattattcctgtactcaccacccagggaataccttctgttcaaacaagagtaatatgagggtgtaatttttttagaatatgaaaccagtatggaacwttcagacaacttatgtttcccagtatccctcatttgtttatgtaatgtggccawgctctactgatgattcatgaaaataaaaacagtgattttaggtgatcatgactgatatttgaaatctttttatcaacagaagttatatttttaaattaagattgggatttgttattccatttttgtttttaacatttgtttagttcagtagwgcccatcctctttggcaccagggactggtttcatggaagacaacttttccacagactggatgcggggatgttttggggataattcaagtgtgttatgtttattgtatactttgtttgtattattactacattgtaatatataatgaaataattacacaactcaccataatatagaattagtgggagctctgagcttgttttcctgcaactaaatgttcccatcttgggctgatgggagacagtgacagatcatcaggcgttagattctcataaggagcacacaacctagatccctcacatacgcrgttcacaatagggttcacagttcacgatagagttcatgctcctctgagaagctaatgctgctgctcatctgacaggagacagagctcaggtggtattgtgagcaatggggagtggctctgaatacagatgaagctttgcttacttgcctgctgctcatctcctgctatgcggcctggttcctaacaggccgtggactggtactggtttgtggcccygtggttggggaaccccgggtttagttatttcattaagcctttatgtgaagagttttttttttttttttttttttttccctgagacagagtcttggtctgttgcscaggctggagtgcaatggcacgatctcggctcactgcaacctctatctcctgggttcaagcaattctgctgcctcaggctcccaagtagttgggattacaggcatccgccaccatgcctggttaattttgtatttttagtaggaatggggtttcaccatgttggccaggctggtcttgaactcctgaccttgtgatccgcccgccttggcctcccaaagtgctgggattacaggcatgagccaccacgcctggcctatgtgaagagtttttatgcctttagatattaggtagataagctcttttttaaaaatactttatgtcccagttatattagtgtagagaatagtgtcacacacttgtaaatatttatttcagttttgtttttttaaagttttttagaactagatcctgatgagtaatcatgttattttcaagcaataatttgaggcactattcttttaatgtaacttttattatttatattaaaccaaatgatatcattgttggtataatcaatatatgacagaatttgttactgtgaggaattttagaggttatctagtgtgagttatttttcttccttcatgccagcccattcacaagtataaaagatacatctttaaaatctccaggacatcagtcaattaattttagtggctgcgtcatttttcattgtagaactgtactgcatgatttaagcaggttcctgttaagtgacatttaggctgattcactttttcactattgcaaatggtgctttgatgagtatttttgtatgtgcatgaattttattttatgaaattatctccttctgataaattcttaaaagtgagatttagacatttatttattgaaacatttattaacttwaaaaaatttagtatctgtttttaatgtaataagtggagttttgctgaagtgatgttaatatacatcatagtgaaatgtcttataaaaacaacctagttagcattttaagatctgattcctaacgttaaaaatgatcctagtatctactacatatttggaaacctttcatttataataaatgatggtgagaagttaaccaaagaaggaaaacgagaaagttaaagtactaagaacaaggaaaaatgaccaaatgatagaaatatggggagactggaaagggtatagaggaggcaaaactttgcctccaccctcttagcgtccctgctgggcccgagaattaaactgacacaagatagagtagaggagaaaagcatagacatttaatataagttttatgtgacatgggagccctcaaaagaaaatgaagtcatagagaaatggcaaaacytacatgcttttgtgttaggttgaaagaagagaggygattgtagaaaagtagatatgttatatggggaggctaaaggaagatgtttaatttaacaaggtctgtttgtacacaattctcttgactgtgactccctatcaaagaatgtttcttttctcctgggatagagaagacgtcttttacaggaacattttcatctcctagtttcaggaagaaaaggtggaagattagaatgcccttcttgcatctgctatttttcaagtgcctttcaaactcaaagtgatccttatgtcagagtggcatgtttgaagtggtgtattctgccacccttcacgggtaatgattatgcctagtgttccattaacggaacgctaagcttgtgggggttatttatatcctactgcccaaggtaattgccaaggtctgatttttcacaaaaaaaatttgcaacctctagcataaatgggttaatttcacacacaaaaatttgcaacctccggcataaatrggtttcaacctccagcagaaagggctttggaaacagacctggatttaaattctgtttctgcttcttactagctacatgacctgggaaagccttttaacccctcaaagctcatttatatcctcctttaaagtagaggtaataatatatcatggggttgttgtgaagattaaatagtaatagtaattacagctaacatttttgaatccttctatatatgccagatagtatattaaatgtttatatgtggtttttttttttacttggcagatatatgttatcttaattctcatgaacttgtgagatgtagataatttttactgatgaggagactaaaagagggattttgtaaattgccccaagcaacacagctaataagtggcaaaaccagaatttaaatccagcagtctgacccaccagaggctgtgatttgaaatgctgtcccctatgtatatgaagcccttagcacagtgcatagccatagcatgcattaattcatatttatgttkaggctgtcttttataaatagtgtgtcaagagaatgagaagacaagccacagactgagaaaatatttgcaagacacatatttgataaaggaaagttatccagaatatgcaaataactcctaaaacttaacaattagaaaatgaacagcccagttaaaaaatggtcaaaagatttgaacagacatctcaccaaagatttgacaaataagtatatgaaaagatgctcgacatcatatgtcatcagggaattgtaaattgaaaagatacaagtactactatgtagctgttagactggtgaaacccatgcttgctggcaaccccaaatgctggtgaggatgtggagcaacaggaactcattcattgctggtgtgtatgcagactctttcagccattttggaagacagtrtggcagtttctttttttttttttttttttttggagacagagtcttgctctgtcayccagactggagtgcagtggcgcaatttcggctcactgcaagctccacctcccaggttcatgccattctcctgcctcagcctcccgagtagctgggactacaggtgcccgacaccacgcctggctaattttttgtatttttagtagagacggggtttcaccatgttagccaggatggtctcgatctcctgacttcgtgatccgcctgcctcggcctcccraagtgctgggattacaggcgtgagccaccgcgcccggccaacaatttggcagtttcttaaaaaactaaacatactcttacgatatgatccagcagttgtactccttgtttattacccaratgagttgaaaaacatgtctacacagaaacccgcacatacatgtttatagaagctttatccataattgccaaaacttggaaacaaccaacatatccttaagtaagtcaatggataaactgtggtataactagacaatagaatattattcagtgctaaaaagaaatgagttattaagccatgaaaacattaaggaactgtaaatacatattactaagtgaaagaagctaaacagaaaggtctatacatactctgattccaagtatatgacattccagaaaaagcaaaagcaaaactatggatgcagtaaaaagatcagtggttgccaggggttggaggaaggaggggatgagtaggcagagcacagaggatttttagggcagtgaaactattctgtatgatattataacgagggctacatgtcattatacatttgttgaaacccatagatgcaagagcaaactgtaatgtaaactttggacttgggtgataatgatgtgttaatgtaggttcatcatagcaacagatgtatcactctggtgtgcagtgttgatgggggggtggttatgcatggagcacgagggaactttctgtactttccacgcaattttgctgtgaacctaaaactttcctttatcaaatatgtgtcttgcaaatattttctcagtctgtggcttgtcttctcattctcttgacacactatttttaaaagacagcctaaacgtaaatatgaattaaatatgaattaaaacttaaaatctattaaaataataaaaaattagaaaatgatgcatttgaaatgtgacacttctgatactttcattttcaggcccagaataaagagaccagtgttttagctgctgcaaaagtgattgacactaaatctgaagaagaacttgaagattacatggtagagattgacatattagcatcttgtgatcacccaaatatagtcaagcttctagatgccttctattatgagaacaatctttgggtaagtattttctgttgatctaaaggagtagccaraatgagttaattgtcctaaagagatgtttatgaattattaaaacctattttatgtcttatctcttctatttagttacttgtgtcacttgaatgagagttgatctgctgataagagagtaataacaaagttattctcagcttcaacagatgttcagatttatgtttcagattgtacagtttcatcatgattgtttgacattggatccaggtggaaaaatttggttaagaataataaatttcctaaaatatgaaattagatgtccttgtttataatttaaatttaatcatttaaaagttttaaaagtttctcttagaaattgtttataattttttatcctaaactttttgtaaatcttgtaataaactgtaaaatactagaaatgttaaatatttatcgtattatcaggttcaactttagtgcatgatgtgatggctaaagctgtatgtataaattttattcattttcagaaaatattaaggtacaagtagatatagaaataaaactttcatattcattataataatctgtcaatcacttgttctgtaccaacattagtttaatcaagaggactttttaaaatgcagcttcagtctttcttcctgaaggaagaagcaaagttttatgagagagaagagtaagtagtataaggaatacctgactggatgcctaaaggtctatatttttttatcccagtgctgccacttacggaacttggataagtcagttaacttttatgagtctgtttactcatctgtaggatgagtaatgatctacctyccaaattattttctgaataatgtaatgaatttgaaaacaatttctaattggcaagcacttgtaaaaaaaaataaagcattatgctgagggaaaaaaggcaggaagctacctaattagttaaaaatatgttattttttaaaattatagttattattaatgtggtgttttctgaaattattgttcagggctgtygcagaatgtttccaaagattataatgcaaatgaacccatagactagttaataaacagataagacctttacttgggactattgcacaataaaaatttagacaactgtgaggggaagtttagtgggagacataaatgttaattaatcaaataatcacaataaatataaaattacaactgtggtaagggttaagaaggaaaggtacatggtgttatgtcttaccagggaagtcaagataagcacctatcagcaggtaataattgagctcggatctgaagcttttgtgggtatttcttctgttttttttttttttttttctaaaagaagtctctgtataaatattttcaggatttattcctatttaatacagtttaaaaaaacaaatgtatatttgttcacttaaagcacaagttgccttaaaaatrtaagtaataaaatctttcattggtgaccaaatagctgtgcagtacaataccaaatgaaaaagttctgtacctggtagttgtagagaagcagggacagtaaacatggcaattaacaaaaatgcccatgctttcacagtgggctttatcaaatgcatattgtttgagatttgtaactcttttgacaaartcttcgtttagtatatygtttccataaccagattatttgatagctatttctttatcttttttgctaagctgaagaaaaaatactgaaactcaaaactccatgtagttttagacacacgcttttttttttttttttgcatgcagatcctcattgaattttgtgcaggtggagcagtagatgctgtgatgcttggtaaatacctttttgttctttctgttcatatcttaaattatacttgataagatgaaagaatttcaaccatatataaatatattcaaatatgtaagtatygagtaaagttcagtaagttaactcaagtatgtttttatattcttggataattatagtaaaattctaaaatgaaatgttgagtgtgtcaagaatgtgatctttgtagatatagttcttttaaaataaattccctgcatatgatctttgacagtgatgatatatacagaaaggtatatagcctgctaatatgttttcactgtataaaaagcagatttttttttttactttctccttatagaacttgagagaccattaactgagtcccaaatacaagtagtttgcaagcagactttagatgcattgaactacttacatgataataagatcatccacagagatctgaaggctggcaacattctctttaccttagatggagatatcaaattgggtaagttattcacttaaataaaacattagaatttttactctgaaatttccatctttatgtatgtgacttaatgtggttttattactacttaaatatgtgaaacatggagaactaactccatgctggtttttaaaaaacacttttttaggtaaatactcatttttctrtaatttctaaatatcagcacctaattgaatgctttaaaaagaagataagaaagaatgaatttttattttcaaaaaggcatgctttttaaagaccaatttcaagtttgtacccttaaatttttgtacgtagacttaatacttgtaaatgttttatgtttagaatataatatagtatgtaaaactgctaactcagttttttctttatttccaaagttcatgtctagtgagtttttccccatgtttagttttatattctattttattgatatggtacgttgactaaactaacaaagtaatcttagttctgaagagaatacctaaacgtaaggactagaatttttaattttactctttatactgagggaagaaatgttaccttcataagaagaattagatgtaggtcttatgaaagttatagcgctctttacccaagataggaattatttaaaaagtctagagatgaagtccaaatttgtatattttggaaggctattcaaargacaaaatatattcagaagtcaagttgataccagtgactatagtcatttcactttactttgtcaagacatttaaacagatggtgtactaaattttattctttttaatttttttttaacggagtcttgctctgttgcttaggctggagtgcagtgatgtgatcatagtttactgcagccttgaacccctgggctccagggatccttccaccttatcctccctagtagctggaactgcaggcatgcaccaccaygcctggcgaatttttaaaaatttttttgtagagatgaggtcttgctctgttgaccagactggtcttgaattcctgggtgcaagtgattcttctgccttgggcctcctgaagtgaattttaaccttttgattgtgaaaaattacagatatagaaaaccacaccagaaattgtgtagcttaagtttagtactttgtagacatagctttgtaatcactacctagatcaaaaagtagaactttgacaggcatcccagaagctcttccgtatgcccatctcagccactgcccttctcttctccacattttatcctgacttttatattatttccttccttgtgtttctttatggcttagtcacccagtattcatctctagatgttagggtttaaacttgctcatataaaacttgggtttttaaagtctcttaacttacaggccttcccccattcctttcttttctttatattatggcatgtgtaatgggggatgagggcaatatcacccacatgggtgcaaaaattagttctttagggccaaaaaaaaaccttatgcattacaatggtttgtgaccttccaaaggccccagtacatgaagagatataacactgtatctatggcattaaaattttatgggaggagggatgatgtgaaaaaaatgtttaaaatgactccttagaggggctagtaatgaaacactgatccatggaacctgggctgtttggcctgttgtgtttccctcaaactgcattttgctattgcatactcctgatgattgaagttcctttctgtatttccttcagtttggcagatgaatccaaaggcttgatcagtctcaagcctgatcctttggcaagacttacaggtggttttgcattctttcattgggaggcacaccgtgtctgctttgtgcccttttttgatgttgcatctattgaggcttaatgcctacacctctgtcttttggggttgcaaaacgaattccattattttgttttcattattttcgataatgattttgatataaacaccaattatttcattattttcattcattataaaattagtaatgaagataatgacttggctgtctcttatcctcaattgatgaccagtgttttaaaaaatattgttagttcatggatttaattttatttggttggtttcaaatccattgcagtttttattcttattgaagctcatgttgttccatctttagtcagtggggtcttcctcgtgtctgcttgttggtcttcttgacagcactagtaatctttgatagcttacttgacagttctgagatgtttcaggctcatctgtgtatttcctgtgtcagacctgtaattaaccatttcttttttcttttctttcttttctttttttttttttttttttttgagtcaaagtcttgctctgttgcccaggttggagtgcagtggctgatctcagctcactgcaacccccacctcctgggttcaagggattcttgtgcctcagcctcctgagtagctaggattacaggcatgtaccaccatgcccagctaatttttgttttttagtagagatggggtttcaccatgttgaccgggctggtctggaactcctggccagaagtgatctgcccacttcagcctcccaaagtgctggaattacaggtgtgagccactgcacccagtgtaattagccatttctttaagaagccctggtttcttttagtagaatatagtatttcaagaccacagtctggtgtaagagatgcttgcagttttctatattggccattgttctaggacttttcaaaggacagagctagaaccctcatgagttcatatatatttcctattcaaattcaggataaaggtttttaaaatctaacctctgtaataaatgtgcatctcctttcttctatgttgagagttctggttctcaaggacattgataggtttaggatacctcataattcattttaaccctcatttctatatttaatgctcaccaccactccttatgttgatgtgtctttggtgatgttggttatctgaagctcagcttttggtagattcctctgaaagggctctctgaattcttacatagtgataacagttgtacccttatagttgaaggttagttttgctggataacaaatccttggcacaaatttctttccttcagcatctgaaatatgttactctgttttcttcagtcatgaagtgttgttgttgaaaagtctgataatctgaatttcttcattgtaagtcatgtgctctttttgcttagatgctaaaagtttttttttttttttaagaccagtagtttgaccagtcttttctaataaatattttttttcttttcttttttttttttttttgagacggagtcttgctctttcacccaggccggactgcagtggcgctatctcggctcactgcaagctctgcctcccgggttcacgccattctcctgcctcagcctcccgagtagctgggactacaggcgcccgtcaccacgcccagctaattttttgtatttttcgtagagacggggtttcaccgtgttagccaagatggtcttgatctcctgacctcgtgatccacccgcctcagcctcccaaagtgctgggattggtgtgagccaccgtgcccggccttctaataaatattatgctcgtacaatattcgagtgctttcttccccgcccccgacaggaaagttttctggagttatagatctgagcatttgtttgttcccttgcattgacttgcttctttagagacttttagtatttgtttgttggatctttgcctgttgtccatgtttgtaactttttctcaagtccttttttagcttgctttcttttttatygtaggaaaatatatacaacataaaatttacctttttgatcatttttaagtgtacatttctgtggtattaagtacattcccattattatacaaccattaccatcacctatctccatacctcttttcatcttgcagcagttaaagtctatacccattaaacagttagtccccattttccactcctcccagcttctggcaaccaccattctgctttcagtttctatgattttgaccactctaggtatatacgtatgtggaatcatacaacatttgtccttttgtgactggcgtattttacttaccataacgttctcaaggttcatccacgttgtagcgtatttcaagtcttccccttttaagattgaataatatgccattgtatgtatataacacattttgtttatccgttcatccatcagtgggcacttgggttgctttcactttttggctattgtgaataatactgctatgaatgttggtgtacaaatgtctgtcctactccctgcttttaattcttttgagtatgcacccagaagtggaattgctgaatcatatggtaattctatgtttaatttttttgagggaccaccatgctgttctccatagcaactgcaccattttacatttctaacggaaatgtacaaggcttccagtttctccgcatgcttgtcaacactttttttttttctatgctacatccatcctactgggtgtgaagcggtaatgggtatgaatttgttgtattatttgctcttgctttccctagkttagcctttgtttctaaagtttttcttttttattttaaattttttctggagctctgtcgcctttcagaatttttctaattctgacttacatggctcttttatgtttttcatcatttttaaaagtgtcctagcttattttgmaataggatgttacagttttgatcaattttgggggcattttttttgtaaatatattgaaattttatttgaatatagggacatacttgtgtaaaataatgtgtaccttatcaatatactgaaggtttaggaattgtaaaataatatttagttagttgacaattaaaatatttgtaatttctgtttaatttacaaatacttccagagaaccttccatttctgcaacacagatatatagaacaatcttatccccaagaaccatataatagataaaagtaattcaggcagaattgcatgacctttaagagttctacaacaaaaacaacaaaggttagaattgtgaatatggctaataatagctaccatttattgagtgtatactctgtggtaggcatgagcatcaaatactgaatttttggtacttattcaactttgagaattgtcgcatcaaatgtgaaacttaaaaattcgtgcatttatagcatgaggtgaattatgcagcaatagcagttttatgttgctgttaatgttgtgtgaactccaggctgaaaaggtgggattaacaactgaaaaagctataatgttactgttctgtataatttaaatcagaaaacataaggttcccaattttttcttgacaatataattttatgaggaatttagcaagacatacactgtcctaaaggttgctttagtataatttctatttttcacactatagaaaaaatgttaatgactcttagtttaattgtgccacatakcactagttggcatttattttgaagtggatagactggtctgcttttagagttaccattttttattttcaattttgraggatttgtcatctgaagataaggtggtattaaatgtattgataatgggatctttagyaggtttttttgggagatggtagaaagagatggtcaagattaagatgggagagacatctttttctttctgtttaacttactttttataataagattagccttattaaagacttaaaatgctttttctccccattgaatacaatgaacaatgcttaaaagttctcattaatgcttttgtgtgattatttcaagcggattttggagtrtcagctaaaaacacgaggacaattcaaagaagagattcctttattggtacaccatattggtatgtattcagttttatgaatttatagtattagtcatgtcagcagttataattactcatgaatttttgtccacataattgattataccatgtgttttgcaatcactgttcttaaacatgttaacttttaattatctgtcttcataggatggctcctgaagtagtcatgtgtgaaacatctaaggacagaccctatgactacaaagctgatgtttggtccctgggtatcactttaatagaaatggctgagatagaaccacctcatcatgaattaaatccaatgcgagtrctgctaaaaatagcaaaatctgagccacctacattagcacagccatccagatggtaaaaatattcttaaaaaagcttaataagaaacaaatgatactaggaagcagaacttgatgttatattctcacaattttccaagagtatttaaaattggatacatggttcgaagactrtatgaattagaaaagtgatttttggtatatttctcttaaagaccattaaaactcttcgagctcacttttcccatatatctgaaaatatgaatgatttgagttttgcatgagaaaggtattttctgtactatgaggaagtgaggtatatagattgatctatatttgtgaaatttattagaaattttgtgctttttggcatacttgtgagtatatggctgtctcagtgattatgtacctacttacatatatgtctaacatgtatttacagatgaataagttttacaaaatcttaatagtctcattaactagttatttaaatgttgaattaatactattacatacataatgaaacttaagcataacttatcaaagagttttgtttaatttgattaacaagaaagtaaaatagaatgttgttaaaatttattttaaaggtcttcaaattttaaggactttctaaagaaatgcttagaaaagaatgtggatgccaggtggactacatctcagctgctgcaggtaagagagtatgacaacagcaaataatataattattttaacatctaagaatgtaatttcatattcagtgtgctttctttccacttaaatttccctgtggagagtcaaaatggcagtagttaacatttgctttacaaaataaatgctgctgttaccatcaggcatttagcttaaacgttattcctcctgtgcttttttgattcagtttaattatgttcttttcattttggtagttatttccattatgtctctccagttactagaaagcaagctccttggggacaggggccgtgaactaattaattaaaaaatgtcttacagtgagggtaaatagtaaatattgttgacttaaaaaaatgttgttaaagygattgggtaaatttaattttgctttatagaaggactacttgtaatatattaatwaaaaattgtcaattttataggtgggcaaataaaatgacaaatcttgaggcaattactgttaggttattatgtaactccatcatagtgttttaggttgacctatttatctgggggaataaagcaggaaaaaattgctttgttgtgtgcagcaagtatayccctggaacacactttctattattattttgttacccccacacttgaagcccttagtctgcgacagacactgttaaatgttgagtatacaaagatgartaaaatggcttctcattctcaagaattttagaaccatgtcaaaaatacaggtgtttatagatacttctaacagaattctaaagctttttataattttgaggctttgatagggtttatagagatggttactttttaagaagtaataatgaggccaggtgtagtggctcatgcctgtaatcccagcactttgggaggccgaggcgggtggatcacctgaggtcaggagttccagaccagcctggccaatatagtgaaaccctgtctctactaaaaatacaaaaaatcagccgggcatggtggcacatgcctgtaatcttagctactcgggaggctgaggcaggagaatctcttgaacctgggagatggagattgcagtaagttgaaatcgtgccactgccttctagcctgagtgatagagtgagactccgtctcaaaaaaaaaaaaaaaaaaaaaaaaaaaagtaataatgtagtgacctgacatttgctttaaatttcaattaaaattttttattacgaagttttcaaacacacagaaagtacatgtacctactacccagatataacaattcttatcatttttgataaatttgcttcagattcttaaaaatgtayagatccagttgcaggtagtccctgcttttgctcaagccctctcccctctttctttctcagatgtagcattatctgaagttttctgtcattttcctgcccacatgttcatattttttaccacataagaatgtgtgttgtgtgtgtttgaaacttrgtttagtagtattccagttgttgagtatgttctttttaatgatcaacagcatccctttgttactgttgattccaacaaacccatccgagaattgattgcagaggcgaaggctgaagtaacagaagaagttgaagatggcaaagaggaagatgaagaggaggaaacagaaaattctctggtcagtatttaggaaagaaatttcatttagtgaatagagttcggttttgaggtgtagttgctcctgtatctaaggattgatgggtggcaacgcaaaacctttaaatttagacctgaagattagtagcaaggttgctcgtcgctgcacatttttgttatatttcccttttttttgagatggagtctcactctgtcacccaggttggagtgcagtggtcacyacaacctctgcctcccggtgtcaggtggttcttgggcctcagcctcccgagtagctgggactacaggcatgcgccaccacacccaactaatttttgtatttttagtagagatggggtttcaccatgttggccaggctagtctcgaactcctgacctcaagtgatcttccctcctcggtctcccaaagtgctgggattacaggtgtgtgccaccgcacccggcccatttttgttatatttcttrtgagaagaattgttaattctttaaattcagcaacatttactgaataaagatctgaaatcactgtaggtctgtaaacattgttttggtcactctaaggtcatgttttaacactaaaaatacattaaatcttttttagccaatacctgcaagtaagcgtgcatcttctgaccttagtatcgccagctctgaagaagataaactttcacaaaatgcttgtattttggagtctgtctcagaaaaaacagaacgtagtaactctgaagataaactcaacagcaaaattcttaatgaaaaacccaccactgatgaacctgaaaaggctgtggaggatattaatgaacatattaccgatgctcagttagaagcaatgactgaactccatgacagaacagcagtaatcaaggagaatgaaagagagaagaggcccaagcttgaaaatctgcctgacacagaagaccaagaaactgtggacattaattcagtcagtgaaggaaaagagaataatataatgataaccttagaaacaaatattgaacataatctaaaatctgaggaagaaaaggatcaggaaaagcaacagatgtttgaaaataagcttataaaatctgaagaaattaaagatactattttgcaaacagtagatttagtttctcaagagactggagaaaaagaggcaaatattcaggcagttgatagtgaagttgggcttacaaaggaagacacccaagagaaattgggggaagacgacaaaactcaaaaagatgtgatcagcartacaagtgatgtgataggaacatrtgaggcagcagatgtggctcagaaagtggatgaagacagtgctgaggatacgcagagtaatgatgggaaagaagtggtcgaagtaggccagaaattaattaataagcccatggtgggtcctgaggctggtggtactaaggaagttcctattaaagaaatagttgaaatgaatgaaatagaagaaggtaaaaataaggaacaagcaataaacagttcagagaacataatggacatcaatgaggaaccaggaacaactgaaggtgaagaaatcactgagtcaagtagcactgaagaaatggaggtcagaagtgtggtggctgatactgaccaaaaggctttaggaagtgaagttcaggatgcttctaaagtcactactcagatagataaagagaaaaaagaaattccagtgtcaattaaaaaagagcctgaagttaytgtagtttcacagcccactgaacctcagcctgttctaatacccagtattaatatcaactctgacagtggagaaaataaagaagaaataggttctttatcaaaaactgaaactattctgccaccagaatctgagaatccaaaggaaaatgataatgattcaggcactggttccactgctgatactagcagtattgacttgaatttatccatctctagctttctaagtaaaactaaagacagtggatcgatatctttacaagtaagtgtacrtgagtcattgtttgggttttcctttgccattttctcaattcagagtttatgtgaaattgatgtcttgaaaataaaacagcattaaattaatgtagtattaacaatataarttcttacagcctatgaaagcaattaaaaagaactaaggagattgtggatctaatctttaaattttgtggtaggatctacctatttttgcagacctgatgcagataaacagtgtaatatggttgcttggtgtgattaggttcctttattggacatatctagatgcaacattagcaagaatcaacaatgtatgagagaattagaaattgaaagaatgatstctttttaagcacatttagggtgtaaacaatccttgatttaccattggcccatacagtcacagacattgctactgccatgagaaccattgtggggaaaacaaaacaaacactaaagcccagaacacttggagctttgagtgtaattctcaaattttagtgtgcttaggagttactagcggctatgtagaagtctggagtgggtcccaaggatcactatttgtaaaaaaaaaagatcccacagagttctgatgcaggtgatccatgggctgccccttggaaaatacttcctagaccctctgggttgatagtagcagaagagaagacagaaaagcaggaacaacctaagaaaactgacatagatggatctctagggcatgagtgattagtctgcctatctgccccaaattcctaggattttcttacatgtattcctaggattttcttcttttttcagtttactttctttcactgactgaaataaccaccactctgaaattcattcactgacttaatagcctcttttaaaaatgcaaataacttgtataagaatgaagaagatattaattattgaacttttagtaggagctgaagaaatgtgaagtttggaggttaaggtgtagataggtgtattttttggagtctgccaactttagattttagaggaatcctgggtagggtaccatagtcctggactttggaagaagagcatgaggatccyggaagcttggagaagagaacagtaagaggagaggatgcagaaaggtgattggaaggtgccaaagagaaactgtttaaaatttggatgcattttgagtttagcattttcacattccatttttgcttcctctgccttctaaccctttcttccatatcaacacccagtaagtatctgccctgaacacttagtttaccaaaatgtatttgtaggagtcttatatgtctgttatttctgtttgcatttaaatgtttttggataccagttgaggaatgaagagtttagtcttaataaagaattttaggtcatagctagcagccaaatctggtacttttgggtgcagcagaggcactgtctttctagtaaccctaaaatcatacatatatctctggccctgagatggagggaggggctgtcgatattattgttactgattaagtagattttgatccccagtgctggcagtgtttaaaaattacctgagagctttttcaaaaaaaagagatttccagctaccctcagacctgtcaatttagtttttttttaagagatgagccccacaaattcatttttaattgttttgtcagtgaaaaagcagaggtatctgagaaactacaaattgaaaagatgaaaaaaaaggataacatgtaaagttctactgattagctatgtgaactgctcatcacttatgcctaattataatgtgtcataaaagctatacatgaagatgatcaaaatgcatacttkgaaaaaatttgatttcatctgtaaagacgtgtaagtcagatgacgtttaaggtgttataactggttccacagatgagtctattgctttatatttatactttctatgtgtagtctgcatggctgttcagttgttttgttttaaaaaagmaagaaatgtttaaggaagaagaaaatgttttctacctccagtattccttgtacaaagcctaactaaaataaaatctcactcaggaaacaagaagacaaaagaaaacattgaagaaaacacgcaaatttattgttgatggtgtagaagtgagtgtaacaacatcaaagatagttacagatagtgattccaaaactgaagaattgcggtttcttaggtgagtagagaaacaacgtaattaaaactggtttgtgacttcttttcagtctctgaaaagtcagaagaatagagaaacaagggtaaattattggctaatttttttttattcttttactaccgttccactcgaaagaaaatttttaaagctttaaaaraaaacgtatttcagaagtgtaatttttgctgtcttctctatcattaccattaaattttatcagacgtcaggaacttcgggaattaagatttcttcagaaagaagagcaaagagcccaacaacagctcaatagcaaactrcagcaacaacgagaacaaattttccggcgctttgagcaggaaatgatggtaaagtctgattgttataccattttatatcattttgtgttaataatgacatttactgcattaaaaacagacaaacaaaaaaggttgtagaacttgttctctgattgccagatttctctagctttgtgatttatttctggcatttttacccttttggtgttctggatgccttttattgatttattcttttttcttgaaaggattttctatcccagtctaccttaagctggtttatggtgtgatgggttgttttttctctcatgaaaacttatgaagccagtaaacaaagttcctagatttgcctattgctgggtaatttttcagtgctctaattcgatctttcagatttggaatccaagattttaagccagtttagagcaattgccttcaaacctagctgagcagtaggactcctcaggggctttttaaaaatgtgctttattctctggcttctacagttaagcctccacatctctatttcctgctgctagaggaaatagtgctgactagtcctgggtagctgtcactgagtccttcagtttttgccttgtgtccaaagttggaaaaggaattagtaatgtaatataaaatttttgtaatttatgttgactatctgccttaatgtaggttagaaaaagtatcatttgaaatgttacagtactcatgttttgaatatagtccttgtgttgacttgtaattttaattgataaagattgttttgtgtgaactgtggattgttgattacatgagttggatcataactgagatttcctaagaaaatagtgaacttttgttctcattgagtatttttatagtacttatattgttttccaaaaccttataaaatctgtatttctcccccatcatactttctaaaatgttttacttttcaatttttttaaaaagaaaacatccattacaaataagtaactatacctgtattcaaaaacagtgttactgagtgttatataaacaggagtcttgttgcaagagtagatttataattccaaaagatctgttccaatagaataaggtgtttattttaagaatcttaatgtggaagattgaatctgaaaatgacaatcttattattaaataatggcgatattattaataatattattttattaaagtagacctcaaataagctctttgatttatcaaaaattttattggataaatattgaaatttttctgatttgccttactacttcacaacaattagctattcttctggataatctaaaaactttgaacattctactagtataatagaaaacaaattttgggtcgggcgcagtgccttattcctgtaatcctagcactttgggaggctgaagtgggcagatcacttgagggcaggagttcgagaccaacctggcaaacatggtaaaaccccgtctctactaaaaatacagaaaaattagctaggcaggatgtcacatgcctgtaattccagctactcaggcrgctgaggcatgagaatcatttgaatctgggaggcggaggttgtagtgagcagagattgtgccactgcactccagcctgggcgacagagggagatcctgtctcaaaaagaaaaaacaaacaaaaacagaaaagaaaaaaaaaaagaccaggcccagtggttcatgcctgtaataccagtattttgggaggccgaagcaggaggattgcttgagcgcagaagtttaagaccagcctaggcaacatagtgatagccctatctctccaaataaataaataaataaataaataaataaaaagataagttggtcatggtggcatgcactgtagtcccagctacttgggaggctgaagcaggaggatagtttgagcccaggaggccgaggctgcagtgaactgtgattgtgcaactgcactccagcctgggtgacagagtgagaccctgtctctaataaataaaatagaaaaaaaatttccatgttagaaaaaaagaactcatttttttgagaattttcataacatattttagtgcatttgactttttcagtattgtgaaggttatagtacattactaaatttaaatactagttatgttctcttaggaaacatctttactataaggtattaatatgggtgatggaaaagttatcatcttgagctatattgttttacagagtaaaaagcgacaatatgaccaggaaattgagaatctagaaaaacagcagaaacagactatcgaacgcctggaacaagagcacacaaatcgcttgcgagatgaagccaaacgcatcaaaggagaacaagagaaagagttgtccaaatttcagaatatgctgaagaaccgaaagaaggaggtaagtgtaaactactgtttttaattactaaagctttttttttwaaaaaattgttttaagactatctaaggatttaggaatactaataatacttgagagttaaatagcacctattcattctttcattcggtcttctcarcagtcatatagagttgtmataaggtcaatcattattcccattttactgccaagaaaactggagtaagagaggttttagtgacctgtttaagttcacctcaagagaggttttaatgacctgttcacagactacccctaaatatccagctaaaccttgaatcargtcttcaaattgagtttaatccatcttaaggtctaccattgtccttaatgcaacacatttaagtccttatataaaagtattttttagaaaacttactatgttgtgtttgccagtggcagcagtgattcattttattatttataagttatttttcatctttaattcatacttttaacgattttgtttgttgattagctttattgcctttcatgggtattgtgccaaacaaaagctgaataacctgaaatttgacatgctatctataactcatcaaattgtgaggtacttcgaagaactagaagtggaacatatctgtaaagtcatttgatgagaatgagttttttcattgtttcctgaaactgtttcatattgttatagaatctgtttgcagtataaaagattgtcattgcttcagaaggaagatttacttattatattagcatctttttttgtcccaaattaaaactaaaagagctttacatgtaggtaattttcagagataattttataatttattaacatcttcagtataggaagacgatttgccttttcatgatataaaagacaccagagacaatgattgtgatcaattttattagggttggaacaaacagaaacctcagccaaactaataaatgcattttcacttttgttacacatctcaaatacccagattcattgactttaacatttaaattgagaagaaaattgaatgtcatactgctgaatcttaaggatttgctttaaaaagggtagagtcaaacattaataaatacagtgattttatgatttctttagataaagatgaatgaaatggtatgtgattttatttgatgtggcttccatttctaaaaatcactattttattactatttctgatgttttatgtagaattgctgtatatactgtgaggtatgacattactggggctacatgttaattttctctcaagtagtttttgagatattctttatctcagtgaaatttaaaaaattttacagataaatatatggtttaatcctaaatataaaagtctcagttattgtttttgtttgggggtaggagagtttcagccacgaacatgtttgagatcgtgatatgcatattttaaataattacattatgtatttttttttccttattgctaaacttcttgcatttggggagtctcttccttttaatggtgatttggtttcatgagggattactgatgggaaattttaaatacacgatgttaaatcaaaatcagtctctttcacggaccatcaatagcatgtggtgatttggaatctggtttcttttggtgcttctacttgtaaacacatgattgtttttcatagttggattacagatctattgttagatggaatatacttctagtattttgaaatgattaaaagaaggagctctaaaatgtacttcattctgtattttatctgctataataaatcatagcttactaaacttacttttaagagtgcttatattaccaatttttaagttgacaggcttrgcttaacttgtcagcaaaggggaatattctaatcctattcaagatcatcagatacattcatttttaccacaccgtgtataaaatggtgtgtttatgaaaaaacttagtatccatttatttctcctttgtgtattstaagacttgctttccttttttgtttttggcctcattaagtagattttatttagcattatttctttagtatgatcaagccaattatgaaattttgcacttttataaatggcattagctttccttatgttcaatatttccaactatgtcaatagatacgtttataattttatgatctttcaacaaggtcagttgagtttatcacctgtagttcagcatcagtgctgcaagtaattcttcgctggttgtcttyggacctttaagaaagagaatgatacatagggttattaagcaactaattaacctttgtgtggtgtaatgtccctttctgcactgagattatgcatgttctcttctttcattctttttcaccagactaacacctatgctaatgcatgttgaaaggaactttttaacaactttaatatttgacttgtagcttatctgctctcataaatgcttgctgtggagaaagtatcatttccccacctcctgcatgcttatacactgtaggttataaatgaagtggagaaagcacccaaagagctgagaaaagagctcatgaaacgcaggaaagaggagcttgcacaaagccagcatgctcaggtaacagcagcagcttaatgctactaaaaccagaaagcaccattttctcacagcttgataaaccatggttgaaagggtaaattttaagtgttattattatatgatgttgacttctccccattcaaaaactcctggaatcttctttatttaatactaaattcctactaatggtgacatttaagttgctaatatgaagttaagtggaatgtttggaaagttgactccagatgaaataaacaagtatatgaatgtataatccactgttatctgattttaatcttgatgggagcttatagttttaagtagtaatgccaatgtttgttagaaaacttttaggacatamaaatagaggatggtatataagctttgtgcttacaaaaagtatgcccattaaaacgctattatttctataaagtgcagttagaagaaaaatagcaaatggtaactttaaatggtagttcaaacatgtattgcttttaagcttgacaacataagcaactttaaaactggattttaaatattamgtaccttgtttttctttttggttcacaatccagcagttaaacaaatagactatttttacctatatagagtttaaagcaacccaatctaggttatgataaagttaagccttgtcataagatgggtgaattcttttttttttttttggtgaattggagtctcgctctgtctccaggctggagtgcagtggtgtgatctcggctcactgcagcctccrcctcctgggttcaagcgattctcctgcctcagcctcccgagtagctgggactacaggcatgcaccaccacgcccagctaatattttgtatttttagtagagatggggtttcaccatgttggtcaggatggtctcgatctcttgacctcgtgatctgcccgcctcagcctcccaaagtgctaggattacaggcgtgagccaccaccaccggcttggtgaattctttacgaagtgagataaattagtatttgtaacagaattttctagaattatctcacatgacaagtctttcatatgaaggaagatgaatcttctgattaaatttatgctaagcctggaggcaaggataaatgagctcaattttccattacataagtcagtgaaaggaagaagagatgtggatcgtgtatttaatcgatcctttgaattatctttttaatttgttgttttatgtgatttaacaagtggttcccagacttgtggattttatagacccataaaaagaaacatagaaacaataaaaaccactggggaccatgacatgggctgccattaaaaaaatttttttttaaattttgctaagtaaagatattttaaaactgccatttacttgtcaccatcatttcaaaggagagaatatttttaacaccatgaaaaataaggaaaatataatcttagaatttaaaaattaaataaaactagcttgtctgaataaatttagtttgcttttgtttttttcttgctatgagccattgaaacattttttcttggcctggtgtgggtattcctagtttaaggtggttaatagcaaacgcagcatttactatatgtcaggcattgttctaaatgctttatgtgtatgaacttatttaatctgagttaattatccttgaggtagtcttattacccccagtttacagttgagggaactcaagcacaggaaggctgagtgaccctcccaaggtcacacacctgggtagtggtagagccaggattctcatccagatawgtttgggtacatgtttcacacactgattcgctgcaccatgctgcctctcatatttaagctacctacttgtgctgcaacttaaactctcgtcagcttgactcagtggttcttggccatgtcttgttaccaagtgaagaggaagtccttgctggccacacatgtacttttggttaatttggatttcaaaccagattagaataatatggtttttgccttataaaggaatatagatttttattaattccaaaaggccatgtatcaaattctaaagtcaaaactgagaattaatgttgaatgaattaggtaatactatgttttaataagactttgttggtgatttttcatataattttggtaacaggccagtattttctgagtagagctgaaagtaatcataaattccttcagtaaatctaatgaggaatttagtaatctaacaaatattaaaagtatttctatctactgctttaagcgaaggtacaaaagctttataactttacagtctatttcaaactttttttgagaattcataagtaatggtcatacagtcatggagctagaacatatttgatcatttaagtccagtggttttcaaactatactaacaggaattttgactttgaaagaagcaactatgggagtccctaagacggcaagaactctgggctgtgagcccctgcttctgcttcaactcaagcaacaccacttttgctgtggtttataaactgggatttttgggggtgaattttaaaaaagggggttctactagcttaaaaaacaacagcaacacactagagtttggaaaccactgatctagttcaaatccttcattttacagatgagaaagaggtccrtctgttaagtgacttgttccaggcctcaagaaactcaacatttgtataattattcttttcgtttacaaaaagtcattcagatatattctcacctgggaggtgcattctattctgatccacagggtgttgctcagatcatgattcagtcttttcagttgtcatcttgtgcagtcttcaacgcccaaatgcaggacgtaagtcccacgtgcctgtgggaggatggcttctcctgttttacctgccttttcacatgtgccttttcattgttggcttcatttgccaaaatctagatgattgatacatgataatgtttgtaatgacaataatagtgataacctgactttagacttcagtattcttcagagttttcacatttggttctcattgccaccaccctaatatagggatggagtcatataaccattttacagatgaagaaattgaggcacagaagactgtgatctgcctcaagtcacataagagattaacggtagagctggaactagagcacttttaacacggtgttctgtctaccccgccacaaattctaatttgggattttcatgtttctcaagaaaataaaataccctctcaatagtataagctttgcacatgtgagaaattgaatgctgtgattagatttttattttcgtgtgaagtgacattttgattgcatatatgtttatgtagatgttttaattatggatatggtcagaaaagccatgttaaaagtagtgattttcattccgtttaactctattttccatttattcaagtagtcaataatgaatagtgagtttctattctccttattgtagttttaagttaagttggaaattccaagctgtattctttcttgcagtttctatagggaaataactagctcatttaacactgtaatttttgtttgtgacgtctgatatatacaacaggagtagatagaatacagcttgatttcaacccctcctttttcctctcctgaaattagacttgttttttattattggcagctgtttgactttttactgttttctaagagagtaagtaaaacattgatttttaaaaggagagggagaaattatgaattacgatcacttttctgatcattaccatttttagcctttgttttcatttaaaatgatcaaattctatacaaatagcccaatatatcataaccctttcttacagttttctagaccccaaagttatatttttaatgtttatagttatctgattaatatgataaaattgtttatccacatttaaacttgtacttttaaagggcactcattttacaatttatgtgtttactttaaaaaatgatttttggccttaataatttgggttcttttgttgttgtcttttatttgttaatccaagtgattaagttcatctttttttttttaaggtgtgtttgtgtaatctatttgaaatgtgagtgctcttttcatacctgaaagtaatttmtaattataaattccatgtgaatgttattgtatttggcttttgaagttagggaatttagtgaatgtgtaataacattaacattttgtttgttttgaggtaatgaaatatattgattagtgtgtaagggaccttttcagataatttttagctttaatataaaaaatcctttatacagtgtccgactacatagtcatccagattctgcttaatttttcaagtctacagctctgtaaggcagctgggttctttgctaactctaattgttaggacttgtatacactggacttatatctgcctatcttcacttttacctgttgatccctatcttacttctggagccacacagtgctagttctgcctgcttcagtatataaacagtcatagctcctctttaccctttaggagttagctgctttaaggaacacttctctagttctttcaggcagtcattgtgaggcatggtttctgaaccctttattcccagctttgagttttctgtggtttacttttgaacttttaaaaatgtgatactaagggaagggacccactactctttatgtggactgagaccaagactgttgatacttgggaccaattgagtggaagctccttgaaggcagaactctctttcattaattttagtaaccttctaagtagtatagtgtccaccatttactaagtgcttaataaaggttttctttgaattgaactcttactgtgtttaatttagacataaatacagtaatatgaacaaaaattgcatagatgagaaattacatttactgttttagtggcactggcttatatttaccttttttattttcccataagtatttattcaccccatcctttacttttgtgtttgatttttttgtgcctaaatgtaagatttatatttatgctagttaatttagacccattgtttctgtctacacagattttttttttaatcctgtatgtaaaccaatgataaaaatgttgaacaaaagaaaaccctttgatatttttgcaggttatgttgtttattgaacaagtttgtatatagaaattttacagttgaggctgggcgcgktggctcacgcttgtaatcccagcactttgggaggccgaggtgggcgaatcacaaggtcaggagatcaagaccatcctggctaccacggtgaaaccccgtctctactagaaaatacaaaaaattagctgggcgtggtggtgggcgcctgtagtcccggctactcaggaggctgaggcaggagaatggcatgaacccgggaggcggagcttgcagtgagccgagaccgygccactgcattccagcctgggygacagagcaagactctctttcaaaaaaaaaaaagaaaaattttacaattgaaattagagaaacagtttaattttgttacaaatagtaggaaaaagaaaagcttgaacaactttgttataactacttaaaagataggcttggagattttgcatctcttaattaaaactcagaagcccttatattctagatagttgaatttaaatattcattgaaaattttttcaatgataattttcttaatgataaagttttacaggtgactgtagccaagttggtaattgcattttatagaggcattcattagtcttttctttctctactatatatgtatttatgctaaaatgcaaatgatgatgcagatgaaacagcagcatttacaacaccaaattagttcactctctgacatgaactgtgtcacctccagagattcaggatggtagcaagccaaccatcctgaggagtggagtgagactctctgtgcatttgaggagctgcctggcagtgatccagacctcatcagactctgaggcctcaagaatagttccaaaatgcatcttaggttttgatgttctcgaggatgtgcaagaggggggattgcaagtgaaattctgcttcaattttaaattctaaatccacacaaaaattgattgaatagtccatgagccaatcaccacctgctgtaactgccaagagagggatggacagatccaaatttacatttctttaatttggatgctgttccttttcttctgtaaatgtatgattctagcagaaagaccataagtcactttaacatttcctttttttgcacaataattgaaggatgtttttctaaagcagaaatttggcattcgggtagatagtatgtactcaataaatatttgttgaatgaattagtgaatccgaaacatgtttatagaattctgtgattatacaaattttcttgatagatttatagtatgtaactcactttcctatctccagtttgcatttctctagcaatgcattctcattaatttctcaaactattgttcttctttttaggcacatgctgtagatacagaaactatcttcttctgttaggatagccatgatatttcttcctaaaattcttcctctttagttccccaaattctgatatctgttttacctattagctcttaattgccttttttcctagagggcctttcttttttattttgagatggagtctcactctgtcacccaggttggaatgcagtggcatgatctcagctcactgccacctccaccctctagattcaagcaattctcctgcctcagcctccctagtagctgggattacaggcacccgctaccacatctggctaatttttgtatatttagtagagatggggtttcaccatgttggccaggctggtctcgaactcctgacctcaagagaaccacccgtgttggccttccagagtgctgggattacaggcatgagccaccacacccgacacttaaagggcatttcttatttatccttgttttagtcacaccatagtggaatgagtaatcagttttagaagctgcaaatttaccattctctcaaagatgctagtgtaatagggcactttaattatgagtgggctatatgcttattctgtatgtatccttcttagtgagttgagaatattatgtattctaatgcttttttcttagactgaattgggtgactaaatacatttgtactatataattttagtgattttaaaatccagctaactttgcaaacttggtttggaaatcttgttaaccactaatatatacagccatatagataaatggatgtttagttcattagatacttattaactgacaattaactgtttttaataggaacaagagtttgttcagaaacaacagcaagaattagatggctctctgaaaaagatcatccagcagcagaaggcagagttagctaatattgagagagagtgcctgaataacaagcaacagctcatgagaggtaatttttttaaaattaagaaatactgcaaaatgtagaattccttatgacagtagaagtgaatgtaaacatataacccttraaatttcttcttgccctgatgatgctggaaatatatctgaataattttgtgtactcattatgccttatagttgttagtatacctaatggtcgtgtgttagaatgggatttaaagtacttatcttccctaacaaattagcttagatttttttttctttcttattaagatgattaaataggattttggtgttcggagtaggacattctctgtttatacgacattagaacagtctggaaagaggtaatagatattgccttacattggttacagttgcacttggacagctcagaatgtcaacatgtgtgtacgagttagtgtatttagaatacttctatgtaaatattaaaatgaagagcaaagtayattagtaaaaaaagagcaaagtgacattttgaaaactgctgtcttctagctcgagaagctgcaatttgggagctcgaagaacgacacttacaagaaaaacaccagctgctcaaacagcagcttaaagatcagtatttcatgcaaagacatcagctacttaagcgccacgagaaggttaatgaaaggaaaatttcttcatttttttgttcgttttaaagtttgcaaagctatttagttttgaaacttaagtttsttagataatgaattttagatttcctttctgtcttttatcctacratttcttggatgaagtttggagtaattaattgtatcttgatcatgattgcaaacttcttttctacaaattataaggaaagtaactaattacaatgcttaaagacgttttacaccttgtaatcttcatctcggctctcaaaggtagctattttggctctatttgtggttcaagtatcttaaagtatggactccttgtacttattaagagttgcagtataaaactctcatcactaataactttcttttctttttattcttttgagacagagtctcgctctgtcacctgggctggagtgcagtggcactcagtcatagctcacttaacctcgaactcctgggttcaagggatcctcctacctcagcctcccaagtacattcatgcaccaccacaccctgctaattaaaaaaaaaaattttgtgtgtggagacagggtctcactatgtttcacaggctggtctcaaactcctaggctcaagtgatcctcctatgtcagcctcccaaagtgctgggattacaggtgtcagccaccagacctagcctaacttcttacaagttattttgtgcctagtattttgctggtcactgcaacaagggagagggtaattataggaaacaacaataacaaaatgacatatttgaatatgcatgtgggtactgactattgtttctgcgtcactggattctatttaaaactttcataggaaacagagcaaatgcagcgttacaatcaaagacttattgaggaattgaaaaacagacagactcaagaaagagcaagactgcccaagattcagcgcagtgaagccaagactcgaatggccatgtttaagaagagtttgagaattaactcaacagccacaccagatcaggaccgtgataaaattaaacaggtaaatatgcaagttagtctcttctcttttaggtttaaaatttttgaatgaccattagaagttctacaaaattcctttctttctaaacaattagagccaccttaggcttgttgatgttcactttaattctgtgggctgggactatagatacatggcatataccaattagtcttccccaggatggtggtcacagagagcaaagcccttcctcctataccccataccagctcctgagctagactggtcctaagaccagccctgggaatgagatgactcggacaacttttcaagtcaagatatatggcctcactgtgatacttctgtagtcatggtcacacacacaaattaactcagatcactaagcagataggaggatcaaggttttaatcagaagttcctgctcttctctgaagctgtgatgtggactcyaggtttgagtctcagcatattattasttgtagcttcagtttattgtgccttgttttgttaaattcctttatatcttcagaatrtatagaaatcacatgcttctgaactatagtttatctttttttcttatttatagtttgctgcacaagaagaaaagaggcagaaaaatgagagaatggctcagcatcagaaacatgagaatcaaatgcgagatcttcagttgcagtgtgaagccaatgtccgcgaactgcatcagctgcaggtcagatacagaagcctgacagcaaagcccataggatgcrgcagcacaagtggctgcttttgagagaacagtagctagccaaagtcaactgcatcatacacgaacatgctgggtttgagaggttctgttttttgtacagatccaaatgaagatcagtttggtatcataggcacttgtgtagattatatataaccatgattaatgtaaacataaagctaaattgtaacctacgaaattgagtctttcaaaagcagtattgagtatggtttttagtatattttgcaagaagatgtggagagtttcaaaatgatgtagacagttttgttgtcatattmtgaattttttgtcagattcwaaatttaaaatttcttttccatttagagggaaatagtttattttcttctaggtttttgaaataagtgataagttaaatatatgggaatttttctcctaggaaatttaaargttattcgagagagggctgatttaggaccttacatagaatgtacagcccatctaaaatgtttaagatttcagagtagtgtataaatgtgggtatctatatatttgcttaatttactatagtagaacagatcctaatagattggcctaatgggccaatagatcttttacaggaatagatctattaggccaaccctttagtaccagatcccacattctgtactcacgggtaaaatgtatgcaggctgccttctgaagtgtcagttttatgagcaaatcttcttagaaaggaaaaacaaaagctcaagctagttctttttaagttctttttayatggtatgtaatagttctagcttctaaacttgtaaaaatgaagctatgattcatttcctaattcatggcccttggtttttatagaggaaaacttgaatctcagtaatagcatgatatttgatgagtaatttattattatggaagataattgtatttgtgaaaaattgcttagttgatctgaaatttttttaaatcccaactttattttcagaatgaaaaatgccacttgttggttgagcatgagactcagaaactgaaggagttagatgaggaacatagccaagaattaaaggagtggagagagaaattgagacctaggaaaaaggtaattttaaaagctttaattaaaatgatatgtgtgtactygtccgtctacccagctattggctctttacctactgtgtcaggtacagtgtcaggggcaggaaacatagagatgaaaagacaaagtttttgtccccagaagttttggaatctagtgacaagcagttaggaattggtagggtcattgctctgaaggaggtgagtacaggatacaagggaarggaacagattttgtaagcagaggaggaggagagcttaaatctgcctgggtaagtcagggagggtcttcaagaggagatgccttgcaagccaagtgagtcttgaagggtgagtaagaacttgctaagcggatgggctgattggagtggaatgggatgatttgagtagggagaagagaatgagtgaaaaggaagcgtacagagaattgtagatcgttctctgacattggagtatgagagggggtgtgtgccagtgtgtagtcattagggaggaagaaaaggaaggaaggaaggaagcgatgacagctgagtctgaacaggtcaactggagccatattaaaaggccctgttattctacgtaaacttgaaatctggtaaaatagggatggtgtcttctctgtctcacccctttcccttgtttgtgcttgacaccctattcacctggtcttactggctaaccatttcacctgagtttttgctatcactatatgatctctgacccttcgttactcaaacttaaacctttgttttggggggagcttcctgcctactgtacatttccaccattcctttcttccatccatacaatcartcaaggaaatatgtatttagctatgtgccaaaggaagtgaaatgactaaatgagttcatagtgtggctttttgtttgtttgtttagacagagtctcactctgtcgcccaggctggagtgcaatggtgcgatctcggctcactgcaacctccgcctcctgggttcaagcaattcctctgcctcagccccccaggtagctgggattacaggcatccaccaccacacctggctaatttttgtattttcagtagagacggggcttcgccatgttggccaggctggtctcaaactccaaaccttaggtgatccacccacttgggcctctcgaagtgctgggattataggcgtgagccaccatgcccggcccatagtgtggctttttaatttaaattttctttattgttaaactttttgaataggtaatgcattcatgtagtttagaattcaaaaggtacagaattgtaaacggtgtaaaatctcctttacctacttgcagcctagcatctgcttcaaacaccctagttgaactagttgacagtggtcacaagtgagttgctaatagtcaaatcctatggccttatctaactgttctccttaaaagtcttgtttcttaaaattctcctctcacctggcttttgtgacacagctctgctcattctctgtgttctttatccccttttgtctcctgaaatgtagacatttctcagttttgcccctktagtaaagaacagtctttaccttgatgattttatygctagtcatggcttcaactgttgcagatagacaactccaaaacttaaatggtagcagttgtatagagcatgaattgtaaagtcatacaggtgtgtgttcagatctcagtactgacacttactgattaattttctcacttaccatttctaggcctagttttcctaatttgtaaaatgagagtgatrctacctatttggtgttgtttatatagcagttatctagtacctgagctatagtaatggttcagtgaatggttgctgttgctattattgtttcttgtttttattatcagtttgggcagtaagcgcccattttccatctgggtgttatgctcctcctcatttcacctaggccttgtgaccttttttggtcactgtatctcagtagcacctatactgaaccccaaacattctgtatctgctctcctttctttgtttttctttgtaacaattcatcaccaccagacacatttgtttattgtcccctcttgcgagtgagaatataaactccttaaaagcatgccatgatcgcttcatttattgatatgtacccagtttctagaacagttcctggcacattgtacagatgactacrtacctgttcagtgttgactaaagagtataaactcagtagagagaaaaccaaactcagcatccttttccttcatctccatctcacctttccccactcactgcaggcccactcactgccagatgttccttcatctccatctcacgtttccgcrctcactgcaggccactcaccatcagatgttcttttctgcattcctgttctcttaactgacatctacgctagaaaccagaattatttttcatttctgtcacaccctacattcaatcaggcgccaattaatttggactctttttcataatgtgtctcctttctttctcactgctatcctggtgcttgtttaaattattcaggaatttcctaatgggccttctartttctagttccctttcctttcttcccactcgcctgccatcaccggaggatttatcctcaaggacatctcttgacactgtcatactgatgttgagaaatcttcakttccatcagagtaaaatgtaaattaatgcctcagtttgactgtgaagccttcatagtgccacacctgagtcacagtcaccctttctagcttcctctcccactagccactttgttcccagtccaggttccagccttgggtataatggccactcctcataccagctcctcggcttcctgcctttgtgctgtgtttcggctctgtttctggcatgccttccctatgctccctatcaaattcttatctttccttcagcactaagctcatgtttcacctcttttgagaacccctcctatatccttccttcttttcctgtgctttgtacctctacagcaccacttatccctgaatcacttctccacaaagtcattgatacctgtaacaaaatgccataaactggaggctggggagtctgagaccagggtgccaacacggtcacgctttgatgagggccctcatttgggttacagactgccgacttctcaccgtgtcctcacagggcggaataacaactctctttagcccctcatgaaggcactcatcccatttggagggctctacctcatgacctcatcccttctcagaggtcccaccttctatgcatagtatccgcacattagggattaggtttttatatggatttggggggcacagacattcacatcacaatggtgcctcttacatttctcaagcacttatttttgctctgtattatggggataaaaatgattctgatttaagttgtacctttaaacagcttatattatagtctagtgtgaaagaaaatacaggcgcatcgtaactaaaataacaagtaggcaggggtaagtgccatgtgggagaaacacataatagttaataataggtaccatatattagagtgcatagtatgtgtaagtacatcattatcacatttatacttcacatagcaaattatccctatttttacagcagaggaattgaggaattaaatggttctctaatatagggaagttaagtaatggacccaaattgtccatttatgtggctgagctggacttgcacatagggctgtacaaagcttatgatcttaaaaaattgagcaggcgtgtcttcttgaggattatatacaaagaaagtgttttggacaagtagttttatcttggctgtcagcataaattctatatataataccagcacatagcaatttctttttccctttctttttaagacactggaagaagagtttgccaggaaactacaggaacaggaagtattctttaaaatgactggggagtctgaatgccttaacccatcaacacagagccggatttccaaattttatcctattcccagcttgcattccaccggatcataacaaagggaagcattctgtgcgtgggtttggctctttcagtatgtcattctgttctcatcttctgccacagtctctcagatagctcatgaagacaatcacctgcctcaccttctaggtgttttccttttttgttttttttgttttgttttgtttttaagcaaagatgaagggaaaacgaactaagacagacgctaggccatgttggcaaagtagcatcttggtgactaaggtgactttgtatattcatcttaaaaattatgttctttagacactgctacctgaaaactgttggagaaataatgtttaaagttatttaagaaaaactgttacatcactaagtattaataaattcttcttacctgacgtaacttctcaatgcctaaattctgtagttgaagctctgctgcagagagttgggataattttcttttggtggatcagctctcataaaaaagctatgatttgctcaaatatgctgttgactcagtaaatgaatatatttttttctttaaataggaacaacctcttttaaaagagaaaaattatttcagtgatttgtcaaaacgaattacctcttttggcatgagctaataattgagggtgctaattttcttaagatagtgcctaaaacactaaatttcagtcaagtcgtaagtaggattttctttttgatcaacagggacaaaaacatctttagaattaaaaacatggttgttttggaatttttgcttctcttaccgtttgatagaaattttcatcctaaaatacatgtacaaagtttggaaagatgaaaaaaagaggtagcttttagattgcaaaytggaaatgtaaaactcatgaaatttaagcaatataggtttagctatctgtgtttattttctaaaataatacctgagctggttaaatgatttctctccatcttagctaattctgtttaaaactctgtcagaggcctgcaggctgtgagttatatttataaatatatcttcagaaattaatcttaaaagaggcattagttcagmatacttttttaaaagtttaaattaaatatttaggcacgtcagraattacttttccttattttgaaatgaggctacttatgtcttggttttattttgttccatgtttaaatcattcactttgatttgagtgggaaaagcctgaagcctttatcatgtggttgctggtgtgtgtaattattaatgaaatgttcactcctagtcccttatgaggcttagaatttcaaccacgtgtcaggtcagacagtattataaactgtactttgctgtctgagacagcacatttgtgaatgatgcttgctgcctgccattttcaacctattctctcttaagagtgctaggtaccaaattgtgaaagtttgttttcagttatattacttttgaggctggtgaaaaatttaaatgtaactttgtgggaacactgattcatatttagaaaatgtaaatgtctgtagcactttcttgmagttaatttgaaaactttggatgctgaaccttgtttgtcagtgatttagatgatttaaaaatgcatgtgtgatttgaattttataattgttttgacaagcataatttacttggacaacttcgtaggtagccttaacttctggccaagtttgttttttatataaatatatatacatatatacatattatgtatggttgtaaattcatacacttatcacatgaatgtgttactgtatacaaaactcttaatgctttattctcaaatgctgggttgaaaaatgttttgaaagccttttaaaatatatatctttataaagtaatattcaggatgatgataaaaattgtttatattgttatgataaaaatgacagtataatgttgcccagtgtatttaatgatttatttgaagagggattgggaaggaacgtcttcataccactttctcctttgaaattttcagtttattgacttttaaaaaatgaatacctcaggcagtagacattttttttctagtatcatttaattgataccctgtgcgctaaatagtgtgtggtgcctgattaatttggtctgaatatttgattctttctgttcctttcaacttgacattcagattattgactcaaggagagaggctcagagtggaatggttggcgctgtgggtaaggttggatctcccttaaaactgccttttggattcagtgtttgtgcttgagttcgctttcaaatatgaccataatcgtgtgggtgcaagactgtacagtgatacatatgtagaggtaaagcattcattttaatacttaaagttatataaatcttttcaaaaagtgttttgttataaaatacgctgtttgtacccataccagcccacctcttctgaggccctgtattcaaatagatgatagtgatctrtctttcctgcatgaagtgtaggtggcgagtgggcgaggggcgcagacttctttgaaatcgaagggtacagtcaaatctactgctgatttggttgttttgttgctgtggcagaatatgccatgaaacacatacagacttctccgaacgtgcaccctcatcagccacctcctcccctctttccctgagtgctgtgaacacagcagacctgcacacttytgcagatccagctcctacagcttggggcactaggctgcctttcctagtcctgtcaacaaccatacagtgcraattgctgaattagctgctattctatgtggagtcacattaagctttttcttatctttttctatggggaagctatagggtgggtaaggaaaaaatgttgaatgcttttactttgctgaaaatattagaactctcttgtgacaggatacagcaaattataattaaatataaattaccagaaccagagctacctctaagtcatacttcctcaagcacaaagctctcaggcatatgagacccaccttaatgaagggtctctgatttcttgagcatcagcgagtttcagaagtgactatttttttgtactcttctagtttccttgtaactatacactttttcccattccacactgtgcttaaatgacaaagactcttctgagaagccaaattctgtccaagtattaactagagatattgttgattaaagaaaatctagaactgaagtgaaagaagagagttccagttctaatagtcttttgattaacaattcttttctgagaaatgatttttataagaaatggggtgattctttaaatgcttttcttaagttgaaggcacaacagttaatggctgtattgttgctattcygttgctgacatgtttttgataaagctttaacattcctgctactaattttggcggagagtgtttgccaggtttcaatgtgggctgcagctttttgtgctccttctctggtttgcagtgtaatgagttcataagctaaattttcagaaagaattttgtttmagattatgcctcttatctacttgagagcaacatgtcttttcaatcatgggattgacacatgaaaaataaagttatttcttaatcaattttgggaagcagtcttttattgagaatctttgaaactggagtgtcctgcctgagaacactttgcagttgttggtcctagttatattgtaaaacttgcagtccccgcaggtcttctgacccttccagagttagtattcctagctgtgtgtagtccacagcatacacgcaaacacacacacacactcaaatgtagtttttagtgataacttgctgggggttgtctttcagaatgcaaacccctcctttgggaggtgcttaaaatatttctatcagcctatgtatatatgtgtatgtttttaatttcttttcctcttgggatggatgatttttctcaccaagcatttcacaaatcatatgacctcacttctgcaaaaatagtctcttcgtcattgataacgttcatgcaagattcagtagacgctaggcagcatcactcggcacgtgtccagctggagggaggcatggagtgtcattttctaatctgggagcgttgtgcactattgagctcattcttgacttaaaaaaaaaaatgaaacaaaagaggctaacatccattgccatccagctgaggacataacctcatatctgcccatcctctttctgagttttgtccagagaaggtagtaagtttggacttgtaccctattttacttgagctaaaacttgatgaagactttgggtatcttaggtagatctagtaacaaggaaaaaactcctatgtcttgattaatcaagataaggatcactattaaaggggatataatacttgaacccctaaagctacttttttttaaagggtcaaaacatctttttcccccctttttttggaagttacttttaataagtgtaaaagctacaattaaaaagtaaaaaattcagcctttgggtaaaactaatgaattcttttgaaaaaaaattatttaaaaagcacaattcctttattatacacaatagttttgcttagtaaaactcaagttgtttgaaatctggaggctgtatgaactaatttttattttatttttgttttattttttgagatggagtcttgccggctggagtgcagtggcacgttctcagctcactgcaaccttcacctcctgggttcaagtgattcttcagcctcagcctcccgagtagctgggatcacaggtgcccgccaccatgccggctaatttttttgtatttttagtagagatggggttttgccatgttgctcaggctggtctcgaactcctgggcttaagcaatctgcccgcctcggcctcccgaaattctgggattacaggcatgagccaccgcgcccagccttatttttaaaaaattctcattaattcatagcaggcaattatcaggatataataaaagaggcaaaaagaccacgtagagtgtgtagtgcttgactggttgttgccgttagcggttgtttgatatagaggaaacaagtggagtgttttttctgggataatatgagatactcagcagagaccttatggaaaataaagtctttttagaagagtagtggtgtagaaatagatgcaatttaatcccatttttaattatccagcaatttgagagtcacaacttgtaacaaattcacaaagtggctaagtagagtctcttctcaattggagtgtctgattttactgtgcatttctttggggcatttgagatttgtacatttttctttaatagaagtttctatattccatatattacttgccctacaatcataattccattgccccaggataaagcactacctaattgcaagtaatcatcttcttgctcatttgttgcatgtttatttcaaataacttatgcttggggaaaactttcatgtgctttgtaaaatccccagattgagttcatagttgcaggtatctaaagatttgcctttgaagacctcagggattgaatgaaataccagaagctatgccccaaaatacaaccacttttgttttcttgtgtttgtaataaacagtgttagaatcagacccaattaacccagactattttttaatctttctttggtcagacgaatcacattaaacatgatattagaaaaaaaaacttctttaatgggaaattttacgattgaaatgatgtttcatcttatagaccacaaacaaatgtttttagacattgaaaagtggttaaagaccaactgcgcccagtcccccaagtgccattttctgagtgcagaatggagggtgacgtcttgagctgatgctgtgtccccagcatcaggttttctgttttccctcttctccctttattccttccttgtccattgccctcaaccttctttttctgtttgctctggcctggttcagtataacatatccatgaactctagtatgggcctacggacaatcatagctacaatcagactttctaagcaaatgggaatgtgatatacatataaccattagaaaccctatcatcacctcctagaggggaagtgaatttcttaatttttttagttgcaagagtcacttcttagccaactgactagagaatgcagaatgaacaggggaggaaggagctgatggcacagccttagaacagtaaccagaacacacccccatcaagtgtcacctccaggaaggcgccccacccccatcctccgttttctgggctcatatttaggtaaagctctaagactcctgagccaacttttatgtaactggctttcctaggctggggcttgaactaagtaaagaagccaaggagttcagatctagatagcagagaagtaagtctcattctaaaacattgcaactactgttagagtccaccccatgaagctgtttcagattgtgtatctttgactgaattctataagtatatattgttcagactaaaacaaatgttgctagctaggttggctgtgctgtctcagtaggacattgacagactccagctttcaccctctggagaccttggacctaagtgccacatgcattatgagacctggtccaggagctgtcctgccatggctagctcacggcttgacagcaatacttcttctccttctccgcccagcatagacttggtcacctgaaagttagaagatcagtaggaagttaaaacatatcttgtggcctgtggggatcttggcttgggcaattatggcaaccgtgactactgcaaagatggcttcaaaggtgaaatcttttgtaagactacatttatttaacttgtttgccccatttcaacaccagcttggttctccttttcctccctgctttgacactctccttttcttcctcactgtgaatgggattgttatgcaaattctgcttttggcagtgtctgcctggagtaattggcatttgcctgaatttctcaggcttgctctggaacaaatcacctgcttctctaatgagcgtcagccttgcagccctccagaacatgcaaaacgtggagcagtcaacacttacctttgtctcctttttctcccttgtgtcctcgagggccaggtggcccaggatgacctggtggcccagcagggcccctgtcacctggaaggaaaaatggggcgtaactaagtaatacatgagtctggggactgagggcacaggtagccggtgtggcaccagcacaggagctgcttttcagtacgaggtgggtgttaacacaggatccagggactggctctctgccaccacttacctttgggtcctggagtgcccatctctcctttttgcccagggggtccttgaatggctccataagctgcaaaagcaaggaaacactggccttagagtcttgatcacctggaagcttgggacatcaagtcatttgttcagagtaacacagagagatagtgatggagtttggacgtgtaagaggaaacaaagttcagaatttatagaatttgtctaattttgagcatctcaaatgttaataactggagatttctcatgagactggtgtctctggagcagacccgtgggaacctatgcagtgaggcaggtgctgggaaagcagttggatgcccttactttggaagaagtccatgaggtccgcagtcacgttgctgtaggcagagaagaccttgctgatgccgggtggcccctgtggcccaggctrgcctggtgggccctggacagtgtaggccatcccttgcagtaggccctgacctgtaaaacaccagagcttgggcacaggaagcagggatcgcccagtaccctcttcagcaggagcacagtgccctccgagtgtcaaactcccaaagcagttgaactagatcaagccgcagcaagggtgaagccctccaacttcctttgtattccactgtgtgactggcacaggtctcttcctgctgtgggccggcatcaaaagcttgttgactgcgtaactgtgccgttaagctgcacggggaaaggactcttagccaacatccttctctcggccccagcagaaaatccagcatggtcatatgactcatctgggacccagaacgagttaggtgttgggaaaacaaagtacaaagcccccagcgtgctctgttccccacagctcgggtcccaggactggggctccttaagctgagtaggctgagagctaggctggggctgcctgtcccctccagcccctgcctgcttgattctgtcttcacagcctgggggttccacaaacaagaaagccagtctggagatgctcccacgctccttccccccagcaccaaggcctaaatgtccccacttacgctgcatgctctctgacaccctcacagccagctcattgtaatccagayctccagcaaagtcagctcccaatagtccgccattgccagcatacatgccgccttctgctgctgccccatagcctccgcctrggccgatgtcagtgccatagggacccctgtctcctgcagcttcaccaaaggcaccgcctgcacccagggagcctgcaccacctcctcctgtgctcatggaagagctgtaggagctgcccygcctgacagatgagctgtgtgaggaggagctgctaccccgactgtgggaggcatccgtggacaggaggcggctgtccccagggggtccctgcggcccaggagggcctggggggccaacaatgaagctgcgcacatcaggacctgcagggtgagaagctgcatgagtgggagctcagatctcggtggagagaaagacttgggagttagggagtctctcccagggtgtcaatgcccctgagagaccagaagtgaacttcagggttcttgtacccgagtgggagaattttggtgtggaaggaaaccgggcttaccccaccagtggctctcgtgtggccttcctgtccctttaagtgcctccctgccccacttacagggaaaagcaaggcctgcggggtgcctggtggggcatcaccgtcggggcacctacttgtgaggtagctgatcagctcgctccggaagctgtcgctgttttcagctgcataggttgccagggctcctgagacacccgggggccctcraggccctgggggaccaggaggtcctggagggcctgggatgaatgacaagccggcagctgggcagaaggaagagaaagaaaggtcggggtagtgctgcggaggaagctgaattcccagcctgtgctcggggcgctgtgggccccacctgaaaggaggggatgaggctgggcctcccgggtgatgggaggagagaaaagcaggaggccagagcctgctgtttcctgacatcatccaggaatggctgttcccgtcaggctctcccactcccaattctgagcctcattcaactcagccctccagtcactgagaggtggagccccaggtcggccctaatcacacaccgggctgcgcctgggaaagccatctctccccacctctgtccctgccacggctgaaggccccttgccagcacatgtggcgctctccagggccctgcacccagcactgtacaggctccaggagcacttagactgcccttgctaaagcccatgggagccccc

SEQ ID NO: 6821 - DNA, 63232 bp, Homo sapiens
gctcaaaaaagacatatttatatgtgtgtgttataagtgtatatattgcactattgagtatgttctctacaggagagaacttccattttaaataggcatggatgtgaacagccgtacatgcttaaaactctatacatatgatgggggagagagttttccatagactagtttctggctccatacttgtttctcctccactgctgacatatttctgaaaacaggtgctggggaaatgtttattatttagatatcatctccgaccctgctggctgaatcagaacaatattcctggaagcccttcctacgctggaagactagcggtaatgcaaccacacacagaagtgactgtaaactacataaagctgtctcatcccaagccagatcctaaaaatgcctatgaccattccaacatgaggggcacgaggagcaatgagatggaggggaaatcagagtggaaagagccagccatcttaactacagtcaagtgctgcacgaggacatttcagtcaatgacagaccatgtgggaccatgatggtcaggcaggggcacatgacaggcaggcggcaggggcaggaaggactagcagctcttccctggctagcagcgggggttctgcctccacctgcctccccaggacagaagccagatgagctggaccatgatggtcccttcagattatcataccatatttttcccgtaccttttctgtggttaggcatgtttagatagacaagtacttgccattgtgttacaattgcctagcatattctgtactgtaacacgctgcaatggcttgtagcctagaagcgataggctataccaggcagcctaggcatatagtaggctctaccatctagttctgtgtaagtacacctgatgacatttgcacaacaacaaagtcacataaggatgcatttctcagaacacatccctgtcattaagcaacgcatgactgcatttgcacttaaaatcgcttacttttgcaaagtctgtaaaaacatattaccatgtcaaacattgttaaagcctttcccaccaggaccttgtaaagagcccatgcaagcaaggggccttgcagtttcctggtgaatccgtctctattgacagcatttgaaaaatgattctggcagacagaaatccagctgctatcagatctctagctggaatggcttgtcagactgtggtaccccagcgggggacagaacccaggagaaaaagcaggtttagagagaaaaagttcatttcttgacatgataaatttgagcttttgagggatattctggtaaaggtactagtaggctggtatttattgatacatctgtaattcttgtacctccctcctattaaagaaaattcaaacaatccaaacgaatgcagggaaagagaaaaaagaaacaacaagaaagcatattgtacatgatatttgaaatattaagccactggtgtagcctgtttgctgactaattagaatcttagaaaaggtcctagagggtctccctgtgagaagcattgacccttttttgccagatcagaagaaggtcaggagtgggggcactgtggggtctcaggtgagcagctatttaccaagcagcatggaagaattccagtttgtaataatttataggattttatcaatgtgttctagatgaatatccatttcaagggtatatgtataacacaaatgatggcagaaataaacccaaatatttctgttattcttatcaatgtgaactggttaaactcacaaattagaaatagaaactcagatgaactttttaaatcttgtaaaaaacaatatgtcatttccaagagataaacctaagtaacaatacagaaagagtaaaaaaggagaaataaaacatatactagacaaatgctatctcaggataacaatatttatacaaaaagtaataaaactgaataagtcataaaaggataaaacaatattaatttgtataagcctaataatttgctctcaaaattataaggctggccgggtgaggtggtacatggctgtaatgccagccacctaggaggctgaggcaggaggatggcttgaggtcaggagtttgaggctgcagttataatcacacctgtgaatagctactgtactccagcctgggaaacatggtgagacactgcctcttaaacaaaaatcaaaaaaccaaaaaaaatagtataaagcaaaatcagactaaattagagggagaaattgacaaactacaataaaagtgggaaatgttaaacctactctttcagaaatcaatggattgaacaggagagaaaaaaaaaaaaaacccaggagataaaagatctaaataacctgattagcaagctagatggagagatatagagaaaaaaaaaccacataaaaagtgaagagacgttcacaaaaattgggacagccaaaaaaagtctgtatatgaggccacaaaggaggcattaacaaattctaaaagaacacatttcctcatctccaagcattaaagttagagatcaatgacaaaatgattgatttatttttatttaaatttttttttgtagaggggctctcactgtgttgcccaggctggtcttaaactcctgatctcaagcgatcttcccaccttggcctcccagagtgctgggattacatgcctgagccactgggcccctccccaaatgattattattattttttaaaaaactgaagtttgaaaacaaaaaaagaatggaaaatatacgtctaaataatccatgaattaagcatacaatcctaacataaaaaacaaaatattggccaggcacagtggctgacgcctgtaatcccgacactttgggaggctgaggccggtggatcacttgaggtcaggagttggagaccagcctggccaaaatggtaaaaccccatctctactaaaaattaaaaaattagccgggtgtggtggcgtgcacctgtaatcccagctactcaggaggttgaggcaggaaaatctcttgaacccgggaagtggaggttgcagtgagctgagatcttgccactgcagtccagcctggacgacagagcgagactctgtaacaacaacaacaacaaaatccaaatatgtataactaagtgataacaaaagcatagcatattaaaacttgtgatattcagctaaagcagacttttgagggaaatgatagtcatatatacttattagaaaacaacaaaagaggccgggtgcggtaactcacacccgtaatcccaacactggccctaaaattaaaatttttaaaaaggaagcttatataccatactactcagagctatatagcacgtcaccattttttacagtgcactcaccttcccttaccttgtatgatgtttctatgagccctgggaaacaatgaagcaggggtgattttatggatttttataggtcacgttgaagattttataggtgagaaagccgaggctcggaggatgcatgacttgcaagtgtcagaatcagaactagaatagatcccacacatttgaacaccgagtttggtgtcttttccttcacaccgcgttctctgggggtgcctgggcggtgacccctgccattggccttgaggattagggcctcagctcgggtcctctgcagagcctcctcagtccctagcaacttgctggcacctagccggggctaaacgcaggtttgttgaaaattataaaagggtaagcccaggggtagctattcaccattctgggtttgaagagctctgatgcagaaaggtgtatacatccagcaggaattccaccctacatgatttattataaacgtggtattctaggagcattcgctcagccacggagaaaaatgggcctttcgaagaagctggccttcgcggtcgctgtggggcggcagagcaggcgcaggcgtccaggcagtgggggctgggtaggcgccaggagaccttcccggaccaatccccgggcccagagagagcgcctggagaccttacctccccaggaaattcacacagatttcttgggggcttcacacccgcgcccccagtcccgccatctcctacgccgcagcaggcgcccccaccagggtaataacccactctgagagtctctggtggtgcctctgatcctctgctcttctgttccaggcagcgttttctccgagcggctctggagactttggcctgagtttcaccctcactcgccgactcatgtccaaaaaatgcagtccagccccgaaagagagccgcgcctgctggtgggggtagggggtgttggagcggccacggaatatgactgagcgcccggggcccgttgtgaggccggggccaggctgtcccaaggcaccgttcctgcccggcaccagcacacctgcccagacagggagaaggtcggagcctcccctccagtccttccggattttattgttcagagcgactttaaaacgcaaatcgggccgggcgcggtggctcacgcctgtaatcccagcactttgggaggccgaggcgggcggatcatttgagcctaggagttcgagaacagcttggccaacatagtgaaaccccgtctctactaaaaatgaaaattagccgggcgtggtggtgggcatctgtagatccagcaactcaggaggccgaggcaggagaatcgcttgaacccgggaggcggaagttgcagtgagccgagatcgcgccactgcactccagcctgggcgacagatcgagactccgtctcagaaaaaaaaaaaaaaaaaggaaaatcgaaccagcagcttgtttgtaacagccaaacataggcaacaacctaaatgtccttcagtaaggagctaggtaatgaagaatggtgaagcgcacgatggcgcgcagtgtgcagtggatgggaagaaccaggtctgttcaggagcacttgtatggaaagaccctccaagatatagtgagtaaaaaaacatgttgcagaaaagtactgcaatatcgttttgtaaacaatacgtttatgtaaacacacacacacagtgttaaagagagatatttggaaggacacacctaagagtgggctgggggagtggagggaagagtgaatctcaatttttactcattttttgaattttttatttttagttttttagagactgggtctcactatgttgcccaggctagtctggaagccctgtcttcaagccatcctcctgtcttggccttccaaagtgctgagattacaggcgtcagccaccactcattaaaaaaaaaaattgtatacctaccatatatgcatatattacctgggtgaccttttaaaaatatgctttatttttagaacatctttagatttacagaaaaagtgtgaatacagggaattctcataaacccgggcttttcctattattaacatcttaagtcatttttatatctccgtgggttcctcttggctgtgacagtgtcctagactttccttgtttttgatgaccttgctagttttcaggagtactggtcatgtatatggcaagggcctcaattgatttgtgatgttttcctcatgattacagtggggttaggtgttcttgggaggaagaccacaagcggtgcatgcaatcagtatgatttacccctgtcgaggtcaccttgacggctgggtggtttgtcaggtttctccacgatagtcactgaccgctcccttcctcacatactgtgcgtgacyttcccccctccaccaccaccgagtgttgctataaaggaaatgcgtttgaccttttcagtgtaaaaagttttctcgaccttaaagagagtcactaaccgacgcacacggggctggagaggacttaggaaatgcccacccctgcaggagggcgaatgcggctctgcgcggcactgggcgccgcaggggttaggggcggcagagggacctccggagcccgagacttcctggagcagctccgcagccggaaggctgctgctcctcgcgggcccgccgtgcccagtcctcatcttgggggcggggccgcgctcaggccccgcccctcccttgcactgcctctggcacctggggcagccgcgcccgcggagttttccgcccggcgctgacggctgctgcgcccgcggctccccagtgccccgagtgccccgcgggccccgcgagcgggagtgggacccagcccctaggcagaacccaggcgccgcgcccgggacgcccgcggagagagccactcccgcccacgtcccatttcgcccctcgcgtccggagtccccgtggccaggtgagtgagggtcccgagccggctgggggcctgggaccaggcggcggcagtgcaccgcggcgccgcgggtgaggcccggggctgcctggcgcccagcccagcgcggccctgcggcttcctggttgcactacaggcgtgggggtggggggcaggggagggcgtcggcgggtcgcgggcgggccgtgtcggcctggcagccccctagatcagcctcggcgtctggggctgctccctcatgtgtggtcggggtgcactcgccgtccccccgggctcaggggtcggggtctcagtctgggcctgggtagggccaggggccgtgaccctgggcgcaggaggcaacgggtggcgggaggggtgccggaggcccggccccgcagccctgcggagccctccagggtgcgcgcgcccttctaggcgaggcttggggagattaagcagagaaggctatcttcaggaactttcctccgaaactgggagcacgcacattcctgggagctgctaccattgcagtttatttgtaaggaactctccccagtgtttgagggaatgcgggagccatcccaggtgctgtgcgtgccttcgccccttccccaaccttgatccccagtttcaggaagggattcctggacttgtatctcccatgggtgcaggccaggcccttaagacttaggtaaaayggtctgttggtttaaaggagacacgcgaagtttgttacctagagactttggaggggaaaagttaagccagccagtgctagcccaagctggaaacagtcagcccggggcatttctgtctctgccctccaatccttgacctctctgtagagattcggcgtttgtggtagctctcccctctgttctctgcgctgggcatggagtggagctgtgaggccgagcccctgccctgccctgccctgccctgcccacgcaacagggactaggtttgcagggcagggcctggtatgctcacccttcactggctctcattgctttcctcattccttttatgcggcagtcaattgttggggattccaggggattaacagggcccctttcctcaaggcattctttgtgctgcaaggtgttccctgataagagaggccaggtgaggtgccagggcagtttgttgccctggcattgggtgcccactacttcaggctcctgcataccttgctatcttttctttgactattgtctgtgctttggtttttcatctgtaaaatgggggtaatagtaatccctgcctcacaggcttgtgagattcagtgcattcatttatttaataacaatacagagctcaggtacggaccagtcagaacaggtggtgactgctgcaccacacttgtgtatcccagatgggtgtcacccacattagccataaagtgtgtgaggcaggcctgggtcataaataatcaggtgtaagggtcaataaatagtagcagtggaaggttcagctaaagttgaaatgcacttctcctgaaccgtctttctggcttagctcatgctaagctcatgctctctgtcttactggaatgccctccctcccctgtctggcctagcattctccaccctcctgggagccatccgggtgcctgctcccagcaggagggacgggatatgctctgagctcactcagcccttctggcactgactcggttctcatctctcgccttgcatagtatttgtgtggcggtgtggcttatcgctgccctgtcctctgactctggagggtgggggctgtttctgacttacctcttggtggcagcactcaggatgggccttgcctaatgtaggtgctcagaaaattagttgtcgttagttgaacaacagagacagcacagggaagtggtttccctgtggttaaaatataggaccttgaaggctgggtttggatagagaaacgtggggagggtgagatggagatgaattgggactaagaggtgggagtggaagccycacctgacgcctttatgcatgatactatagaaagggcccaccctgggtggatgtgtctagaaggccaggatcgattagtgatgcctagttcacgtgattggggaggtgatgtgtggcttgggatgacaggagtgggagttgagacagaataggttagtgtgggttcttcttggaaattgtagaatagagaaaagaaactggtgtgggcaggagctgaatgtggaaccaaaatgcatgctgaatgctggaacatcagaggtcctgggacctttctggtgcaccccctccttcctcctggattcacccctcttcttctgctgtctttttttttttttttttttttgagacagatttcgccctgtcaccyaggctggagtgcagtgatgcaatcttggctcactgcaacctccgctccctgggtttaaatgattctcctcccttggcctcccgagtagctgggattacaggcatgcaccaccatgcccggctaatttttgtatttttagtagagacggggcttcaccatgttggccaggctggtcttgaactcctgacctcaggtgatctgcctgcctcagtctcccaaagtgctgggattacaggcatgagtcaccgtgcccggcctcctctctcttcttagccactgttttcccccgtaagcctgaagcagttcctggcacttgttcccatggggaagcgtctgtgtaagggtatgcttcaccagcactgccaaggaagtagacttttcactttctctggatttttctctgcaacaccctctgatcccattgcccccagaatagtaggaattttgagtgatacctagataggaaagctcttaggattaatgaagaaactgagattttcttggtgggagtttgtgcttttaaagggagttgttgcaattcaatggaactctgtaataaccactgaaactgttacacattaggcttactgaccctatctcctataacccatgaaataaagacctgatagtcacatagttgtttgctatttgggaggatcctaaaagtacagcctgaacagtgacccaaaccacagctggccttgcccatgctgatgtgaggaaggaatgggtgggggcaactaagaaattgggggacagagttctctgtgctaggtatcctaggacaagccacccagccacacagagaccccccsctkcccccccacagaacagttctggatgataaaatgcctgcctggaatggagaatcagatgagaagatgtttgcaaaggggtttgagatcagttagcgggtggtgatgacaatgttgataccgtgggtgtgtgactgccaggagctgtgaagcagagggtggagtgtgcggtggtcaaagcctggttctggratctctagctttccaggggcttaggctccgccttagcagaaaagaaggaaaggaaattgagaaggaagtcaggtgtcccctgcccctcacacttggggatggctgacttggaggacatgagatgggggaaatctgagtgagggcagagaagagaaatgtggaggctgctcacagggaggctagggagcatatggcatatccagcctggggagtggcaccactgggggaaagggtgcgtgtgacagtggggaaggagtggtgataacagatgtgagcttgctgtgtccactaaaaaggtcacggctatttttaggaagtaggtgacaaggcatgttcctgtagaactgcttattactgagaacccactgttggcctcgccctgcgtggtgtgcttaaaaggagagaccgcccccactcaccctagagtcatccacctggtgtccctgagacatgggacactggatgaggaccaggtttggaggatgaagaagatcatgtatttggttttggacatgttgtgtttgaggtgtctttgagataccaaataagctggtgggtctggggctcaggaggcgtcttggctagacagacatttgtctaggttgtgtttgtatttgaagtcatgggcacagcgagattgaagaactcacctcgaacagctgagtaaaggaagatgagcctataaaggacccagaaaaagagcgacctgagaggggcccagaaagccaggacagagttgtatcccaggrgccagggtgagtctgcttcgtgggatggagtggtcagcttggcatcgcggctgtggtgagtgatatggaggagatgtggctgccttcactgctttggtgggatgatgtgagcagaagcgaggttggagtgaatgggtgaggagtagcaggacgtgaggatctgatgatagacaggctctgaaatgttggctttgaaggcgaagaggacgtcgttgagggagtgtttgattctgttgcctcgatttaccctcctgctccctttccaatcccagaagggaacatgtggatggcctgccactgacatccctccccacggcgctccgtgctcaggcagacctaggtacctgcaagggtttgcttctttcacaaagtggattcattctcatgaatgaatgaatgagtgaatgaagcatgttgcccaggttggtctcaaagccctggcctcaagcaatccccccgcccygcctcagcctccyaaagtgctgggattacaggagtgaaccactgcacctggctggtattaaattttctttgtggccaactgcatgataaatattaacatgtttcatgggcgtgaaaggagaaaataggtcctctgcgggacgctgactttagatagatctcttaacttcagttacccttatatccctgcttgcctggctgtcagattctgagaggtataacaaaaactctcactgtagttttttaaagtccagctctacttatatttgtgggagttctagccttttgagtttggctttcgtgtttcatgtatataggcttatcaagctgatcttcctacctgtcatttgctggttatttaatgcctttggtctttggycttaaattccatattgtctgtgttttaggagaatacatggccaaggatctgggagaatctcttttctttacagtcttaaaattaataaataagtgcattttataagataataagtgaaaggctcagaaatttaaatgcaggcatcagaggacattcaagccatgcccctttagcttctgttcaggctcacatggagcggttagtaatcaggtctcactgatgaccatgagctccctgtccttggctgtcctaatggttcccatgatagccagatttttaggaggggtggataaaatgagatttgcgtgcaaactcctgggacgttgcctgggaacctcttctctcactttgcaattcctgccccttcctgtaggtccaagaagcggactgctctgcctctcatttacgcatttccttcctcattccagacagcaagatgagtttttgacagagtagccagtacaaacacttctcagggccagaagtcagaaagacgcgggccccaagtcataagctcatctctgtgcttgtgttttaagccacataaactgtctcagcgggctggactagsctatgccttgttgtaccctgagatcctagtgagtagttctccaagtactgtgtttacagataaaggcaaatgccagagagaaatggctggaaaaaccccttggcttgctaaggcaggattatcgaaaagtcttcaacatatatgtttttaaattttacatattttttcatttttatttattttgagaccagactaatttttgtatttttggtagagatggggttttgccatgttgcccaggctggtctcaaactcctgggctcaagtaatctgcccacctcagcttcccaaagtgctgggattacggacatgagccactgcacccagccaaccactgtgcccagcctatttttactattaatatttccacctctgtttttctttgcatttatttggtatgtctttgcccaacccttagttttaaatatttctttctcacttaaaaaagtttatcttggctgggcgcggtagctcacgcctgtaatcccagcactttaggaggccgaggcgggcagatcacgaggtcaggagatagagaccatcctggctaacacggtgaaatcccgcctctactaaaaatataaaaaattatccaggcgtggtagcgggcgcctatagtcccagctactcgggaggctgaggcaggagaatggcatgaacccgggaggcggagcttgcagtggagccgagatcgtgccactgcactccagcctggacgacagatcaagacttggtctcaaaaaaaaaaaaaaaaaaagtttatcttgaagatggaatcttcgtaaataaaatttgtttctcttataatcagaacgtggttgagggtggatggaggttgacagaaggcaatgataacagcaacaaacctaattgcatggtttctgtctttggtagaggaattctgactgttgacataccagatatacttgattttattctttgcatcttgcttattacttattatacttgcatgcattcctttcctgatttttgctgttgggttaagtttctcatcgtcatcttccccacgccacctgtattacgtttcaggtttggttgtgaatgaagagaggagccccgtctctctctctctctctctctcactcactctctcactctttcttgaaaaatcagggtcgaggttaagtgtgtgttccatgagattgtcttggcaccaggctccttatggactgttgtccctagcattctcaagggctgtggttttcaaacttgagcatgtataagaacaatctggaaggcttgttaaagcatagattcttggactgcaccctgaatcattctaatttaggaggtctgtgatgggacctgagcacgttaattgcttacaggctcccatattgtataatgccgccgggccacatgttgggtagcaccgtctaggtgcctcccttaactgcatggcccaagacagctcactttcacatccccatggcaggccctcctagctgctaggggtctggaaagcagtccttagtgggggctgctgtgtgccaggctatggtgtgttctgttactaaagcaagagagaacagatggttgaggaggacaatcagaagtttctggaacaccacccactgctctcctgaatttgaaactactactatgcttatcagtcttgctgttggctaagcctgtgttcctcaggttaggaagtgggaatggtttctcatgacagtggcaagcccgcaggcagtgcaagcaaggcagcttctgttcctgtgggctggtgcacaagctggcaagctgctgtggctttgctgatgccccgagagtcatctgctgctcccagccgtcaggtctggcatccgcatactccattgctgcagccaccaccagatcttccagaccccatgggatcgaggggccccctccaagacccagtgggataggggttatttttttttttttgagacggagtctcactctgtcgcccaggctggagtgcagtggcatgatctcggctcactgcaagctctgcctcctgggttcacgccattctcctgcctcagactcacaagtagctgggactacaggcgcccgccactgcgctttgctaattttttttgtatttttagtagagacggggtttcaccatgttagccaggatggtctcgatctcctgacctcgtgatcctcccgcctyggcctcccaaaatgctgggattacaggtgtgagccaccgcgcccggccaggggttatttttttgtgctacctcctcccaacttcccttcttcaaccccaaatatgacacctaggtgactgtttctaggagagtttgagggcagaggctatttgaaccctgaactgaggtgggggtgatgttcggtctccgtggctggtaatatccttgagagatcagagcagtggttgccaacccccattctctgttgtcatcacacatagggaggggatctggagagaaacagggtcataaggctcctatggagtggctggtacttttctgagtggcttgattatatgggacattatttgggaggcagtagtaactttcttctctttccggggtttaacctttgtatttctcaagtccattctccagcctgagaaggtgtgatggagcccagaaatacgttgagtggttggggaccagcctggttcataatgcactggcctggaaatccagagatgtggttctagtcattgtcctgcccccagccagctctgagacctcaggcagagtctttctgctctctgggtctcagctcccacctcaaataaaataaacaggttgaatgaaatgatttcatgaaggccctttccagctccagtattttaggattcttatgtaatccaaatgctagtgcactgggaattgactttatcttgaagaagtgtctttcagaacctgcttgctcaagttcagccccttggtgaggctccggacgctgccactctcccagcctgccttgtctggagtttctccaggctgagctgccccaggtgccagccctcagaggggaggtctgaggtgcagcctggctaatgattaacatacgctacagctattttagttcctggcatgtgggtggggagttgaatgcttaacagcacctgtgtaggctttttgtttagtgcctgggaaaatatggtcagggttggtggagtgctgccctgaggctggctggctggcttcggtgacttaatggcacctgtgaccagcaagggcaggacattggggctctggagtgcacgcccagggcccccacccccttctcagtagagctggagatgttcatactcccactcacatcacttaaggtcctgccttgaggtgggggagagaggggaatgtcctagatgtgtcctccctgcccccagaattcctggggcctacgtaatagaggctacygaaacaggtgccacccagagagtgaaagaaatgagtcagagtccaccggggttcctgccagtattcagtatgtgtcaagggcctcacagtgccagccctgtggcaggtggtggtgggggacaggaagagaggcctgtcctacagcctgtagcactgatgctctcatggggaggcctagaaaaaaagtgtctggctctggcacttgggtgtgtgacctttgcatgtcaagagtcagctcagccttcgttcccttgcttataaaatgaggatgataatacctatccaataggagcattgtggaggttaatgaggtaatatatagggatgtaatatatgtatctatcctaggagttagaaaaaggagagcttattagaacattagagaacatggaaaacattttaggacaagtgctgtgagagttccaagaagagtgagcattgtggataggagatcagggtgggcttcctgaaagagatatggtatggtttggctgtgtccccacccaaatctcgaattccctcgtgttgtagaagagacttggtgggaggtaactgaatggggcaggtctttcctgtgctattctcgtgatagtgaataagtctcacaagatctgatgcttttataaagggaaatttccctgcacaaactctcttctcttgtctgctgccatgtgagatgtgcctttcaccttcagccatgattgtgaggcctccccagccacgtggaactgtgagtccattaaacctctttcttttgtaaattgcccagtcttggttatgtctttatcagcagtgtgaaaatggactaatacaaggtggaacttcatctggactcagggaaggccaggagacaggaggtcagaccagctagagggaccacctaagcagaggtgtcctgaaaagggaaagtgctgagctgggctgggctaaggacatgcattttttgtgcttctctccatcatgcatgtccctgaggtaccttctgttttcatgctgttcctcagtggcccagtgtgagtgactcttggctccagactgcttgacacagcttaggatgccagctgcagaagggtcagcccattcccaagtgaaggtgttttctcctccagagtgagctgcaggtccttgaacttccagttgcatgcggctgactggggacattgtcaccatctgaagagcagaccttgataagggatatttggaaaggtttcctgaggcttctaggtagagcaggggtgctcagccatttggagctggaatatacactctgttaagtctcccaggcttgaaggggctgggcttccagagtggtttgaacaggccccgaggactggctgatgggcatcagggcctttccgggagaggctgggggacacactgctgccatcacactcttcagtcttcttcrcctctcttcctcagcctgtggtgagagacgggtctgtgccggccattcataaggagatgagatggctcataacacaccaactggaagggccctggtaaacctctactcctgtgatcacaaatgcagattcctgcaaggacagcccggcagctgaaggagggagggaggtgcgcagctgttgccagccctagccgagtgtcaccatgcagaaatatggggcccttgttgccagagctcctgttttaatatttttgaaggatttaagccagagtctcccttttgcagccctttcctccctccaatgaaataatgctattgagctccaaaaccttcaggagccccaggttctgggaggcagcatgcaaaccactgaggccctgcaggcgcactcattgaaaataggtgaggtagacraggctgggagggcttagatttgycaaggcccctcagagagaagccagtttctcagacgcccctatgctccactgccagggaacacattttctgaattctttgtcttcccccccgactcttcctaggagtggctcttaaatattgtagtgtgtgtttccctggaagtgcgctattgtgtttatctcsctagctagagggaaagcatgatgcaggccaggactttatttttttcttccctatcctagggggtgtagcccagcccctggtgcctccataaacccaggtgggattgctgtgaagctaatgaagtggaagcttcaggtccccggacttgtagcaccctagtgaggggccgtgggaggggcactagcagtgagttcacagagtcatatggtttataacatttgcaaaaaactaagattttttgtattctttgtcctgaagagggttcctaaaattgtataagcttcaggccccacaaaacctggacctactgcagatgttggtaccagtctcacagactggctgctagtgttttattttaactttcccctaaaaaatatatgcctgttttttcagaaagcagttgaagaatatagttcaccaggctggtcaacatggcgaaaccctgtctctactaaaaatacagaaattagctgggcgtggtggcgcatgcctataatcccagctacttgggaggctgaggctgcagtgagtcgagattgcaccactgcattccagcctgggtgacagagcaagagacttcttcaaaaaaataaaaaagaagaagaatgtagtaatattctgtcttttttttttttttttgagacagagtctccctctgttgcccaagctggagtgcagtggcacgatcttggctcactgcagccccagcctcccgagtaggtgggagtataggcatgcgccaccacgccagactaatttctgtatttttagtagagacggggttttgacatgtttgccaggctggtctcgaactcctggcctcaagtgatctgcccgcctcagcctcccaaagtgctgggattacagatgtgagccattgcgcctggcagaagtaatgttctctttctaaagttagatgataaaggatgcttattttattrtgctttataattcatatatatgttgtatttattgctatattgtaaaaatattttataataatacacgaaaaaagccaaatatgttgatccaaaaggcttataatgaagccagcagtcccctgacacatccttcctctttccctttctccagagttaatcatttttaactatttttaattaataggcttatatgactgtttcttaatttatcagttttgaaatatgttgacttcctgcttggtagattaggaaccaatacatacatcaatatttaatgtatgcattattgtgaccataaattgtattgttygatgctgtgcaagtaatgtgccgtggtcacacattaggagtacaatccttcctgtcccaatattcctcaggtggatgctttccctccttgggggcctgattttctgtgtatctattgttccaaactggtctggttgctccgcaggcctgctgctcagctgttgtcccgggacttctttttacagtcttctgtgttagattctcctattcctagatcctatatattttattttctttattttccttatttatgtctcattttgctgaaatcatccagaagttcctaagaaaagtgcatgggaggtagattttgttttgttttttgtttttgaagcttgtgtgcctgcaaatatctctattcctccctaatggatagaaatatccattccaaatatctctatccagtagtggataatttagctggctatagaattataagctgaaaataatttcctttctgaacactgaacacattattctgttatcttctagtttctagtgtggctgttgaagtccagtgtccttccagttcccctgaaaaggacccttgttctttcttttctaaagttttagtatcttctgcctcttctcttctcaaatttcacaatgattgctttgctgatctttttgctttgtggatataacattttctcttccgtctctaaggatattattgattatatttttgtcctctatttctcatcattgtctgtttctttggttctcttctatctctgaggatattattgattatatttttgtcctctacttctcatcgttgtctgtttctttggttccttttcttctgttttggtctctccctttcttggtgtagactttctcagatgtcctgtgaccctttgctgtctatatgaagagggagaccataaaaatctgattagagtgcataggtgaaatgtacaggaggggcaggattttatcacatctcttcccccttcggtgtgtttcctggaaggcagttattccccaatattgcaaaattaatctctcctcagcgctggtcttcccactgtacctgctgttgcctcgggcaggaagcagcaacccaggcttgaactcccatgggctgcccccgtgatggaacaaaaagaatcatcctagagaactgggcctgagtccgccagcagctctgaggacaggaagcctctctacccaccctgccctggggacgatgagctctagcctgggagtgggggattcagcaccagccctcttagggtcttgctgtatcaccttggcatgccacaaccctctctctggttgtcagtgtgaccatttgtgaaatggggtgaggtggggtyggtgggagtgaactgagtcgtctctgaggtgctgagctggcctctggcatccggttgtgaggtcctggctgatggggtgtgatggccctgcctgtgcaaatccgactgggcaaatgctgactgggcatgcgtagcctggccacacggaagccactragggcccaagtcccctggtgactcatgttgattggtaattcaagttagcacacctgtgccgagcctgttcccgacacatgggagaggcgagcacctggttcctccttgtgccrttggaaagggttttytttgtagtcttggtggtttaatatttcccttgttgaagaaagctggctgagttaggtagacatgttcacagagctcttatgcaaagagaacagaggcctttggaaagagaatgccatagaaggatctggaaggaaagagaaggaatggtcactgtatatattagttttctttaaagttttttttgttgttgtttgtttttgttttttgagacagagtctcactctgtcacccaggccggagtgcagtagcacaatctcggctcactgcaacctgtagctcctgggtttaagcaattcctgagtagctgggactacaggcacgtgccaccatgcctggctaatttttgaattttaattttattttattttgagacagaggtttgctctttttgcccaggctggagtgcaatggcatgatctcggctcactgcagcctccacctcccgggttcaagtaattctcctgcctcagcctctcgagtagctgggattgcaggtgcatgccaccacacccagctaattttgtatttttagtagagatggggttttgccatgttggccaggctggtctcaagctcctgacctcaggtgatccgcctgcctcagcctcccagagtgcttggattataggcatgagtctctgtgcctggccaatttttgtatttttagtagagacagggtctcactatgttgcccaggctggtctcaaactcctggcctcatgcagtccgcccaccttggccttccaaagtgctggggttacaggcgtgagccaccgtgcctggccaatagttttctttaaaaattttttggccaggcgtggtggctcacgcctgtaaccccagcactttgggaggccaaggcaggcggatcacgaggtcaggagatcgagaccatcttggctgacatggtgaaaccctgtctctactaaaaatacaaaaaactagctgggcgcggtggcgggcgcctgtgatcccagctactcaggaggctgaggcgggagaacggcatgaactcaggaggtggagcttgcagtgagccaagatagggctactgcagtccggcctgggcaaaagagcgagactccgtctcaaaaaaaaaaaaaaaaaaatttattgtaaattaacatttataattatgtaaatttatggagtacaaagtgatgttataatctatgaatacaatgtgaaataaagcaaactagttaatatatccatcacctcaaatagttttcaataattagttttcaattactgctgtaacaaattaccacaaacttgtggcttaaaaccatgcaactctttttgtggtaaaaatatacacaacgtaaaatttaccattttacccactgttaggtgtgcagttcagtggtgttaaatacattcacttcgttgtgcaacagtcattacgatgcatctccagaaggttctcatcttcccaaactgactctgtactcaggaaatgtaaactccccattccctcttacctgagccctggccaacagcagtctactttctgtccttaggaatttgactcctttggagacttcatataggtggaatcagaagtatttgttcttttgtgcctggcttgtttcatttagcataatgtgttgaagatttatccacattgtagcatatgtcagttttcttctgttttgaggctgratgatattctctttttatgtggagatcttgttttgtttatccattcatccatcaatgggcacttgagttgtttccaccttttgactaytgtgaatgaggctgctatgaacatgggtatacaaatgtctgttggagtccctgctttcatttsctttaggtatataggttgagtatcccaaatctgaaatgttccaaagtccgaaactttgtgagcyccaacatgacgctcaaaggaagtgctcattgaagcattttggattttggatttttggattttggatacacaatggtaagtatgatgccagtattccaaaatctgaartcatctggtctgaagaccacaatgtctgaaacattgctgatcccacacattttgaatgagaggtactcggcctgtatgcccaggagtgagattgctggatcgtatggtagttctatgtttaattttttgaggaatctccatactgttttccatagtggctgcactattttaccacatggtttttttatctttacagttttatctcagggtcttttggatctcatggtgctaaaatgaaggtgttggcagggttgtgtctttgtctggtggccctagaggtgaatgcttccttgccctttccagctttagaggccatttgagttccgtggcacttggcccttttcctccatgggtggaatccctctcatgcttggactctgtccttcttattcttccttttcatccttaacccagcaacaaaggctctctgctttgaaggacgcttctcactggattgggcccacccggataatctaggctagtctccccatttcatggcgggtaaccctaatcacctcaggacagtcccttttgccacctaaagtaacgcattcacaggtaccggggatgtctttgagggacctaatcagagaagctgatggtagctgagtttcaggctctgaaaagccctccctctacccctccccttaccagcattttcctgaggccccgggaccctaagggttggctggacactcccctcactgtgtgggctgggctggtcccctggcgggagcctgacacctgagtttagtgtgtgcccaggatctgtgacccttttctccctctcgaaatgtcagagcctggcttctttggccactaggcgtgttggtcacagagtgaagataactgtgtcctgctttacaaagcgcgttcctgttctttttacttttagtcctcatagtaatccaaggtaggtggggtacatcaggtctttgcagatagaatggaggttcggagaggttaagttgcccaggggggtcacacagcaagcagttgcgttaggaaccagaccttggctccaggctaatgcctcctagggactaagttaaaattaactgagcacctgctgtgtgctaatacctgttgtagtgctatatatatatatatatatatatatatatatgtgagaatactacattctcacagctgtgtaatgagatggatgcatttttcctcttttcacaggtgaggagaaaggctcagagtggtcaatctatatatccagggtcacacagctaacaagaggtagagctagaatggaatcattgtcactggactccaaaccctgtgtaccatcccagtggcctagcagcagtgttagaagatgatatcagagctgtgtgggctgcggtaaaactcatgcagcagaattgagaagtcccttgtgactgtcctgtgatgtttggggcccttgacgggggagtgtgggccgtgaaaagatgggggagctggtttagagtgtgtgagagagagtaattgggggtggtagaagcctgccaagaatctaggggtagacattgtgaaagccaatgtcagtgaggctcaggcccagtgtcttggagctgcagagcttccctttacctcccactgcaaaatgagggargggtttagagaagtttctgcttccttccggcagagctgctgcaagggttgtcttgtagatagtaactaccacaggacttggggtgtggcacatccctgtgggcccaggagatctgggagaagctgggttggactttgcagtaactggagtgacctgacagctaagaggggtgggattgacagggaagcctcagccaccctgggacttgtgcccaattgacatcagctcactaccattgttttgctggtccctcctaggcgggccctggcagaagctccctctgctcaggtggtgtaactggcggtggcttccccttgcggaagtgggtaaacaaagacagagacctgtgtctcctccccrcccctgccacctgcacttataaacacaacccactgtttccctttttgggagtgtgtgagagagagagagagtgtgtgtgtgtgtgtgtgtgtgtgcacgcgcgcacrtgcgcgtgcatccttaggttccgtctaaatccgttcaagctgctgtaataaaatatcatagaccgggtggcttataaacaacagaagtacattgctcacagttctggaggctggaagttgaagatgaaggtgccagcagactcagtgtctggtgagggcccactttctggttcacaaataggatagcaccttctccctgtgtccccacatggtggaaagggttgggccctctgggatctcttttataaggccatgaatcccattcatgaggactccaacctcataaccttccagaggccccgcctccaaatgtcatcacactgggagttgggatttcaataaatgaattttggggagacagaagtattcaaactatagcaggtcctggccacactttggagtcaggacttgggtggggggctttttctgtcackgccactgtgtctgttrcaagaacctcagcgtcctccaggacctgagtgcccatcacgtgctggcctgcgaggcagccagatattagcactgtgtctctgtcactttcttcctctgctgcccactttccactcctcagaaattctgaattggactcagcatttgactgagcattggctcttatgtgagcctgtttggtgtgggcaggcctcagaggtgactctgcccacaaagaggagtggcctggcttccagggaagcctgccatggaggagcgtgacggagagatctgcgtgtgacgctgtgtgctctcggtctgcgttgtatggaaagtgagttcctcctcacttgcccccatcccccttctcagcacctggtctggagaggcaggcaggaggagagaagatggccccatccatgccacacctcagtgaaaattctgaggacaggctctggtgcccgcagggttggagcttcatgcaggctgaggccctgcctctgcgggtccctctcccaggcaggtttactctccgagggtctttcatatctccctgcccggtggcctccctccaccatcagtcttgccttcgctgtcccctctactcttggagtggagcaggcccccatacacccaggcacgtggaggggatggaaagaaaacagcgccaatttcctgttggtgctttctctattgggaggctggaaaatccaacacagccatgccagtgtgctccccactcccatcctccacctgtcacactgccctgaccctccccagttccgtgtttctctcctacccccctccttcccccttcagtccccacagttctcatcctgggcattatcaaatagcccagggtcctctctttcttattttgttttggagaaacaggatgtcatgatatgttacatgatataatgggaacaaacttggtattaaactgttaatatccccattttacagatggggaaaactgaggtgcagaaaggtctcgtaaactgtcaagatcgcgttgctggtggggagcaggactaggatgtgaacctgggtagtctggcttcagagtctgtgttcttctcaccatcctccattgcctttaatgaagtactttaatgaagtacctttaatgaagtatgtaatgaagtttcatacagtgaaaccggacttagaagccaggtatcctgattctgaattccatgctatttcatcataccagtgtttctaaagctctgttcttaaaatactagtccctggggccagtgggctctgtgaggaagtatagtgtagtggtaaagtctgggctttggaagcagactgcctggctcagccattcaatagctataaccttgagcaagttacacagcctctctgtccctcagtcttcatttctgatatgagaaggataattttagtatttgcctcatagggttgttataaagttcagttccgtgtgaagcacttaacagtgcctggcacatagtaagcatttaataaatggtaactactattatggcctaattagtttgggaaatttgaggatagagttaagcaggcacttttgttacaggatttatcagagcttttattacgctgttgcaaattggcagtttcctggaaaggggatgtgtagttatagtacataactatatgtagtaagcattttctaaacttttcgggcaactaatctcttgctcttgtctgcctgtctcgctccttaaactgcgtgccttctaacttcacaacttgtaagatatgaagctggtgtcagggaacacattccgggcagcactgagctgcccatcactctatctgcttctaagtgaggctgagctaggcctgggcatcccggttagatctgagcaagacttctgggggcagtagatggtaggtgttcagaagcaaacagacttatagtgaaaatgaacaagctgtccatcagttgactgtcatgcaccaggtgggttctgctctacagaaggccaaaatgcatattgtgggagtgtgatgtccttgctgagatccttggatttataagtgtttattatgctgttccttgccctgcaggccaaatacatcctatttgatacttaaataatctcaggagccaatgaaggaagaggttataaaggagaaaattgactaactggcaaagcagaggccagtccccagaactccatccattcttccactcaagctgcatttatgaggtgcacattcagccagatgctggggtaacagtggtaaacaaggctgtgggactgcatttttgactctggaaaacatttgcagatggttggcagcatcaccactaggtagagctcagtggtcctggaagagtcctggggaggttggttttctggccctcttgtattgacaagtgccccctcaagcattccaagctcatactcttcctaaggtgaatcagcacctgagtcttttgctgatgtagaagcctgatctcaacttagagtcccagctrtattatagttatrtaaacacactgtctgtctgtctgtctctctctctcgtattagttatataaacacactctctgtctctctctcacacacacacacggtccctgactcaagatggttgaacttacagtttttcaactttatgatggggttacatcactttcagaagggatgtaaccagctcctccacttttgatggggttacaatgaggctacggtttttattgagtgcatgtcactcttgcaccatcataaagttgaaaaatcataagtcgaaccatcataagttggggactgctgtgttgccagcattaaatgcattttcaactcatgatggstttatttggatgtaaccctatcataagtcaaggagcatctgtatgtatttatatttaaagttcctaacatttagagatatgaacagttacagatgaaataatatatgatgtctgggatttgcttcaaaacaatacaggggtgtgggtggggttcgggatgaatcaagatgggccttgaggtgataattgttgaagctgagggatgatggtttattaaactgttctgttttatatatgtgctccataacaaaactttgtgaaaaaagtcgaccattattaatcaccgcctctgtgattaatggattaattaggattgtggctcactccatggaattccacagccacagttaggtacatggtcccctggggccagctcctgccactgaaggggtgtgtggggcagagcttgggctctatctgccttccctcgtcttcatagttatgggggaactgtgagctgatgcactgagggtttctggaaccttctggctgtgaggagtggccttggcagacccttgtttaaagcatgcttattgcactgtctccttttgcccttggaggaggggtcttcaagtaggttgccaagggcagggcccactgggaccaccagtgaagccagctcagcttggacagaagtggcacacgttttgcaatgcagcactgtgaggggatgtcaggttttgtcgtcagctgcctgcaggccaagctctaccatggaccctctcygccacacccgtgtgatgtgagcaagccatgtccctggtgtattttagctgcaaagctgaggaagttagaacatgatcccttccaatgtggacattttgtgagtctgtaagtctaggatttggggtgaaagctgaaagaggcccccttcagaaatcctgagatcccagaggaaggaaggacctcaaaaagggttgcccctggttttgcccatgggtcaagtgaggtctgggagaggaggcctggcctcaggttgctggctgagatccttttctggctgagatccttggaacaggactaccgtagtagacgtttctgcctcgtcttagaccttccatcttgagttctgggctccaggcccttgtctgcaccttgctctagcctggtgcctccctctctcctgcccagtgacctgggacgagtgcctagccactcacagggcactgtgtggaggtcgtgagccactcacatcagctcagggctaagtaagtcttcatttccccagcccatgccaggaggggcaccaggtcggaatgtgaactaagaaggaaaactccaagcaaaactctcaacacttcaccctgcgaccagatgtgtgttttttttccccacactgaccaattctctgactctaactgggtgtcctataatgcagctcaattctgaccctaactggagtcactgcagaccctataggttaaagggctcagtcccacmagactgccagatatatatttcttatatcacattatcacctgagacattacttaaccagagccgagccttctcccggagtgaagagagtttgcagatgcgtcagtttctttcctcttttaaaaaaattatgtacatatatggggaatgggaggccaagggagggagagcattaggacaaatacctaatgcatgcggggttcaaaacctaggtaacaggttgataggtgcagcaaaccaccatggcacatgtataactatgtaacaaacctgcatgttctgcacatgtatcccagaacttaaagccaaaacaaaatgtacatatatctgagcatgtataaacacatatgcatatacatttatatatttatgtaaatatatatacatgtattatacatttctgtgtgttttaaactgtacgttgaaaactgcttggtggtgacctttgtgtacaaggatagagggaagaatgcttgcttttcattttgtgtgtttctattctgtttgaatttccctacagtgtgcttgtattccttttatttgttaaataaaatttattttttagagtggttatagatttacagcaaaattaagtggaaaccacagagtttccctgtccccctgcccccacacttgcaccccccgccattagcactcccaccacagtggtatattgttacaatcagggaagcaacatcgatccacctattcattctttcctcccctgacctctggcaactactcatctttttgctgtcaccatagttgctttctccagaatatcgtagagttagaattatacagtgtgtaaccttgggtgcttccaaattgttggccattatgaataacactactgtgaatgtccatgagcaggttttgtgtgcggcagaagttttcaacttatttgggtaaataccaagagcatgattgctggatcattggtaaaactatgtttagttttgtaagaaaccaccaaactgtcttccaaagtgcctataccgctttacatccccaccagcgatgaatgaaagttcccgttgctctgtatcctcaccagcatttggtgttatcagtgttttggattttggccattctaataggtgtatagtagtatcttattgttttcatttgcaatttattaatgacatgttgagcgtcttttcatatgcttatttgccaccttatatcctctttggtgaagtgtctgttcaggtcttttgcctattttttaaatcgtaaggttttcttgttgagatttaagagttctttgtatattttggataatagtccctttatcagatatgtcttttgcatttattttctcccattctatggcttgtttttccttcctttcattttattttatttatttattttttatttttttgagacagggtttcacttccatcgcccaggctggagtgcartggcgtgatctgggctcactgcaacctccacctcccaggctcaaatgattctcctgcctcagcctcctgagtagagtagctgggaccacagtcgcatgccatggtgctcggctaatttttttgtattttatttttgtaacgacagggtctcattatgttgcccaggctggtctcaaacttctgagctcaaatgatctgcctgcgtcagcctcccaaagtgctgggattataggcatgggccactgtgcctggcctcatcttktcattttaaagaatatatcagcagggattattggacctgcctggtttaaactrttgtcttagttaattttgtgctgctctaacaaaatatcacagactgagtaatttataagcaatagtagcttatttggctcacagttctggaggctgagaagatcgtgaggctgcatctggcaagggccttcttgctgcttcataacatggcagaagacatcaygcgggtaagagagagcatgttatacttttgtaacaaacacactggtggtaaggagcccacttcctccataacacattaatccattcgtgagggtagagcctcttaaaagtaccgcctctcagaactgttgtattgaccattaagtttgcagcacatgaactttgggggatacatttaaacaatagcaatgatatatttaaattttatggatacaaccttatggggaaagtattttaaaaaataaattgtgtgtgtgtgtgtaaaaacaggttaaggatctaatgttaaaaaaaaaaaaaactaatatacaaatcaatattccagccaccagactggggaaggccagtggaaaatcactccatgaaagcatccactgtagtcccrgtctgcttggtttgctgttaggccctgaggggcagggggtgtcactgctgtgtggcttctggcccgagatgatgtttctaggcccttgcctctcagcattaacctggtgtaggctctgttcccaaatgagccctgtgttgtctttctggggaggacagtccagagtcccaggcatggcactgacaccatccacccctcctttcccttctgtatccctgaagtcaggcaggacaccagcaaatgtgcatggcctagccttgctggtggctggagcccatatctccacctccaattgttgggtagagacacagcaaggcttcccttttggtagggggrtgactgagtcggggcagtgaggctcttcttgctctggcagttgcctcctgtcccagtgtagcatttctagattcctgtgttaggggactccagctagtacccttttagagcctgtggagttgaatggtacacttacgtacacgtaacatggctttagggaacaggccrttttgcagccactgagaagcacccccagatagctgctctatgcttttggcattcaccagacgctttgaggctggcttctgatgcagtgctgtcatgccagactcctgtcaactttaatagggatggcaccatgtttgagaggccgaagaagagacccagagccaacgaacaaggcatagggcttattgaggggacttacatatggggcggtccagtggcagcaggctggatggaaggaccactactatttgtaaaaagcatgcagtttgtatagcattttaatttagcatcctccttcctaaccacctccacctggcaaccttcatttaacgcagaacaaagggccttgatctcctgtatrgccatggaatggcttagggrttctgatgttccttatagataaggaatggatctccaggttggccacagttcctcagctcagaactctgaacacacattcttcttagactatagggtcgttctgggtatgcttaagtgattgctgtcaggtgcatctgtcatacaactgtgggggtgcctaggtctagtctgtgtccctagagcttactattgtgaagaagagtatattcgtccattctcacacgactataaagaaatatctgaaactgggtaatttatraagaaaagaggtttaattggctcacagttctgcaggctgggcctatgccaggttgaagggcccagaatatgggagccaaggtaccagcatttttagccagctctccaagtgagggaaagcatgatgctggcatctgcttggggaggcctcaggaaacttacaatcatgtggcaggcagatcttaacctggctggagcaggaggaagagaggtgtggggaggaggcgctacacgcttttaaacaaccagatctcaccagaaccctatcatgagaacagcaccaaagggggaaatctgcccccatgatccagtcagctcccacctggccccacctccaatgctgggaattacaattcgattgtattgtaattagaaattacaatttgggcagggacacaaatccaaaccatgtcaaagagtgagatcagatgagctagagagtgtccaataccttaagggaaagagtgtttcctagagtgtggaccacagaaccagttacatcagaattactggggactggggggtatgtatgcttgtttacrcttcagattcctgggcctatcccaggttagaaggcccagaatatgggggctagggcgctagcatgtttagtgagctctccaggtgattatcatgcatgatgaagcagtgtggcctgcaggcaggcagcatcagcatcacctgggagccactggaaatgcaactttttgggccctgccccagagacactgattcaaagactctggaggtggggcccagcaatctgtgttttaacaagccctataggggactgttttccagaagcaccgatttaactggagagggccccagctggatgaaatcaggtgcacagctgcaggtggatggtcgcagtgaggaaggaagggcrgtatttgtgctgcagcctgccctgagaggcaggaccagaggccagaaggtccccagagacaggtttctaagaattggaccmatccttaaggaggccagctgcctgctgtgtgcaggaggccctctccagtgagtccccatgtcagagggccrtgattagaagcaggcgtagagcgggggacatgccccrgccatcagaattgcaccagcagtgtgaagcatgtctcttgccccatgcaaggaaaggaggagagaggcattggtcagggtgaaaggtatgattctcatggatgccagagagagagagagagagagagagcagatcttctggattatagctcactgtgttgcctctctcctggggagtgggtgctggacaggctagggagggggaccygagggccttagaagtcttgccgagcccagatatggcagycctggggtgccaggaacgacttctccaaggacagccccttgyggtagcctcttttgaaaaaatgcagaggtcacagttaccagaagactggaccatgagcagatttcttaattttcaaagaaaaggaggagaagaatgctgcttstgtgagtcagagagcagtgtgctaatcctgcagcctctagcctcctagaacatggatagcttggggggagattggtcagcgctgggagcctgtgtccacctgaaggtcacccctggctattgggctgcgtttacttttctcctgggggtaattaggcagataaacaggctctcttcagagtaaatgtgctagaaccctcacttgrgcatgtggagaaatgtgtactgggtggtggcagagtgagttgggggagagctggttaaatgcctgcacccacatgatgcctagtgtttgatgttgaactggggagttctgagtatgacagttctgtagtgtccctcgttgtccctttcgtcttggttacttggcagaacacaaatgccatgcttattgcatccatggatgtaaaacaaagctgagagagagggggaagatgtttgatgttgagcagaatcccagaaggtctcaggagactggagcartgggcagaacccaggggagaaatttcacaggagcccacataaggtctccgtggcctgaaaacccacttgtaccagtccggggaggtagggagtagcatccactggagggagatgaaggtcccgccctgcactcttcagaccatacctggggcgtttggtcctgaaaagaactaaaagataagagtggggtcaggccaggcatgtaatcccagaactttgggaggctgaggcgggcggatcatctgaggttgggagttcgagaccagcctggccaacatagtgaaactctgtctctactaaaaatacaaaaatcagcctggtgtggtggcaggtgcctcaggtgcctgtagtcccagctacttgggaggctagggcaggagaattgcttgcaccgaggaggtggaggttgcagtgagctgagattgcgccactgcactgcagcctgggtgacacagtgagactccgtctcaaaaaaaaaaaaaaaagtggggagcaggcttgaaactatttcaggcagagaatgacagagggaaaaatgaggctattctttctaagaacggaggactagaggtatatcttggggagaggggaagacccagggtcgcaggaccacagctcacagtggggtcgacctgccctgtggggccatgcagggcagagctcctakccaggaggyagattttgactcctgctgggaactcccttaaaagccaccccaagaatgagckccacgagcgccatcaaggctggcctgcaggccctccagggttaccaaggctgcctggaactgaatggaccctgtgtgtgttcttttagtcttggaagaccagccaggactttgggggccagacggctagcctcaagtgagctcagaaatctgcacctgaattgggcctttttaaaagttgtttaatggccaatacatacatgcagcagaaatgcacagggaacagatctaaaccggaagcctcattttctagccccacctttcctctcgagaggcagctagtgttagctagtttcttgtgtgtcattccaaggatgtccgtgcacgtctacactcaggaaccacttagtttgtatgtttctgggttttttattagcttagtacatacacagtactgcaccttgattaataatggtggtcattgcatctttccatatacagagctggctaaatccagaaatagctacagagtatccattgttggatctgttgtggtttatttaaccagcctcattggtggaggtttaggagttgttgcagataaggctgtagtaaaattcatgtctgtatgacatttcacacaggtgtgtgtctggggaagagacttacagaagtggagttgctgagtcaaaggtatgtcattttaagttttgatatctttgtattttatttatttatttattttggagacggagtctcgctctgtcacccaggctggagtgcagtggcataatcttggctcactgcaacttccgcctcccaggttccagccattctcctgcctcagcctcccgagtagctggtattacaggcacccaccaccacgcctggctaatttttgtatttttagtagagacagtgtttcaccatggccaggctggtctcgaactcctgacctcaggtgatctgcccacctcggcctcccaaagtgctgggattacaggcatgagccactgcgcccagccracatctgtgtatttttaattggtgatttcctcagcacattggtgaaggtgagcatcttcagctccttttctgtaactgccagatctgttcacatcatttgacagtttctctagtggttattgatctttttcttattatattaataaaacttttttcctaagtttttttctcatctttattttttttaatttgtctcttatgctgaaattttatttatgtcgttggtttttggggctacttctttcactgyattatttggcctggctggaatttacttggtataaggaacagggtggtatccagcttctgtttcttgggttttttccctgrcctggctgtggatggagcttttggcttcatttctctgagaggaggccaggagtggagagtgtctttggtgctcaaaggtcctgcctagtggtgtctccagagaggaaggtgacagagacaccatcccggctcttcctgctcacctgtcgggcagttccttctattagaaggttcctggcctactggtcatttacatcccccagattacctcctcaccagtgaagtctgagggtttggcagagtctgggcagaagggtcaggctggggccgggacggggagggctttgtactgacagcccacccagcctcagggacaccctctctgaaggtgatgccaccggggacctcatccaccacgtgcttaggggctcagagagaccgaaaactgcaaggagtaggtccttggtccacactacagggagccaattccagctttctccaaagccatagggctttgcctacggtcacctctggacccactgacccaaacaaatgactacacccgtagggctgaaaaccaggcccaccctatggggaccggtggtaccttaaggaagttctttagcttccttaaaaacagcatgtaggctgggcacagtggctcatgcctgtaatcccagcactgtgggaggccgcagcgggcagatcacttgaggccaggagttcagaccagcctggccaacatggcgaaactccatctctactaaaaatacaaaaattagccagggatggttgcgccctcctgttggaggctgaggcacaagaatcccttgatcccaggaggcggaggttacagtgagctgagctcgcaccactgcactccagcctgggtgatagagtgagacgctgtttaaaaaataaaagtaggccaggcgtggtggctcatgcctgtaatcttaacactttgggaagccgaggcaggcagatcacctgaggtcaggagttcgagaccagcctggccaacatggtgaaaccctgtctctgctaaaaatacaaaaattagccagacatgatggcgggcrcctgtaatcctagctacttgggaggctgaggcaggagaatcacttgaacccaggaggcagaggttgcagtgagccgagatcacaccattgcactccagcctgggttacagagtgagaccctgtctcaaaaaaataaaaataaataataaaaaaacttaaaaagaacagcatataccagcctcggcaacatagtaagactctcaaaaaaaaaaattagctgtgtgtggtggcacatgtctttaggaggctgaggcgggaggattacctgagcccaggaggtccaggctgcagtgagccatgattgtgccagtgcactccagtctgggtgacagagcgagaccctgtctcaaacaaacaaaacccaatatgcccagttcttcaagatagatatgaagggcagctagactcttatagttggatagcgtggcyagaacagtggtcttcaaagtgagttccctggaccagtaacatcatctggaaacttgttccaaatgcaaaaactggttccactgtctcagaaactcttggtggtggagcccagcaatgtgttttaacaatcccatcaggtgattctgatatgcattgcagcgtgaaacccagtgtgtaaaaagaagccacatactcgagacgagcaggtgtgattgttgagggaccctgcaggtttcctcacatgtcygcctgccattgggtgtctctgcagactgcagcagcagctgctattagcaagagcaggcaggttgcacaatgtggctggtgtcacagcagatctgtgtccctcctcacaatttaactggcaggggacattgccaagggatccgtgttcagagggacttcgtgagagcaggtgtctcacctggcacctgtccaggcygctcttcctcccttactgacagatctgcaaatcacttacttctcttaatcagcagcctctactgcagaaacagggtgatgctgcctcatttgccctggttcttcaccctgcatcagatgaacctcctgagggccctttttgcttctaggaacgatgattccataccttaccaggtccccttgcctgatgaaccagaggttggagaatgaagagagacaggggcctctgacttcccctgttgctggagggatggcaataaggacacaggaagataaatagacagacctggagtcctgagaatgaggcartgcgtctctacctctgaggtgggagaacaggcccagaggcgcactgcacccttgccagcagaggcaggagcaaagcttcagtgagagggcctttcaaggaaactggctcatggggagtgaatcctgtcactgtgggtggggccgggggtgtggccctggcccagaagtcaggcagcatgctggtgggtactgtttctagctggaggcrccagcaggagacagtgaactggtctgcgacaagcagggcagatgcagcagtttcttctgcagggtcccagttgtggtggtggctgccctttcaagaagctgggtcccacrggccagcaggggctctcaggcagagcctgaatgtgctttcgtcttctcttccagatctaaccatgagctaccctggctatcccccgcccccaggtggctacccaccagctgcaccaggtaagagggtctggggtggggaggagagtgaatgctgcctctgtacagtggctrggagtggagaggggagaacagtagtttcctcactcccctcctcccctcacagcacsgcccagcaggggaggagaggacaacaggagtagtgggacagccagcygaggcaggggctggagaagagcatgacactaaggccatcggaggcctaggtttgaaactgcctccagaaagccctggaccaggcccagggctgggtctcttgccttactctctagtaacagtgggcaaatgctgtcactttgagrctcagttttcttctccgcaaaattgcttcaaggatttctccctcattaggtggtcctggatactgatgagataggcaggcagagcgacacggtgtcctccaaagcattgctaggtgatggttgccccttaccacctctcctaccctctgctcaaggtgtgtgggtttgcagcaacaagatcccccttgccaagagaggaagtggaggcagatgctaagggtcaaaggtcactccctgttttctgcaggagctgtgggtagtcacatggagaagtcgtcttctctggccctggccccttttggtcctcaaatgagatttggtccccactgtgggaaaggaaatatgagggctcatgagaccaaggggagaaaagggtcattccaaggctggtcatcctgagggtgcctgagccgctgcccctctccccaggggactcctaggcatcattgatttctttggagctgaggtcctgtggtttgarcaccccagacctgcaggccatttaccttccctcccattcagcaggtgaagaacagactcagacctagaggtggctcagctgctgtcccagggcatgttaggggctgagctgggccactgccctctgaatgagcccaccccaggttggctggcactggcctgggttctctctctatagtagaaatcctgccatccagatcctgccactgccacctttgctagcacagctgagcagcctctgagcagcaagagaggaggaggcaggaaatttagggaaggttcttcctggagggtctggagccctggagatgaagagccgatccgaagctgccatgtagargaaagcatctaacaggccagaggccccatgatgatgtcgaatgcccatcgggcacccagctgagccctgcaggygttaactcagtcttcgtcacagcagtctaggcatacactcaccattagcccatttgtaagctgaggaaacaagcctaaggagggtgaaagccttgccccagggcacataccggtcctgctggtttcagagcgggcttttcacctctgtttcttcctgtcctcttgtggactggtatctgtgtttaccatgacccagccccatgtccctccagcctcttatcctgcttctccctgccttttacagacttgtaatagcaaacagccaaaccccctcccgccagtgccttcgcattactgaaatctcagagctccctatggtcacctctgtcatgggctcagcatggtgtcccacaacagtctgtccttgtctgtcctcctgctccatgatggtgaacttgggagggcagagcctgcctgggctctcccagcctccttaataccccacagagggtcttgggagtgtttggggaactccaccttcctccctgggaagaggggaaggtttcccctcctctgccagtgggatagggggagactttcctcctggtgttttcatgtggtctgtggtgtcccgaggctcgaggctcgaggctttactgggcctccctttctgaccacctgggagctctcatctctgcctttccccgtgtggtgggggactggcagggggctaaagggcttggtgttgctttcaggtggtggtccctggggaggtgctgcctaccctcctccgcccagcatgccccccatcgggctggataaygtggccacctatgcggggcagttcaaccaggactatctctcgggaatggtgagtccagctctcctgytgaggcagccctggggccacacctgcgtggccagaggaatcaaagctgctggcctctggggctccagagttgtctrtgtgtgtgttgctgtggtktgtagtgtgttgagctgtaccttagaacagggttttcatcaggcttctgccacctgctctctgcccctctctgggtctcacttttcccatctgtaaaatgaggggaaggggaccagatgatctcacaggtccctttcagccctgaggggttagggttgggaaggtggcgagggtatctgcatgagtgtgcatgcacgtgctatgtatgagtatccacattcatatacctgcatgtgcatgtgtgtacatatggagggctcttctggttaggccttggtgggtgtgtggcaggtatcttgggcagacatgctactttttaaatttgttgtttcacttttaaaataatacattttatgatttgaaaacaaacrtatgcttagtttatgatttgaaaacaaacgtatgcttagaggaaattatgcaaccaatacacaccctaatttgtgccaggcccagttctaggcactggggatatgtgaataaaacaaacaaaaatctcagccgtgctgcacttatcatctatggggaaaagacaggcagtaccttaagtcaacgatgtgatgttattgaaagtgtaggtgccataggaacaagttgaccagggtaaaggggtcaggagtgggggtggggtgatgtaaggataatgattttaagttagcagtaaggtgggtctggctgaaaagaggatgtgtgagcaaagacctgcatcaggggaaggaagtgctgtatggatgtctagggaatgccggtgccctgaggtgccaaggggtgtgaggtgctcagggacagggaggagaggccagtgtggctaaagtggaaaggygagggggtgagatgggaaatgaagtctgggggtctagctcttgcagggtgtaggaggctatccatcctaaggatttaggtttttattcctggtgagtgcagattcacctgaacatgcctgccagaggtgtctgtgggtagcaggctgatgtgatggggatgcccccaaccctgcatatgggacccacgcaccttcttgggcagtgagctcttaaccttcacccaggtggtctgggatgggaggagcaaccatgtggagagggaaggcatctcccctgcagaaggggatgaggatctctggtttggatcgagtcgcactgttcactggctgtgtaactttgagcaagtaaactcattctgtggtctgtgaaatgggtataacggtacttcatattccacaagcggagatgctgtgaggactgacttggcttaggtatgaaaaagggtggagggacggagtgcagcagggcccattggcctcaggctctgctttgtgtccttgcaggcggccaacatgtctgggacatttggaggagccaacatgcccaacctgtaccctggggcccctggggctggctacccaccagtgccccctggcggctttgggcagcccccctctgcccagcagcctgttcctccctatgggatgtatccacccccaggaggaaacccaccctccaggatgccctcatatccgccatacccaggggcccctgtgccgggycagcccatgccaccccccggacagcagcccccaggggcctaccctgggcagccaccagtgacctaycctggtcagcctccagtgccactccctgggcagcagcagccagtgccgagctacccaggatacccggggtctggractgtcacccccgctgtgcccccaacccaggtgagtgtcagcccactgcctcccttggtccaggcctgggccccaaaggctggagacacatggctcagtagatggggagacagggaaaggcgcaggcctccagctgcacttcttgttttaacaaatagtgtcggccgggtgcagtgactcatgcctgtaatcccagcactttgggaagctgaggtgggcagatcgcttgagcccaggagttcaagaccaacctgggcgaaatggtgaaaccctatctctactaaaaatagaaaaaaaattagctgggcatggtggtgcatacctgtaggcccagctactcgggaggctgaggtgggaggatcacctcagcccaggagacagaggttgcagtgagccgggatcatgccgctgcactcactccagcctaggtgacagagtaagacccagtttttaaaacaaaaacaaaaacaaaaaaagacaaacaaagagcgtcaccttcttgcagactccccacctctgggttgtgttgcttaaggcccaagggagctgtcctgtttctcctggtgtgatgagacgctccacatccgagttgggtcagaacacccctggcgagtactccttattcctctgtgtcatttactgcctgggctgtgtgttttgtaagaactgcccaggccacctgtctcaagrctttgtgctcaacagctgtcttcggtcccttgatatgcaccacccccgccccccccggcacagacaggttttggaggattattaaaattccctttgggtagggagaatgttggcagttcctccagggttgatcttggctcattttggagaacagttcgtgtttgcagagcctagaattcgttgtcatggttytgtggcccaaccagccagcacaggggtagtggtatgtgctcaatgactatttttagacagagggtctcctttcctccttcccttccatacccacacgttcccccaccctgtgccatcctccagcctccctcccttatcttttccctgagctgccctcttaattgtgttataaccagtttgtaccagcccctaggaagacaatccactgggagacagtttagcctggaaagttccagtttgcgggtttgtgcagctatcagggtctggaggaagtccggcagatgctagtctagagaacagtgcgagggaaccagtgctagatcaagaggtcatcaggctgccatgcacagttgtggaggctcaatacctgcatccactggaggggacacatgggctagccagccctgttaggagtacccatgtgtgmtcacatgtgctgtggaggccaggcatcgatgagagaggccacagcccctgctcccgagacctgcccttcatcaggagcctgagccccagccctggaggacctgggcactgggcagattttcagcatcaggactcagctataggtgagctcccagccactggagccaggaaaaagcttcagtactagaacacaaggccagataacagtcaagttaggtagacgcggcrtaaagtcctctgcattgttgactgtggactcctttagatactccaactcttagagaaagggctgttcccagagtctaggggtggagcagccttgaatgtggggaaggcggcatgcacgacatcttacctgagactgtttgtccgagtagtttggaagccraggcaccatcactgatgctcccggctttgaccccctgcgagatgccgaggtcctgcggaaggccatgaaaggcttcggtaagagaccctgggtggctcaaatcctactccctgccccctatttcccaggcagtttcactgtggctctgtgggctggggtagctgggggacgctgacctggccccagtggtgatagaaggtggatgtgggggtatggctagcatgcccagaacagttgaggggcccaggccagggaagtctcagctgcagagcatctcatgacccctacccgacccacccctgctgcctsttcctccagggacggatgagcaggccatcatygactgcctggggagtygctccaacaagcagcggcagcagatcctactttccttcaagacggcttacggcaaggcgagctgcggggtgggggcgcgggacagtgaggcgtgtcctgggctcagcacagccctgctctcccctgcttttccttgggtgggcccggatctcccggatggacartaaggagcaggagggcatttccttctgcccatccagctggtggcatcgttgggaggtgaaggatgccaccgggtgctgaggtttgctgagaggctccagacatctatccctgggttctagcccttgctctgccacatctcactgaggttgtggccacatcattttccttcccctgccctcttcatgaccaccctggggrgtttagctgatgtaagagctttgcagggaaaggctgtgagtgctgcccaagtacgaggggcgtgtatgagcatattttgaacttctggggttttgaatcttagaaagataaaaattcggtaaatattgattagattcgtgttctagcccagtgcttctcaaacttcattgtgtcaccgatcccctgggcatcttggtaaaatgtggtctctgatttgggaggtttggggcagggctgagagcaggcttttctctcaggcccctgggggatgtccatgctgctgttcctcaaatctgggatatggctcttattagtcacttcctgtggattttttaaatagacttgtttttttttttgttggttgtttgtttgaatatccaatcaggatttgatcaaagatctgaaatctgaactgtcaggaaactttgagaagacaatcttggctctgatgaagaccccagtcctctttgacatttatgagataaaggaagccatcaaggtgtgtacgtgtgtgtgtgtgtgtgtgtgtgtgtgtgtgyrcgygtgtgtgcrcacgcgcgcatgcgtgtggacacacagcccagaaggaggcctggatggcgtgctgtgttctagcccactcattagctgctgttgtcagtatggctcccaggccttcctgggttggagtccacatgctatagaaaagggaactccctgtgatttccccaagaggcaaatgacgcaccagtcatcatcagggaggcttaagtctctctccatcttaaagaaaagggggagctcgggtttgaaggttgcgattctgtggtaagaagaggggtaggaggccatggttggtatcgttctcattctttaggactctgttactagcaaatgacagaaacacacttcggtttaagaacaacaaaagtggagaatcagtcatgtgggtaaagagggcccaggccagacgtctctctggtctctgtctctcctgagcgcccgcttttctgtcagtttctgtgcttctcctaccatggctgcttcatgtggggtgggagagggggcctgtcgaccactctccgcataactatgagacccagctccagaagagaccagcagggtctccaaacgggcaggttctgacgggcccggcttggactcactgttccctccagtcctgcgggttttgactgagggttgggtcctgtccattctgtgcagtcccacagctctgtgtgcaccctgcaggcaggggcaggcagctcccttggaaagggaatcccatgagtcaggctggagcccagaaggagcctgtcactcagaggcctgataagcacagtgaatgttccctccttcaggagaagcagagacttcagtgtggtggcctggaaaggagaggggtctccgctgaaacacatctacatgtgttattctagggagggggtcaggaggccatcaggcagggcgatggcccggggccccagggagtggacccagacatctccctggcccccgtcttcagccrgagtcatgagctggtggttgtggagtgttagaaaccacacaggtttggggcagctgtcactcaccagctgtgtgtccttgagcacctgtgaaatggggacagtggatgctgtctcaggacatgctgggaatactgggtgaggggctaacgtgtagtaacccaatagtagctgtagcaggaaacagctgacacaatgtcgcacgtcctgcctgacaggccctaagtgctctacgtacattaactcacttaatcctcatgactttcctgtgaggtaggtcctagtatcactcccatcttacagacaaggaactggaagcacagagaggttaagtaatgtgcccgaggtcacacagctggtaagctgcagagccaggattcaaaccaacatacaagccaggctgcccagcctgtcctctatggtcttacygtccctggcgtgkttgtccgattcatcctygttgttcctaccttttcctagttgttttcagacattccaccatcccctctaggaccagggtttcgtatgtccacttggatctctcttkctttttacccatttttttcagttgttgtcatctcgcttcyggctgaactctgaataaagcaggcctcggtccacattttaacccaaccatttactgtgtggcctcggaccagccagtacccctctctgatgctcagttttctgatccatggggatgcccctttgtgtgagccctactcatcaccactgccactgtcattgtgcttgcccgggctgtggagaagagctgaygccctcgagcctgggagtggctggagggtgtgtctctgtgtcaggggcctctgttgctgggattaaggcagcagcgtagcccccacccttcttycsgagtgctggtgaggctgctggaacaagcacatggttggttgtattctctgcccctgcagggggttggcactgatgaagcctgcctgattgagatcctcgcttcccgcagcaatgagcacatccgagaattaaacagagcctacaaagcaggtgaggccgctccctctgccctctgccctctgccctctgcagatccctgtgctcttggggctgtggcctcattctctcctagggccttttactccttcctggccttcttatcaacccatcttctgccacccccaatactttgggctttgacccaagacccagcccttccttctgtttatacatggtgcaaatgactaatgtaagggagagscagggaaaacctggatgtggtttgggccaaggctgactagaggccaggtcagcctggaggtcacaggcttgtatatccctggagggccatatgggctatttgttctcttgagcccgagccaagacctccagcctttttctcsccagtacccacttttgatagtgttttgcaatgggcagctccataaagagagctacaggatggaccttccttgcttctccctttcagaattcaaaaagaccctggaagaggccattcgaagcgacacatcagggcacttccagcggctcctcatctctctctctcaggtacttttcccacsacagggctcggggcccccaagccatggaagtcaaagagatgggatccccgcaatgaggaaagggaaaatamatggggaaggagtgggcatgaccatacacctgcttcctttcagggaaaccgtgatgaaagcacaaacgtggacatgtcactcgcccagagagatgcccaggtgagtgtgatggccaagcccctggacttcctaaagcagggatgcaccccgctttcttgcttcctgagagaggtaccctagggtggaaagaacaatagataagcagtgggttgcagatgctgtgagtttcagaygcgctgaactgttcaactgtatgacctagaacaggtaatctgacctccagggcttcagcttccccacctataggagggaacatgtgagataattagtatttcgatagttgatagatcatggttttggacgtgggattttgtgtgacagcgtactttccccatgtttagttgcacatagcattatgtttgcaaaggggcaaaatttgyacttgcttattaagtttttgaggatttgagcctagaaaccagctgccacattagttgagcacccttagaattctgtcgttgtccctcttgtgagttgcagacaaaaggggaaaagtccaagcaaagtccaggcatctgagctactctctcgaaaagtttgggtttcccactaatgaatttcaaccgtagtattatggcagggcagagccattacttcctggtggggtggagttggccatacctctctgtctcccttcactgctcttgtcatccacggcagggcattcaccaggagctgccagtggtctaaattatctctaccatctgcgggattggaatgagacctcaaggaatgcccccttgttagggctggaggagagctactcctctggtctggtccttttgctggtcctccttttccggaggaggaaactgaggctcaaaaaggttgagcactgttcccaactgaaagctagaagcagagcccggacaagggcctatactcctggctcggtcttctgtgcccagtcagcacttgcctctgccctggtctcagacctgctgctcctgcagggtctgccttattcagtgtctctctggctggtaacatccattcccattctgggagtcagggctggacacscctggggctcagggctctggcttttgctccagcgagagttttgcatgccacttttagcggggcaaaaattgtctcatgctctgccttctcagtccagagctgctttggcctcatcttgacctgtgggatctcagcccctgattgctgctttctgctctttttcagggctgctacctgaggcctagcaggcactttagaggccrtctagttcagaggttgcaaattggcaaatactttaggctcaaaccttcagaagtttaccaggctctcctgggtgacctgggcctggggtctgggtgtggcctgtgccrcatgtgcgtcttcctctctctccaggagctgtatgcggccgggragaaccgcctgggaacagacgagtccaagttcaatgcggttctgtgctcccggagccgggcccacctggtagcaggtaaggcaggctggggtccctcagaggccagttagatgagggcagtcaggggattgtggggaaacaaagctatgggaacacttggtcgttcctccctgygtggggctttcgcctcctcaaaagagccccctggtgggratttaaaagacactgtcagagggtttcctgagttctggcaaacatccagttctggaggttctaccggtgtagaaacctggtgtctttgtacgtgggaatgtggaacrtcagagttgggagggtccttcgggagcacccaatccagtgttttccaaagcctggcataagaaacagtcataacaataaaactgggtgccattcatttactcattcattcaacagatgtaaatcgcgctcccgcatgggtcagtctgtcaggtggtggagcaggtgtggggccacggtggggggcagggcactgcagagtgtgttccatgggctgcactttctcatttggggagacagacagtaaacaacaatgaaataaaatctgtatcagatgggaaatcctgtagaggaaaatcaagctggaaacaggtagggagtgatggtagggtccaccgggaggtgcttgggccagtccccactgaggtcrtgacatttgatttaaaaacctaaagggagatgcaggggcagaggcctgcctggggctcccagcacgactgagaacagtgaagggggaccatgtggagcaggtggagtgagcaagaggagtgggaggtgagggcagagaggggagagggccctgctgatgacttcccggagctgggtatttatcctgagcaaaagaggaagccagtggagggccctgagcagaggaggctgtgcagaatccctggctgtggtgccgagaatggagtgaagggtgcaaggccaagcagcgaagcctgtcgggaggctgctgcagggacccggggaggaatggtggtaataggggcttgtggtgaggaggtgtcaggttccggccatgtttgctgatgaattggacacgtgacgtgtgggagagagagggktcgaggattatacagggtttctttaggccaagcagtgggagaatggccctcaactgagacagggggactgtaggtggagctggctttaggtgcctgtagggtggagctgcagggaggctgctgggttgctgagtgtggaggtcaggagaggtctggcctggttgtggaaggtaagggagctatgggtagttgaagttatctgaggctctgggactgcaggaggtcccctcaggagggagactgtggggagcccaccggtgtgaggagactaagaaggagcagctagggagggaggaggacgcagaggaagggggtcctggaggccagtgtgaggtggcaggcaaggactgaggatggtgaccacacggagcaactggtgggctgtggccagggctgctccagtgggcagtgagggtgaaaacccagcgaccgctctgtgctgcacacagagacaggcgctgtggctctccccattcgcagctgtgaaagcaggcacagggtggtagaggaagtaggggtgcacagctagtaacagctgagctgggatttgaacccagaccacccgaccccagagcacactttttaacctctgcactatcctgtaatggagcctgagtgaaagcattttcatcttaatcattatttctttwaatgagtacagaacatgtaagtagtgcatcaagcccatggcttcacaaacattattacttaggagaaaagagtagctgattggaagaagatattaattgagacagatacacacagagcagaaatcacaactttaaaatgcaaatggtagctgagactcaggctggggaaggagagttttatgtcctgggtcagaactggagtcaggaccraggtctccatcatgccacctgtctctctaggagccagccatccactcctgtgggtgcttagcgtgtcctaggtcgaggtgagcagcaagaagccaggctggctggggcaggctgggcctcagctcacaggcaggctgaggaagacagatggatgcatgaataaagccaaggaatggcagagactggaggtgtggaggatttgagaagaggggacactgtcttggagtacatgggagtgggccctggaggggtattaaggtgcgatttggttaagcagattggcagtcctgagaaagggaccacacagggagggacatcaggtggtgcatgtaacttgtgacgaagactctgacttccttgagcgctagcaggcctggggacgtgcagggtgtgggagcagagtggcaggtgggagattttggggcagaggccacctcatgtgagtcctctgttagtctgctcatgctgccatgacaaaataccacagactgggtggcttaagcagcagatactcattttgttacagttttgaaggccagatatccaagagtggggtgccggtttctcccgtggcctcttcgtgacaatcactgtgctcacatggtctttcctctgcatgtgcacatccctgggatctctgtgtgtgtcctaatcttctcttcttctaaggagaccaggcgaattggattagggtacaccctagcagcatgttttaacttaattacctctttaaagatcttatctccaaacacggttatattctgaagtcctgggagttgggacttccacatatgaactttggggagacacatttcagttcataatataagcctctgtcatccccatagttttcaatgagtaccagagaatgacaggccgggacattgagaagagcatctgccgggagatgtccggggacctggaggagggcatgctggccgtgggtaagtgtctcaggtttgccgcccacctgccaggggctaacgtgtatcgtgagtgttcaggctgctcgcctgtcctccagctgatgggtgacaccgtgaagggaccacaggatccaagatcgctcagcccagagtgtccagatgctgggaagtcatgctgcttcccggttccctgtgcagttgaacccctagctgtcctggaggtgtcttgtgtgtgtttgcggtgcagctctggagtagggaactgcagtgtgggtattagtgggagggcatycaactgcgctcccggaggagtatgactcatatcctgccacgtttcctctaaaaatacatccctgcaggcagttgtcagatgtttgtgatggaaacacgtggaaagatttttacttgcagcagcgaaacaggcccatgctgaggaaagctggcttggctccaggatggtggtgtgcctcttacattgcccatgtcctctagcagggccctcccactgtgcrgagttgggtccctgccctgaggccctcacaacccctctttctactcacttgggaaaatcagtctgccccttttttcattatgctttttttggagctttctggatgggagagatggaaaatcctcatttccctgcctgtcccccatagtaggtctcrtggcctgggaagcctagggagatgcacattccactcagccacggtttctccatgacggtcatggcctctccagtctrcccctcctgcctgagcagcagcacagttcctcatcaccatccacattgcttccctgtgtagctcctagccccactaagacccccgccyctctgactcttggtcctttcaccgcagtggttgccaggaaagagggtgggttggtttccaggctttgcgtgtttctgttccaartagctggagccaagatcatgggatagttgagcctggaacagaaggaggaggagaaaagatggatgcagtgatgggtttgacatctgggcctctaagaggacacttgtagactccatgccctgcttgggctgagaattttctgcagatctggttatgccgagtttctctcttctagtgaaatgtctcaagaataccccagccttctttgcggagaggctcaacaaggccatgagggtatgtaacttccaygtgcaggttgcgatggaaccttagcctcgcctgtgcctgggaccaagggctgagggcagaaggcctggggagagctaartctcagctgagagttccgaggacctgggtagggaggggactggagggcccagggcaggtgggaaggtgaggaggcctggtgctcatgctcttgggtggactctctttagggggcaggaacaaaggaccggaccctgattcgcrtcatggtgtctcgcagcgagaccgacctcctggacatcagatcagagtataagcggatgtacggcaagtcgctgtaccacgacatctcggtaygggcctgctgcaggccaactgggctcccttttggcatctcagtcacctgtggaacctccctccttggagtggycatatgcttggcctctgtgctgtgtgtgggcatcttgattatggacctcggacttgttcatccccttgcccttaaacagattataaatttctgagggcaggtggatcatgaccttgctgtcgcccccaccttgcatcccccagcagcatcagagaacactcgggacctccccaaccttgaccgtgaccttcagcgttccgatcaccstgtgattccttgatctgtcagtgagaactcatgtcccaaaggctctgtggagctctgctgtcactccctgacaaagcacttcctgcactcagctttatggcgtaggccacatagtaaggccgttcagagcgagggccctgggggtcacgccacttggagtccagcttttctacttgctaactgtgtgaccttgaatggctcccttaaatctccctgaaccccagctccattgtctttaagatgagaaaataatcgttccttcctgggaatgttgtgagtattgagtgaggcagtgcaggtcaagtgtctattaaacactagccacagttgtatcgctgtgtggcagagccagtctgacaaaatacattctcagctgtgtggtctaacgctcaaattctgaactcacatgagccttgcaattgcaccatggggaccacgtcctcccaccttagactcagtagcatttgatgatggtgggcatgtcatcacaggaaactcactgtgtttccttggctgtatgaatgaagctgttgttagagaattagyrattctaggctgggcacagtggctcacgcctgtaatcccagcactttgggaggctgaggcaggtggatcatttgaggtcaggagttcgagaccagcctggccaacaaggtaaaaccctgtctctactaaaaatacaaaattagctgggcttgcctgtaatcccagctaattaggtaggctgcggcaggagaattgcttgaacccgggagacrgaggttgcagtgagctgggatcacgccattccacttcagtcttggtgacagagtgagacttcgtctcaaaaaaaaaaagagagttaataattcattacagagtatctcctgcatgccagcaagctatggacatctggaagaagccacatgccttgccctcaagttgcttagggtggaaggaaatgattagaaatgagccaagccgagcctgcactcttagagtaagtgtagtggcctcagacagaggagagatccctgggacctgggcagtctgagccttccactggacagtcatgtgtraggagattgcatttcctgagcaggacactgtgttgcgttacattggtaaccccaatttaaggcagcataaatgcactgggaaaacagcratattggttagccctgggaagtggtttttaggatgattataatttttttttgtgggtattcatttgatgtggatagctggggtgagtgctgctttccgtcttctgatgggggcctggagaaggctgaactgcattttttaaggtctgtgacgcctgctgcaggacctgcagtgggrgaaaattccccagggtggggctttctccctataagggtgctcagggctgaatatcaggacccagaaggctgaaagtgactgtcccwcccttaacggatgtcttccttgtttctgtggccagggagatacttcaggggattaccggaagattctgctgaagatctgtggtggcaatgactgaacagtgactggtggctcacttctgcccacctgccggcaacaccagtgccaggaaaaggccaaaagaatgtctgtttctaamaaatccacaaatagccccgagattcaccgtcctagagcttaggyctgtcttccacccctcctgacccgtatagtgtgccacaggacctgggtcggtctagaactctctcaggatgccttttctaccccatccctcacagcctcttgctgctaaaatagatgtttcatttttctgactcatgcaatcattcccctttgcctgtggctaagacttggcttcatttcgtcatgtaattgtatatttttatttggaggcatattttcttttcttacagtcattgccagacagaggcatacaagtctgtttgctgcatacacatttctggtgagggcgactgggtggktgaagcaccgtgtcctcgctgaggagagaaagggaggcgtgcctgagarggtagcctgtgcatctggtgagtgtgtcacgagctttgttactgccaaactcactcctttttagaaaaaacaaaaaaaaagggccagaaagtcattccttccatcttccttgcagaaaccacgagaacaaagccagttccctgtcagtgacagggcttcttgtaatttgtggtatgtgccttaaacctgaatgtctgtagccaaaacttgtttccacattaagagtcagccagctctggaatggtctggaaatgtcttcctggtaccaacttgttttcttctgcttgattctgccctgtggctcagaggtctggccttatcagccagtgaaagttcatgtaaccttacrtagagatttgtgtgcaggaaaccctgagcatacactagtttgcagggactcrtaaggacatgggaagggaggttcccgaaatccaggcaggaggcccagacacctgaaaggcaaagggatcttggttggttgcaggtgcagtgaagtccactgaaggtgtggtgcgaagaatgcagtccttcacccaggtcccaggagggaagaagggtgtgtgctaattcctggtgcccctcggcgggggccagagagaaggatggggacaacccagagagtcacaagaccagtgcctcccctcagggtgcctccaggctgaaaggggctcctggctctggtctctggggaccctgtgcccgttggttggtggtgtgagggaagagaatccataagagagtttctgagaattatggtgtcatgtccagaagctagagcttaccttgcatcaggggtctccacccactccttttccaacctcctgcgttgaggtttagaaaagagagaatcgactaggcactatggctcacgcctgtaatccaaggactttgggaagctgaggtgagaggatcacttgagctcaggagttcaagactagcctagccaacagcgagacccctgtctctactaaaaaatttggccaggcgtggtggctcacggctgtaatcccagcactttgggaggtgaggcgggcagatcacctgaggtcaggagttcgagacccagcctggccaacatggtgaaaccccatctctactaaaaatacaaaaattagccaggcatggtggcacattcctgtaatcccagctactcaggatgctgaggcaggagaatcacttgaacccaggaggcagaggttgtagtgagctgagatcacaccattgcacttcaacctgggtggacagagtgagactctgtctcaaaaaaaaaaaaaaaatttacctggcattgtagtgcattccctatagtcggctactctggaggctgaggcaggaagatccttagagcccaagaaattgaggccgtagtaagctgtgattacaccactgcactccagcctggacaacagagcgagaccttgtctcaaatgagaaaaaaacaaaaagaaatgggagaatccagagagactaggctagatcaagcctgctgggtcctggcaggagccccagggagtagctcatctgcagacatttgcttgaggactaccccctaaacataaaggaagaatgacatccraagggtgtggagcagccatgagctgagaactagcctggtctacctgagattgatggcaggtcctggtcaacacgtcagctctgcgtcagagtccatgcctcaagcccaagctgaagccccatccctgctgctctcccaagaactcctctgctagggcaggccccttgcccttgggtgccaggtgggacctgcctgatgggatggggtgcttggcatatacaacttgccatgaactcaaggtgaccctgggggcctcctgaattgtgatggggcctagaaccaatgtgctctgatgtgaccatattctgtgacattaccttgccctgtttactccaaagttcccagcctggtgcccagcaggcaatattgcacctacagacacatttactttggtttccaaagtgtttttagacatttgaatttgttgccaacatttaaacattgagagatttcatatttttaaaaatctggaattctggcttctcttgaaaactcagaaattctggcactatggggcttgcattcctgcatggctggagctgagttgcagctgcccctttaggcctgtactccttatttgctataggctccgtcttgtattacactaagcccatgtcacccatttggctcctgcaggcctttgggtttgagaccctggtctacacacttggagaccacctgttgtaaagtacatggatgtgctttggtcaaggaatagaccaaggtggatatccaggccagagtgactcagcgagtttaggtcacaggcgtatactccacttgttatataacctgcttgtgtaagttcatacttggctcaaagccactattgtttggaaaaggtataactgccctgctgacgctgtacagatgttcttgggctcggatgggcatggctccacgtggtgtgcactagcacccagagagagtgaagctattgacccctgtaagggagagtgaccatctggcagatagatagaggggagccaggacatggctcagcttgtgcccagagggagagttaagccgctgaccctgtagccagggagtgcacctgcaagcatgggggtggcaggagccacagagctggctgctgagaggagctgcagatctggagaagacagcctaggtaaaggtggacagtgtgagagctgctgatgagatagctgctgaataaaactacattttacctgcctatggcccgccaggttttctttcagctatcgcccatccacccagtcccctcgaacctcagcatgggctggaacctgaccctgggcatgacatttggcatagttgtggacctgacacctgtgtttgtcctagtcctgtttctccctgccttcctgttcctctcgctgccctcatggtcactcccaagggatccaacccatgttaagtatgggctggaggactgcatgaatgcctcatgatcttcccagaggcaaaggcacctactgccttccaaggtcagtgggaggttgggatcaacactgtttattatgcttaggacaaaaaagatagggagaaagatgtgcaaccttacaggtcatctttctgggatagaacacaatgggtcttctcctgcctcctggatatgttagtcaaggccagtccatgctacacatctagtctgacttctaaaatagaagcaccagatgaattcagccctgagagaattttcagcagctgtgggggcgctggaggaaacactattaaatagttttgcacctgagacagatagcctcactcgcctcaccctagtcctggtggcatttgtctcaggtgcaaaatttaagaaagaaaccttggagtgctcaccctgtggctgggtagatggtcctaaagtggtggttttcaagcctgagtgtgtatcaggatcatcaggggagcttgctaaagagcagttcctgcggtcagaccctcatgcattttgagcaggtgtggggactgggaaactgcatctgtaacctgctgtaatctaacgcttatctaaatactactgtgctcacacagagaacaccgcaaaagtagaggtgttcctccagagggcaggtgagcagatggcacagtctgcttggaattcagtcaggtgatgagagatgagatgaggcactcctagctttgggaagagggagctgaaagatgaacctttgcaggtgcccacggtcaaagtggtggtttaatgccatgccatgcccattttctgttggccttggcagggagttacagccctaccttaggacctggctccttatttctgctgtaggctctttcctgccctggccgagatggagtggaatgagacctagaaacatcaagctaaatacatgtcctcagaaagataaaggtttacattttcacccccatcaaatctgaaagctctctgcctgtgtttttctaagggatagggacatcattactcagtccacaacctggactcatgtagggtcccctgtcagtaaaggagtcagtcaagcccaccaggtataccaaggactcttaccctcagcccctactccttggaaagctgccccttggcctaatattggtgtttagcttgagcctgactccttctcaacactaagagctgatgaagtcctgaagcagaaagagctctgacctgagagtcaaacatccttattctgatctcagctcagcccctgatttgttgtgtgaccctggatatgtcacttcctgtctttttgactttttaaaatgaagggtagactagaggagagcttctaaaactttaatgtggtcaacgaaatggaataggaaattccacaagtctgtccttccacaaaagcagcaaataaggtggcaaaaactcaaatttatgggaactctggaaacgaattgaaagtttacagcaatcaggtgaatacctaagaataaaagctggatttagtaagagagctttgttgtgttttagcttaccctggccccatcccccactccccagcatggcagcagcatcaaaaacaatatccctcattccctgtataggttcctgtcactggaggtagcagattagaccttattttcaagaagtatgttgattttgatttgatttgttgctccctgaaggactggttcaaatgcctttcttttattttgcctaatttggagctctcctaaagtgaagatggcagcctggaaagacgtttcaaggtcagtgtattagtggctcatgcctaggggaaggaataacatttggagcaaacaggagacaaattgaaaagcttcaggaggaaaggctaggaaataagattctttgggtgagaataaggactttaaagagattccacatattcctgggaatctgaaagaccatacacatgcctagggctgggcatgtgcttaaaaagacttgagagggccctatgctgtcacctctgcctgaccttcaggctcygtgcaagcaggaagtgaaggctaaggcatagttataaactgcatgggtgaaggttgaaaggtgtgtcccaacacagaacacatctgcaaatgctacgaggcattttgttgttccaagtgttcaaagaaatcttttgaatcactagctgaccactaagctaaccaaagacttagtggccacacctgacaaagaatacaaactaaaaaactaaaaatgtagttcaagaaaataacaggctgggcacagtggctcacatcggtaatcccagcactttgggaggctgaggcaggtggatcacttgaacccaggactttgagaccagcctgggcaacatggcaaaaccccatctctgcaaaaaatactaaaaatttgcagggcctggtggcacacacttatagtcccagctgcccaggaggctgaggtgggaggatcacctgaccctgggaggtccaggctgtagtgagccataatcctgccattgcactccagcctaggtgacacagtggaggaataattttatttccaaacttgccacattataaataatattcagaatgttcagttttcaacaaaaactatgaggtatgcgaagaaacaaagtatggctcatacatagaaaaaaaatctgttaatagaaactgaggaaagctcagacattggacttaacagacaagactttaagtcaattattttcagaaaggtcaaagaactaaaggaaaccaggagaatgatgtctcaccaatattggtaaagagactggaattataaaaaggaaccaaatagaagttctggaattgagaagtacacaaataaaaaattcattggaagggttccagagcagacttaaaaaggaagaagacaaaaatcagcaaacttcaagataggtcaattgagattacccattctgaggtgcagaaagaaaacaacaacaacaaaaaagctaactgagcctaagacacctgcaggacaccatcaagtgtaccaacatacacctaataagaatcaagagaagagtgaatgtagaagaaatttttaaagaaacaatggctgaaaacataatgaaagacattaatctacacatacaaaaagctcaatgaattgtaagtagggtcaactcaaagagacactcagtgtgacattgaaacacattataatcatactgtccaaaagcaaagcaaatcctgaaagcagaaagagccactggacacgtacaagaaatcttcgataagattaatagccaatttctcatccaacatcatggaagtgagaaggcaatgagatgacatattcagtgtgctgaaaggaaaatcttgggtggtcttgatacttgtagatgttcatctgtgtctgagcattgaagagttaggtatttatcatagtcttcacagtctgtgcttgtttgtacctatccttcttgggaaggctttccagatatttgaatggcttgggtgttgtgctctaagctgtatctgcttaaggattcaccccaagcccaataacactttggtttttttttagcctcatagagttactgccttgatggtcttggacaagattcaggattctctggattaccatacagagactcttgttcattccgttactgtctcccaaacaaagggagtccctttctctgttctaagccacctgaagctgggggtgaaaggacacaagcacccctgtggccaccaccactaggactgcactgggtcagacctgaaagccagcacagcactggctctcacccaaggcctgcagttaccactccctggctactgcctatgtctgctcaaggccctggggctctacaatcggctggtggcagagccagccaggcttgtgtccttcccttcagaacagcaaggtcctccaggccccagctgggcccagaggtgccatctgggagccagcaactagggtaaaaaatcttagaagtctacctggtgttctgttatactgcaggtgagctggcactgaatccacaagatgcagtccttccctctcttgcttcccctttcccaaggcagaggtgcctcactccatggccaccgccac

SEQ ID NO: 6822 - DNA, 786452 bp, Homo sapiens
  misc_feature (1)...(786452): n = A,T,C or G, or insertion/deletion polymorphism (see Tables 1-2)
aatgtctgaaaggtaaacagttggttttggagcagctataacgtggcattgtttaacatggcagctcactgatggttgtctttaattatggccgtgctgtcaacccctgaagtccctgctctttgttgtagatccgatatgacgtttgaggttttcaaagctgcagagatgaaagaatcaacagtcaaatattgctcattctgatrtgcttaaggagcgaggagggggcattgcccatgagggctgcagagccggggagggaaagctggtgccctctgcttttgatggcaaccttgagtggggagccgggtttactctgtttgtaagggagcagggccaaggctgggggagacggaaatgatttattcagtgatggtaaacaagtgcagagtacaggctgccgagctgtgcagggctggtgggaaagctggctgtctcttgcccccagcagtttgaacattaaagatgtgaagctcaaagcagacccaacaaggctttctggaacctcccccagccccttccatttcctttgtcttcaatctcccagagctgtgtgtctctgggccatcacatactgctgctattcagggtgttaattgtgggttggtcccatctcagaccaaaggtagccttttgggggctgcttcagtctggctcctgttattgctaacatgggttgccactagctcttttctcagacagagctgtcccatggcatctgtgcctggcagagcagtctcctgcttctgcaacaagctgcttttgttgaagggctatgtcttcagaatctgtttaggtgtgtgagccacctctgctgggtaccctcctgactggggacctactttttcacttcactcccagctcccacttgagaggcattgtggtctagcggttaagagtgctggccttagccaggctgccgggatctgaatcctggtcttgccactcactagttctgtgatttggggcaggtttctctgggtttgtttcctccttgtaagatggtagtaacagtggaacacatgttgtggtcatgatgaagcctatgtgacttaatatataggatagtgtccagcacaaagcaggtgctataaatatatatttatatataacacagatagtgaatagttatatataatgcacatatatgctatatgatgtataatgtataatttatatattcacacaattataagagtaagtttaactggcccagcaggggagggaacagtaaacacactataatctgattcatttctggggagatccaccctagccccagagtagagatgaatcttccctcttgtccatctatttctttctttcttttttttgagacagggtctcactctgtcacctaggctggagtacagtgacgtgatcttggctcactgcaacctctgcctcctgggttctggtgattctcctgcctcagccccctgagtaggtgggactacaggtgcacgccaccatgcccagataatttttgtatttttagtagggacggggttccaccatgttggccaagatgatctcgaactcctggcctcaagtgatcctctgacctcatcctcccaaagtgctgggattacagacatgagccaccatgcctggccttgtccgtctattttttaagtatttcaacttctgccaccttccccctgctctgtgagtattcctagctcactgatacttgcccgttaattgtgaacatccatgttattggaggccagatcctgtcttaatcatggaaacttttcattctctgctttctctgtagtcaatcaatgaggatgggggaggcacctgtggtcagcttggcatggtgctgcctgctgtggggtttacagaagtaggatcagacataactcctacctttaaagaactttcaatgaaactggaaaatcaaaatgaactctcatgaaatatttaagagcaacactcacctggttaaagagattagtcagtttattcactatcttgtcactatttccaaggaatagactagcagtatctaaaaggatgaactagagaaaaggcagaagtgctttctgccttggagagggttgagaccagtgctgaaggtcatggtttcacaagaacttagctattaccttgggccagaagggaagggatccaagtaggaataaattggcctatttgtaggaataagggaagttcacatttatctgggaatgactgtgatcagagcacccagctagatgtatgtctagtatcatttaatcctcccagctagcttctggaataggtggtattaaatggttcttttgtaaaggtaggagagctagggttctgtgataataagtaatattttaaagtatcatagccattaagtttgcagagctgagaaatttttacacaagtcagcatgactctaaaatcttgtgctcttttcacttctgtaagaaagggacactagctactgtttttctcatttcagttttggatgaattaagctagaaaacatttatatttgaccycttttgcccctctcccccaccccaataaaagcaagaaataactaccattggccaccacattctcctctgggaccagtagagaaaacagtgatattatcagcaaaagcctaattacactacccaggaaaaacaagaaacctcccaaagtcatgkccaagccaagcaaagctctgggagaaattcctgggacattcagcaagagcaacctaaaagggcttttgagcagaaattgaagccaaataaaaatactgcatgctagccctgggcccataaacagtactggaattgcagagctagggcatcatgcttggagtggtagccaagccaggctaggctctgctgttgtaacaaattaaccctgaaatctcagtggcttaacaccacaaggcttcgtttcttgctcaccttataggcccagtgagggttggtgttgagggagcctggcttcttgtagtgactcagggatctggctggatgaaggctctggcatcttgtggctgtaccttctggatcatgagacctccaaggttgcatgggagggggagtgaattgaatagtgacccccccagccctacaaatttatgtctacctggaacctaagagtgtgacctgatttggaaatagattctttgcagatatagttacttaaggatctcgagatgaaatcatactggatttagagtggaccctagatccaaaaactggtgactttgtaagagaaaggaggagatctagacacagagacacacagagggaagaaggccatatgaagataggaagagattggagtgatgctgtggcaagatggttaagccggagccaccaggaattggaagagccagggagagattctcccctagggcctttggaggggatgtgaccctactgacactggattttagattccttgtacccataaaagtgaaagaataaatttctgttgttttaagtcattgcatttattgtcatggctatagtagctagtatgggagatctgtactgtgawgtgactcacatcccttttttgctatattgactagaactcaaaccaactgtgagggagaatgtcaaatgttgccatctgtgtgcccaggagaaggagagtgaaacaggatttggtgaacacatgttcacccctgtactttgggtacagtaccaagagtaagggatagagacctggaatatagatctccctgctgacagagatgctttcaggagccatcagggagaccacaggatcactgcaggtcaaagcaggacagcaatagctggaggacatggctctgaaggtgaatgtgagctatccatagttgacatcagagtccatagaaatgcaagaggagggtcaagcaaaaaagcaagaacccaccccaacagactggggatgatatgcaggttctgaggccaaacaagaaggcacaagtactagggccagtggggtctcattgcccctcactgggcagctgctcagaggttgcttgagagcaggcgagtctccctggctccccttcctgggagtgtgtcaggatagttttgctcatctgtgtgtctccagttgctagcactgtgtgggtacccagcaagtgttgttgtgtcctgcctttcatcaggggcatgtttgaaaccataggctgtatgatagcaatttcaagctcaaacttgccattacctaaaggaataagtcttaactctttagtatgattggaacttcccccttgtccctgccagagcatggtgatctgtcttgagcctccatgcctttgcacctggcatcctctttctccgaagtgacccactcttccttttccaccttgtgaagacttgccttgatatcactgtagcagaatcttccctgattgccccaggtagtcatacctttcctcattgacctcctcattggcctttgtatttaacttatatggtgcagcaatattgaaatcatttctttatttttctgtttgcctcacttgactgaattttgcatttttcattcacctctttgtcccagtgcctggctcataataacctccgatacatttttgttatagaagaaacatcatttctcccagggactcctttcagacagctgcagaaacaaccactagtagttctcaggaatggagatgatattatgattattgactaattaattggttattgatttattattcaccatgagaaatatagatgggagaaataaatgaggaaaaagatcaaaatgggttagagtataccgtttgtggagaacaacaataacaacagcaaacatttctgtattgatttaagatttataaagtgctttaatgcgaacattatcttatttgttctcattgtaacacagtgagggaagcgaggctataactgtaaatctttttgctgatacccctcatggatgattcgattcacatgcaaactagtgagcaaagaggagaagaggagaagaaaggaggaaaaaagaggtttaggtaagggaaagttgctttatttagtttctattctttaatattcataactaattctgcgaggtcaatctcaccactcccattttgcagatgagatcacagagaattgaggtggtaacttgtttcaaatcccccagctgatgagtagtagagattggattcacacccaggttttctctctctctgaagccctggtcacctgtttggccctggggtgatggggagaaggttctggctgtgtcttggctatctcctgcctctccctctgtggggaatgtgttcgaggatcacagctacagcttttcggataccctttcctttgtgaagcatgtgagaaccaacattgcatctcggcaagatttaaaaggaattgttgatgacctgctgaggtattttcattttgttcctggaaatgattaatcttgaggctttgtgatggcctttgtcacaaatagccttccttaatccataattttctcactttcctttaaggtaatattttgcatttaagaaataaaaacaagcaaaataatcctgctgtgaggatatgaatgcagtgtttgtgtgtgggggtgtgtgtgtgtgatgctgaccaaggtctaaattcacctgaaatgaattagaaaaaccacctttttaaaataagttcagtttgtcttttttgctaactctatttgtcaatcttacctcttccttttattattattttttcttcttcctctttagcagatgggatggaatatttctgttttgttttttatgggtgatttttcaccggcttcttccactttatattgagtcacttaacatcctgtgaagcggaaaggaggccggtactttcagcctgaggtcggccagggtgctgcaattccggacagagagatgtttttcccttgggttgggaatggcatgttctgagcttcttttgacttctagtcctcgctgccggtgcagttccaagtagagtcaacataaagccaggcacttgtgagatggagaccggggcgaaactgcaagcagatgccctttgctgactgttgaagaaagaggatctggctgaaagacccgcaactttyacttgttgagaacctttagccagcgccggcgtgcatgtgttttagttttattctttttcccttgcccccaaagccgtggagtacctgctgttgctctcatgcctcttgccaacagtggcatctgctcagtgtagccatcaagaatttgaatgtcaatatctttgccttgaaatgaatggaaaagtatttgtcactcagcggcaatcattcttcaaataaaaggttagccagacaggacccttaatcaaagagtcggtcttttctgtcagcagtgccttttaaatagcaatgatgaaggctggctgtcagggtaggacttgatgagcgagatgattgatctgcataaatcattttcttttaacattgtcagtgaagagtaaattggtgggacattttgggtattagctgtgttgaaattaatatgcagtatcctaggtgtgtcctcgatcacatagtcctcataaaagaaggtagaaattaaaaggaggcttttaggcatgcattgttctaacaagaaagttgcaccattcttactgctgtggtcatcatcttgcatgctaaattcggaagttgagtgtgtagcacattttacaagctccaaaaggaatctagttaatttgggaattagctagagtcagtagcatttaacaaccagtaaatctgtaaagacttactgctcagaggcaaaaaaaaaaaaaaaaaaagtctgagaatggtttctggttttataggatagggtatctactacctagcatgctgttgtagaaatagactcagctttagatgaggcttaggcttgaatccacgtgccatccctccaaagtgagtctccttgaccatgatgtaagtattaacctttttgagtctgtttctttgtctctaaaaatgggatttcattagttaccttgggtggatttgcttttggtattaaacagagcaatctaggtgaaagcgccaggcacattacctgggacatggtgagcaagtgctcaataaatgttcatctcctccctttctttcaatcaagcgaaatgccccaaaccagccaagatgtcaagattaaggatatgccctcatggtcaaaataaataatacattgcctggtttgggtcattctgtatttactggaatatcttatggccatttttatgtcaaaaacatatttcagcaaggcagaagcaatacctaattgccgaatactgaaaatagggaatgaggtggaaggaatgggagagaaatatggccagggacacttggtttttcttaccattacactctagattatgtgtctgggttcatatgattaaactctgaacaagtgaaaccaatgcaatatagtgttgggattaaaagtaggactggtggagccagatggctcaattcagatcccagatcttccgcttaatggctatgtgactgcaggtaagagagctaattgcctccctgagcttgtttcctcacctataaaatggggatagtaatagggttatcttacagtgttgttaggatgattgaattagtatatacaaaacaaaacatgtaaaagagtacctggtatgtacatgttaaccatgattactatgaatggttagttggttaagaaaggtagataatgctggccgggtgcggtggctcacgcctgtaattgcagcactttgggaggctgaggcgggaggatcacgaggtcaggagattgagatcatcctggctaacacggtgaaaccctgtctctactaaaaatacaaaaaattagccgggcttggtggtgggtgcctgtagtcccagctacttggaaggctgaggcaggagaatggcgtgaacccgggaggcggagcttgcagtgagtgagcagagattgcgccactgcactacagcctggcgacagagcgagactccatctcagaaaaaaaaaaaaaaagaaacaaaggtagataatgctgaaattcaagtgggtcaacagtctcaaaggaagaaacatatttagatatagaaatgcatgataatggtatactggagtgaaatacttgtttcattttggagaaacttgcctactggaggaattttgagctaggctgattccaaaaacatccatattgaagcaaataggttttgtagggtcttcgggtaaatagcctttacttgctgtgttgaatgtgaaggttaaaggaacacagtcttctctagccagattctccatgcgccttctgtaatggtaaagtccacgtcaatcgctgcttgtgggcgtgtggcatggacgcgcaggagcctctgtaacatgcatgtggcatgcagctgcgtggattcctggagattattggagatttgccttctcttcattcttagagatgtgcatttgttttcctcaacttgcttttagctcagctgattggttgtatgtgagctttgtgctcctctcctttcctgtcttctgaatttatgctattttgaacttttggtctgcttctgcataatgagagaagttggcagaagacaattccagataaaccttcaccaaaactaatggttctgtggaagtccttgaacgggtgtggaggcagcaaagctctcccagttcccaggtgagcccagggtggagatgtaagaccacaccgaacactgagcatrgtcaccaggctgcttttgagaagcgactgtgaagctgtcctcctgcaggggcatgatggctatatttgagaatttctggaaaacattctctgcctctctggcttgcaatgctcttgggctgcaggagtggtaaaattgtgctgttagattcgttcctgattccatccttattagataaagcgtggcctgtgttatctaactgactacttaatggagtccacattgggtgtgatattctgctcaagattaatttcgggtaatgaagatctgaaacaaggtatttaagagccccactaatgtttcatttatagcaatctatcaaaacgatagatatttagcctctttactggatatgaaacattaacttaaagccagtgctgctttctgtgttaaataccagtacccctgccttcgattttatcaaacattgtgaaaaatctgccaccacctcccggagaacacatatcatggacttagccttaagttatgattctctggcaccttggacaactgaccaaccctagcttgggccctgcttgggccttttcacataatgagtagaattcacaaacaaatatttatcgggcacatgctgtgttcaaggcccactagacattgtgagggggacacaaagtggactcaatttcactgcatgcgatatgctggaaaagagatatcttagcccaaggggcaggctcattactcctaagttggttattacattgttcagttatgagcagatgaggcctagaaaaatctgggtcgcttctcctcataacaacttcccatttggggcggtatgaaaagtgtgggtttccatcaattctgatgagtaggtggagtccattcctcagcctttaggtgctccccattgtccaggagccaacagttgggtatttggggctccagaacaagtatccaggcacctaaatggtatctagctaatatttattgatgcatttttctaaggaaaaatgagcaatttccacttttcattttcaagcttaatactcatgactgtccagtattatccttacccctctctagttttcttctctttactgtttttattgttcattggaaatatgttggtttagtaccaattgtgtgctgttttcctatatggaatatattctttctgatttttttctgattcaaatggtatctattcttcagggcctttctgaagacccgtgtcttcctgaccatattctctgtgcagtttttcttctttccaggaagaattttgtttttcttctctgaattcataaacatcaaggtttgaatatgcatccaatgcttgaacatagatgatggttctctagatatttttttctatgtgtaattcattttccttttaggttacagcatctttaagaatagggacctatgcttaatatctcttccatagcacacacactacttttgggcacacaagttgtactaaaagcctagtgacttgacctggtccacaaggatgaatcctaaatggacttggcagtaattttgtgtaagaaaaggcagaggtatcacacaattgattttacagtgtgtcactctcagtgtagtgcttatgaccaccttggggaatgtgaatgaagcccccactagatttgtctgtgctgtccccaaggacttaaccaccaggttgctgtttgcagctgtctctgatagtacattggggtctatagacttgagtgtctctatcttttctggctcttccgcatgcttggtggtggttcgatattctgttttgtacttctttgataccgtctctggggtccccttaattgggacaccttaatcggggagcccctgctgcctgggcagggggctgaagtcctgctgctttccctccacattgtcaggattcctgggtgtttcctgggttggagacgtcagcctggcggcatagcctgtgctttccccattacctgatcacgtttcatcagtgaaacgggatgtttcactgaaggcttatctcaggaggcgcctgaatcttatttgaccagaaatctttttggcagttggtgaacttggttggattccagtctgtccctttcattgtcaggacatacccacagtgaggatttgtgtgccaggcgtgtcatttctctgtctcctccagaccccccgccctcatgatactgttgccaaaatcaagggcccaaccccttaccccttaaacatctttgccttttaaattttgtaaacaatgctggaataaaacatttttattataacagatacaagtaatagagatgttgtagcaaagtctgaaggtctctgttttaagtagtgtgtaatagaaaaccaaaataaggggtgggcgaggtggcttgcgcctgtaatcccagcattttgggaggctgaagagggcggatcatgaggtcaaaagattgagaccatcctggctaacacggtgaaactccgtttctactaaaaatacaaaaaattagctgggcatggtggtgggcacctgtagtcccagctacttgggaggctgaggcaggagaatggcgtgaacccaggaggaggagcttgcagtgagctgagatcacgccactgcactccagcctgggcgacagagtgagactccgtctcaaaaacaaaaacaaaaacaaaaacaaaaattagctggacgtggtggtgggtgcatgtaatcctagctacttgggaggctgaggcaggagaattacttgaacccaggaggcggaggttgcagtgagctgagattgtgccaccgcactgcagcctggcaacagagcgagaytctgtctcagaaacaagaaaatcaaaataacagtggcttaaaatgggagttttagtttcttttacaaaaaggaacagattcagcctcttgtgttagcttcctgaggtcaacagagacaaggcttctcctgtctttctgtatcaacatctttagctgtggctttcattttctaagacacttcatgatataaggctggagttccagtcatatcatccaagttttaagcrggaaggaagaagaaggggagaggaaaagaaaaagcacatgctagctagttgtccgtcccatttttatgcagggacttatttgtttacattgctcagcactagccagtcatgtgctaaagccagctcaccctaggttatgaatgccaattgttacatttgccagagtttttgcaagccgattgtcttgagtttggtagcttgaaattggccatagtttttacacaagagaaaatggtgtaagagagagctgtttgttaaccatttacgagacacagctgttcctggctgtaggacaggcgaggaaatgtaatttttaacttggtgcattgccacacagaataaaatcacagtccttttactaaagaagaagggaaagtgataatgaataagaaaacactctttgctacattctccccactttgtattccacagactggatctgcttcccctgtttaggttgttaactcttgtctccttttcaagttatgcaacagtcaacatagttttacatttgtgtttctgcacatgaaccagcatttgtggacaatagcttctttgaggtagatttgctaggtcaaagggtatgtgccctctgcttaactctttataaagaacactcaccagatgtctggtctgtttcctcctaatgtagtgtagtggtgatgagcatggattttggaatcacacatacagggtgtgaacactcattcagacacttctagctgtgtgactttggccagcttacttaacctctgtaagtgtcaatgtttttttccatgtaaaatgggagtgggggataccatctgaccctgcagggttttgtgacgatgaaatgagattgtgactacatagcacttacagcagagcctggcaggttgtaaacccacagtaaatagttagcaggggcttctgctcatggaaagatacacatgtgtgcaacatacagtgagaagaatgaaaacatgaaactgggccttgaacattacatgtagggtcgatatgagttgtagagatgaccagattcagataggaaagcaatggatgtttaatgttcaaactggaaaattattcatttcactgcccctaggggtaggtgtgtaagctaattgatggttagaaaaatcccagagtaaaccaggaatgtctctaattcataagtgtatattataaakatatttaaaatcatctttatgacaattcagttatgtttctttagcatatcagatcctttagttgtggaacttgacagaaatcaacataaatgttctttttctctcccaactatattgaacattgcacagatgtgtagttatttatcatgaacatgcaaatattgatgtccccaaggcccattctttgaatttcaaactgctgttgctatatttggatgttgattaatacgagtctttgctctgacacatagcatgtctgatttcaggacctctgaaagcagcatagagaagaaaagagaagctgaggcttgatattcatagggatggacaataattgaagacgtgaattgctttgggaaaatggcagcaggcaaccaaatatacgagatggttaaggatatgcctagcacagaactttgagcaggtagattttcagtatatctttgctcacttaaagagacagaagctatggagaagaaacaatcacaatgaaagaattattttaacactagtctagaacaagatttcttaatcttggccctattgacatttttggctggataattctgtgttgtgggggccgtcctgtgcattgtagggtattgagccacatccttggctacccactagatgccagttgcatggccttcctcaagttatgatcacaaaaaatgtctccagaccttgctaaatgtctctgggtggagggcagattcactcccagttgagaactactgatctagaagaaaggaaaattagatgatataaagtaaacaacaattatatgctagacatttaacccattgagtccttgcaacaagcctgaattgcagaygttgctaaaattatttttgtggaaagagaggtgggattccaagaagctaagaacatgaccccaggtgggacagatgggatctgagtccaaatgtgatgttcttttccttgtattcctctccttcctaactgtatgacataaaygtaaagtatcacaagagcttatgctgctcctcttcttggtaccaagctcggccttcactttcttatgaaaaccaaaagcagttttcaaagaatcatgcacaacttatatttgggtgattgatctgatttggcatacattttgtggagaacgtgaaccagtctattccccagtggagggctgttgataaacaaagagatatgtagtctttttagcatttcaagggctgtgagtctcctgagaaaactcaaaccaggtccaagaggagttactttgagacaagctatctaagaactgcaatatcctctgtggggaaggtggctttcgttgtaatggttcttgcaaatatttcttaaaccaaatagggttttcttctggggaacactgagatcaactatttgcctatttgatcctcttgcagttaatgtaacaggtttaaaactctggtctcagcagaaggggcttcattccgagctatgggggctaattctgtgcagtgcagtgtggggacagagcatcccactttccacagtttggtgaggcactggcccttagaggagagtttttgggtatacagctaattgttctaattatgtagtagtaaaaatcataccgtcctgtagccgcatatgaatagtgcactagagtgctttcttaaaagagttgggatggggttgggagggtcaggaaatgaagggataaaattattgttaattccacccccttgttataccatcaagagaatagaaaccaataaaagaactaaatgttggcaatccataaaattccataagcagtaataaacaaaagctgaaactgtattgatatacaaccaaacaaggaaattatcattattttttaataaagccatttatcatcaataaataccaaggggaataggaaaaattacaagcacaatgccatcttccataattatacctattaacaatttaaagcataattatgtgagggagaaaaacttttaggaaagctttgtgctgttttctccacagaaaagtcaaattctcacactcccagatattcaggattttctaaacatttcagaatgattggttatgcttgtcccaacttacagtagcttattttctaaggatctttctaataattcaggcccttccggcctctccattaccaggtttgtcatcagccctggagaaagggctgggattcaggaaaaaggtatatatggtaatgatctgaccgcttgctaaatgtcactggtcaagaggactttgtttagtgacaagttgattttgggattccaggatcttttttttttttttttttttgagatggagtctcactctgttgcccaggctggagtgcagtggtgctatctcggctcactgcaagctctgcctcccaggttcacgccattctcctgcctcagcctcttgagtagctgggactgcaggtgcccgccaccacgcccggctaattttttgtatttttagtagagatggggtttcactgtgttagtcaggatggtctccatctcctgacctcgtgatcccccgcctcggcctctcaaagtgctgcgggcgtgagccaccttgcccggccccaggatcttacttattttatctgaactaaccccagctgagcagctgctattgcctaaatgactatgttccaggccttggggttacagaaataaatgaggtactggtgtttgtttgtttgtttgtttgtttgtttgtttgagatggagtctcactctgtcacccaggctggagtgcagtggtgcaatcttggctaactgcaacctccgcctcccgggttcaagtgattcccctgcctcagcctcctgagtagctgggattacaggtgcgtcccaccatgcctggctaatttttgtatttttagtagagatggggtttcaccatgatgtccaggctggtctcgatctgctgacctcatgatccacccatcttggcctcccaaagtgctgggattacaggtgtgagccaccgtgcctggctggtgtatttttttaaccattgaacaccttacattcccaaagggaaacagacctgtatgcctgcagtggcgaacagcagggtgatttaagagtatgcctcagagcccaccagccagcctggggtcatagycctgctctgaagcttatcacttatgggaacttgtacaaattaattaatgttcatatgcctctgtgtccttatccacaaaagaaaaaatagtaataatatctgcttgtaggttgttatgaggactaaatgagttgatatatgaaaagtgcttaaaaaactgcctggcacctgrtgagtgctatgtaagttggcagtcatttaacctgacagggtgaagtcctgtgacttggtactttggttctggtatgatagcagyggttggggtattttgatagtttgggtctggtgcaatagcaagctcgtggtcacggaaggctctgtgtacaagagaatgactgtcctgagtcttaaagggtgagaataataggagagagtattccacacagggaaaaccacaggagcaaagggatagcatacagaaacagtatgatgtgcctggctctttataagctatactccatcttcttagagcctgacacaattgagctggtggcagagagagagaggaggctgcagtagctggcagagtctggtcacagaggcttgagtttttcttgaggacaggagggccctgttgaaggatattcactgtgaaggtgatggttagtcagatttccagtctagatccattaggaaagcagtgtactgggttgctctaacaagtgagaggggagccgaagggaagggttaggggcaacttttggaatttttatgattcagacttctacccagtagggcaatatttcagcagggttatgcatgtttgttggaaatgaacacctggactgattgattctcagtttaattgtggtagtcattagtgctgtttggcaaatatcccagttctccactttcaggcacatgtataaacaaatggtaggattgtattttctggtccccttgtgtgaatggggtcacatgaatagttcaggtccaggagttgtaagaaaagtgatatgttactttgtaatcatatcactgagttgttgctgaaagatctttcagagcttgctcttttccctctgtcacagtgactagcatcgttccagatagagttggctccatcagctgggtcctgcagtacagatgacatggagcagaactcccagctgactcttgattaacatggagcaggagtgagaaataaaccgttatggtttttaagccaggggtcagcacactttttctataaagggccagatagaaaatattttaggcttttagtttatggaccatgcagtctctgtcacractcctcaactctgtccccatagtgggaaaacggccataggaaatatgtgcacacatgggcatggctatgttccaatcaacttttgtttacacaaacaggcagcaggctgcagttgaccagcaggctgactcctacttaaggcactatggtttgggggctatttgttaccaccacataatcaagctattcctgactgatactttgcccaactagcttttctttttaaatacaggtaaaatttacatagagtgaaatgcacagatcttatgtgtgttattcaatgatgtttataaatgatgctatgtgatgtttaataaatatatacatattaagtatatgctttattatgtatcataaaactatcccattttatgaatatagaattcattttcttgttgatggaaatttggactatttatagcttttggtcattatggataaagctatgagcattcatgtgaaaatctgtgtagatctagatttttatttctcttggataaatagctaggagtataactgccagatcctggagggggtgggtagatgtaggtttaaatttatgaaaactggccaacagcttttcactgtgattgtgccatttatacttccaccaggaatgtttgagagttctacctactctacatcctctccaacagttagtgtcgtcagacttttgactatatttattctattaggtatgaaatggtatctcactgtagttttactctgtgtcttcctgatcactaatgatgctgaatgtattttcatgagtttactgccgtttgtatatcaacttttgtaaacagactgttcaagtattttgaccatttaaaaaattgatttctggtcctaagtcctttgtcagatatctatatatctacatcctatgtctatatttatttatttcaaatttttcttccagtttttgagttgccctttcacttcttaaatggtgccttttgataagcagaaggttttattttgataaatacctatttatcatttttttttttgttaatgctttctgtatcctaagaaacctttgccttccttggggttgtgagatattctctatttctttttattaccttgagttttggcttttatgtttaggtctttgatccatgttgaattaattctcgtgtaggagagttaagaattgggattctggctgggcacagtggctcacacctgtaatcccagcactttgggaggctgaggcaggtggatcacgaggtcaggagttcgagaccagcctgaccaacatggtgaaaccctgtctctactaaaaatacaaaaattagctgggtatggtggtgcatgcctgtaatctcagttatgcagaaggctgaggcagaagaattgcttgaacctgggaggtggagttgcagtgagccgagattgcaccactgcactccagcatgggcgacagagcaagactctgtctcaaaaataaataaataaaataaaataaagaagaaaaagaaaaagaattgagagtctgtgtgtatatctagttgtttcagccccatttattattttcaactacactcccccattcaattactttggaaactttatcaaaaatcagttggccatgaatgtgtgggtctattattgtgttatctgctctgttccattgacctatttttctacctttatgcaattaccacactgtcttgactactgtagctttatagtaaggatttaaattaaggagtatgagtcctccaaatttgtatttcttttgaagcatctttcacctgttctttgggtttccatataaattgaggtcctttgggtttccatataaattgagaaccaccctgtcaattaaaaaagcctgtggggttttgattgggattttattgactctatgaatttgtggaatgttgatatcttaagtttttcaatccataaatgtattacatctttccatgtattcaggtgttttgtgtttttttagtggaggtcttgtacaactttagttacttttattattactttgtttctgatgctattataaattgaattaaaaaaatcattttccagttctttgcttctagtacatagcaatattgatttttgtatattaactttgtatctagcaaccttgctaaagtcacttactacttctagtatttggtttttaaattcatcaggaggttttatgtaagctattacattgtctagaaataaaaagttacttcttcccaattttatgtatttttttcttgttcttgtcttattgccctggccagaggttccagtacaatgatgaacagaagaggtgagaacagacatctttgcctcattcttagtattagaaggaaagtttttattattttatcatatgtattatctttgatgtagaagttcttacatgccttttatcaacttgaggaagttcccttatattcctagtttatcatgaatgggtattgactttttctgatgcttttcagcctctattgattatatgggttttctcctttgttctgttattaataatatggtaaaagcaatttgttgattttcaaatgttaaactcaccttgcagtactcagatgagcatcacttggtcatcatgtgttatcctttttgtatatttctggatacaatttgataattgttattattttttgagatagagtttcacttttgtctcccaggctggagtgcagtggtgtgaactcggctcactgcaacctctgcctcccgggttcaagcgattctcctgcctcagcctcccagttagctgagattacaagtgcctgccaccacgcctggctaattatagtatttttagtagagatggggtttcgccatgttggccaggcttctgttgacctcaggtgatccacccgccttggcctcccaaagtgctgggattacaggcatgagccactgtgcccagtcaatttgataatattttgttaaggattttttagtctatgttcatgataaaaaattgtggtaattttcttttcttgtaatatttttgtaagatttagggataagggttatctactggcctcaagatgaattggaaagtgttccttcctcctctgtgctctgaaagagtttgtgtaattttggtttttttttcttaagtttttgatagaattcaccaatgaaaccctttgggcctgtcagttttctttgtagaaggttttaaaaattattataactttaatttaataaatatagggtgactgaaattttctatttcttcttgtgtcagttttgttaagttaatttttcaaggaatttgtttacctaaatttttgaatttattygcatagaattatttatagtgttaccatattatctttttaatatctgtaggctctgccattataccatttttcatttctgaattgttattttagaatttttctcttaactaatcttgctagggggttgacaatatttttagcagctttatttgaggtacaatttgcattacataaaattattttaagcatgttcttcagtgatttttttaaaataaaatcatatagttatataaccattaccacaatccaatattagaagatttctgtcacccttaaaatcccttatgtccatttgccgtcactctctattcctacccccaactctagataaccaaaacaagttactgttacaattgatttgctttttctagacattccatacaaatgaaataatacaatatgtggtgttgtgtgtctggcttctttcgtttagcataatggttttgagattcattcgttttgtggcatgtatcagtattctgttcgcttttattgctccatagtgttttattgcatggatatagcacatttagtttgttcatttgtcagttgatgatgaacaatgctgccataaatattcacatataagtcttgtgttgacatatatttcacttcatttggatacatacctttgagtcaaattgctgctagactgaattctaaaatgactgcatcttacatttatgccatcagtatatgaagattccaatttctctacatccccccaacatttgttagtgagtatatatttttattttagccattctagtgcatgtgacagtgtatttcattgtagttttaatttgcatttttctaatgactaataatatagaacatttccatgtgctaattggctactcatatatctttttttcaaaaaacattcaaatcctttgccccttttaaaaattgaattctgtttttattactgagttacaagtgttccttgcatttttgtggatataattcctttataaagtacagtatataatttgtaaatattttctcccagcctgtgggttatcttttcatttttttatggtatgttttgatgtgcaaaagtttttaatattggcaaagtccaacttaaccactttttgcttttatagataatgcttttggtgttacatataagaaatccctgccgaggtcatgaagatttctctcctaagtttatcaatattattaatatttcaaaagaaccagcttttgcctttgttaattttctctattgttagtccaatttttatttcattgatttttcttctttttacttactttgctatttttctagcttgttaatatggaaacttgtgattttaagcttttcatgttttctaatataagcatttaaagctataattttttctcttaactataatttgcgctgcatccatggattatgctatgttgtgtttttattaatgtaacattaaaaatgttttaaacattttcttgtgatttctttttacatccctgatgttttagaagtgtatagtttaattttcaattatatgtgttttctagatatcttttttgtcaagttctgactttattctattgttgaccctgatctgatcactatatacattacatgttttgaagcatcactatgtgctccatgaatatgtaaaatggttgtcaattaaaaaaayttaaaaagaatttaatttagatatttattaggacttattttaattatcattatggcatatggtctatgttcatgaatacatyttgtgtacttgaaaatgtgcattgtgcaatttttggatatagtgttctaaaaatatcaattagattaatttattcagtagtgtgtccacatctacagtatctgtactggattttgttttattaagagtttctgtgagttctgagagaggcatgtttattctttatccacaggcatgtttattctttaaccacaattgtggatttatcaattttttcttttacctctgtctagtttttgtgtcatctgttttcaaactttgtatttaagtgcacacatatttatgattygtatgtcttcctgattatcatcatgaaacaccatgtttaaacctctgatcatagtctctgcctygaagcttactttgtccaatatcagtgtagccataccacttttttatgtgtactttttttgcagcctatatatgtttyttatcctattactttcaacctaatttggtatttatattttaaatgcatccttgttgattgcatttagttggatcttggtgttttattcagtctgataatctttttctttttttttttcttttgaaatggagtcttgctctgtcacccaggctggagtgcagtggtgcaatctcggctcactgcaacctccgcctcccgggttcaagtgattctcctgcctcagcctcccaagtagctgagatcacaggtgtgtgttactattcctagctttgtgtgtgtgtgtgtgtgtgtgtgtgtgtgtgtgtgtgttagtagagacggggtttcagcatgttgaccaggctagtcttgaactcctggcctcaagtgatccgctcaccttgatggagtttatgaaaactttttgatcagcatgttgtttttttcccaaattgaagggaatttttgtccgttatttgttcaaatactgtttttgccttattattctcaccccgattacacataaattagatcacttgatatgtttgcacatttgactgtaattctgttattttgttttaatcttttttctcctctcatttcttcagattggataaatattttgacttcttttcaagtattattgatctttcttcaagttgagtggtccttttttcccccttgacatttccatttgctgttaagaccatttatcaatttcttcttttacctctgtctagtttttgtgtcatctgttttcaaactttgtatttaagtgcacacatatttatgatttgtatgtcttcctgattatcatcatgaaacaccatgtttaaacctctgatcatagtctctgccttgaagcttactttgtccaatatcagttgtagccataccacttttttatgtgtactttttttgcagcatatatatatattttatcctattactttcaacctaatttggtatttatattttaaatgcatccttgttgattgcatttagttggatcttggtgttttattcagtctgataatctttttcttttttttttttcttttgaaatggagtcttgctctgtcacccaggctggagtgcagtggtgcaatctcggctcactcaaacctccgcctcccgcgttcaagtgattcttcaagtgaatttttcatttcaaatattttacctttcaattacagaattttgtttgatgcttttttgtagtttcaaattttctgctgatattcccctattatgactctctttccttgaggttcttgaaaatatttattataacttttttaaagttcttgattcctcattcaaacatttgggttatctcaaaatctgtttctgttgcctgatttttcttttgactgtgagtcacatttttatgtttctttgtatatgtagcattttccattgcgttaatatgttgcaaggattctgaattctgttatctccccctgaaaagttaagacttctgttctagattaatttttgcacctactggctgactaccttgaacttgggaaagtttgtttgtacactttgttagggaagctctgtttcaattttgcaattgatcttagtgtaaatttgtaatcctaaggcatacctgcactttaargtgtcttccttcaggagttttcatgcaaagcttaaaatatttaccaagcgccttcaccatgtcagaattaaaactccagaccctgactttttaatgatggacagcttatgaaatatttggtagctttttcagcctttcacctgtttgtttctgccagactacttggacttccctcaagcatctactgttcagggataagcccaggatttgtgaggagatgtatgcagatttcctccctctgtcacctgttctgttctggtatttcccttcacaatctccaaccgctttggcatccctgacatctggcttttcaaggcagtgagactgaagctttttcttgagttctggctgctgtgtccagtgcagactctggagtggcctcaaggggaaaagccatttaaacatagatatcacccaatatggttctcttctttcaaggccattggattgtcttctgtttctgtctgcttttggtagctttccagtgccttctattagttgtttatatttttccaagagtttataatttttaactctttatgcatctgcctcctacatgagggtctagggaagagatctccaggtggaggaaagagcaaatgagaagccctgagcaggactgagatgaatgagctggggtggaagctggaggcccatgggctggaatgaagtttacatccagggatccctctaagccattgaacttcggcatttgctctgagtgagagataagragctgtcgaatggcttccttagagaaaaaatgttatctaattttttgccttgtactctaggaaggcaagagaagaagcaggtagaccagttaggaggcagttatgactggtaagagatgatgatgattgatctgggtcaaacaaaatgatttgttgagagcttcgtatgtgctgtgtatgatgctacccacctaagctaagcagctgtgttcccaatctccttcttgccttggcaggggacacagcttgaggactctcttgctacatagaaaaacacatgaggctgagcatggtggctcatgcctgtaatcccaacacaggcatgctgaggcaggaggacttcttgagctcagaagttcaagatcagcctgggcaacacagggagaccccatttctacaaaaaatttaaaaaattagccacatatggtggcgtgtacctgcgatcctagctactgaggagcctgaggtgggaggataacttgaacctgggaggtttaagctgcattgagctgtaattgtgccactgtacttcattctgggcaacagagagagaccctatctctaaacacacacacacgcgcrcacacacacacacacacacacacacacaatagggaaggaaacttgattaaggaaggccggtctagcataaagctttgggtgaaggatttacttgtgtgtgcatatagccacatacctagctgtgtaagtcattacaaatgtcacctggctaatgttcattaatgattagctaattataaagctgccgttctgtccttggactgatagctggtttgttttacagaaggcagtatctttggtagagttgctttatcatatcaaaaagggtagtgttgttttttttttcttagcaatagcttcaagaacgaagaagattaaacaaacactatcgaatgaaagaaccaagcccagtacctggcacataataagtgcrtagaaagcattacttgaaattagatttactgcttttttgattaaaaaatactcttccaatttaatgtcttaagggttctctataaagagtacaaattataagttaaataaacactatattggaccaaaatcagaagtagaaacttgcataccttctcttgatttgttaattactgagaagttatttgtggtcttgacctgatgcatgcattaatacattatgtgtgtgtgtgtgtgtgtgtatatatatatatatatttttttttttcttagctccctttacttctaccttctctctttcactctctccttcctcccattcctcctatcatttattgaggactaaccaaatgttctagtcactgttctggcacttgacgtgcagagcctcctggtagccttcagtttagtgcagtgattgagagcacagcctgagagctggacccatttgcattccagcccagcctcagccccacaagctgtgtgatcagaggcattttaccaaacctttccaaggcttggtttacttatctgtcaaatgaagatggtggtgcagttttcaggctgcaagtgagtgtgtaaggtcacttagctcataatatggtgacacatttcacaggtctcwtgatcagatgaggaagcacatagtatcattcrgccttttatacaggtccactggttacctgttcttggtaacagggtgaaggctggggtaacaagtcctgccgggagactgtaagaggttgcatggcactgtgggtcagagtagcatggatccagaccgcctgcatgtacattctggctctgccacttattagctgtgtgccattgggcaaattatttaacctctctgtgtttcagtttcctcacctgtgagatgggttagtaatgctacctattgcatagaactgcagtgaggatgaaatgagttgacccatgcagagtccttagagcagtgactggcacttagtaagctgcatagaagtattgtctattaatacttgcattgattgtgaaacataatttagcattgctaagaggctgtcttttcaggagcatggagtccaagtgcccatttcctgtacatttggctcagatacccacccctaaccactgcacgcagtctcttttctgtctgagtgggacacatctctttcccctgcagcacaatcactctgcctcccgctccgtcctggtctgccatctgctgacccattcgctgctcctgtcacgtcaaagatagcgtggcctttgtggagtgcccaggcagcgtgtcatgtcccagcgctgttgtacatcttgtttcagagatattttgctgtaatgttctgtgaccttttccattgagtgaggtagttggaaaggcactcagtaagggaaaattgagctrttttattcctccccaaggaggctcctgtttcctttccaccattcatttgaaagctatcattttcttgattttatagctgaaaaacaccattgattcactgggtgttagatgctaagagttctcctattgacatgcctattgacagttttcagtatattctgcatctaattatcactcttggctaaatgatacaccttgtggacttgagcgatggagtcgatagctctcaccacattgttctagtgctgcctattgagcctggtgtcacggcgatgtgatttatgtgatcagaaagaaaattcctgttggtgtgctgcataattaaagcaagcgcagagtgactggtgacaaaaaatcaggcctgccgatgtcaccccaaatgaggagagatttctagagtaagcagctgtgacagtgaagaatctctcttggcatcttctgctttgcaattttcaagggttcgattttcctcctggccctggctgagggctcctcttctctcccttcctgctgcattgtggtcagagcttcagtacctgtgtgctgccattccgaggcctgggccgtggggctcgctctgggaggggctcattgttgcagacaggggctgttcatagaatttgggctggcagcagcccacatttgcaggtagggaagatagatggctctaaaatggcttgtcctttgtataagccgttttgagtttctgaggttgagattaaatgttgggaaggccattttccctgtgcatgagaggagtggtccctgcgttgacatggcgggttctgagaggagttgatggtggtgatgctggccagccttaggcaggactgaagtgcaggtggctgacaggtggcaaagactgggcatgtagtaagcaaacaaccctggtgtgagacagtgttccctgtgaatcccaccttctgcctcaactactcctttaccaacactcttcccagagggtcttcagaagatccgcgcagtcaaggaccttgccttcttcaatgctggtgtggcgatgattttctgtgaggccagagtcaagtgatctagcctccatagactagtgtgttctccatatctgaagtgaacggggttccttttagccctaaagtactgtggcttagtgagttggggcttggaataagggttggagaaagtaatggtgttcatctgagaggtcccctgaaggaattcaaaggccaagctgccactgcctgagaggagtgcttcgtgtgtgctgctgatctaagatgtggagcctctggcttcgtatggcactgaaggaaccttggaggttagaatatgttagcgagatatttaatgagacatatgaacagaacatctgaatcaagccaacagagtagacatttccaggcacctgagttgggcaatgaatttggcctggtggctagcaaaagtcatgagtagaatggggattgggtgttggtgggtggtttgggccatgcaaaggagtcaggattctgagattttgggtagctgagattgtgacaagagggacttttgaggtcagtgattctagatgggttactttcctggaagccatatgccttgtgtgggcactattactatcaatttctacttaatgaacctctgtatgtggcacttttggggttcagtttttccccatgcacaaggccagagagattttgtgacttgagttcccgttttcatcattgggattttttaatataaaagttttgagactactcagtgttgtatttttgaggatatactgatactttataattaggggttgtgttaggccattcttgccttgctctagagaaatacctgagactgggtaacataagaaaagaggtttaattggctcatggttctgcaggctgtacaagcatgacatctgacatctgcttggcttctagcgaggcctcagggagcttttactcatggcaggaggcgaagtgggagcagcgatgtcccatggcaaaagcagggaaagacagagaggcaggggggtaccacacacttaaaccacctgatctcatgataactcttactcacttttgagaggacagaactaagctgtgagggatccacgcctatgacccaaacacctcccaccaggccccacctccaacactggggattgtaattcaacatgagatttggatggggacaaatatccaaactatatcaagggcccatagtgctttgtcttcgacactgagtgaaccatggaatgcgtcagcrttcttgagaattcatatctcttgtactttgctttagttgttcatgtttatttatctggactagttctgaaattgtcaatgattctgggtaaggagagatattcctctgtaactgtgaaggacctttgaacattctgataggattaatgattttcttccagtgtgtctgtaataatcactaaacatgtctctgtgaagactccttagtacattaaagtattgttaatgcaacagtaccaccagaagactctgggtgattgatcgggataaagttgatcatctgtctgttaaagttcttttttttttttttccattcttgacaagtggttcaacttagaaatcccgagtaccccttacaaattgcaggctacctcaatcacctgtgattacagaacatggttggtttgctgtgtgctaggacccccatgtcttaaccacagttgatttattttaaacactggaaattgcaaaaaaaaaaaaacaaaaaccacacacaaaaaaacctaccttgggagttctttgaccccacagttcttcctattctatgtcttaggctcttaaagtgcttctcctttctgcatctgtctttccccaattcagaaggtacttcccgctggcagaggcatcactcagtaaatttcagggtagcataagaattgctctggttacgttgatatataatttaattttccccagactgcctctggcctctgcctgtttaagctctggaatccctgtggggggtgagtgtgcagaatatgttctcacctctcaattcattgtgactttagctggaggtcggtcctgttgctgttgttgctctgcatcccagcaagtagaagcagcatgtgagatggagtgagcagtaggcatatggccagggtttgtgtgtacagagggatgcagcacagggagggaaagcagcattttccctatgggactgtcaagagaagtcgagcccttccatggagcacagaggcacagagaatcagacagggcatgggcctgggcagcctgaggcctgcctggtgagcgatggggcaggatggctcacatcgcctagccgttggcaaagggtctaaaattcagtgcttcccccaagcagcctagctccttcaaatggcaaattattatttttctgttcttttctgtcttcgggattgtatttgcatctcaaatgtgtgtaaagggaattttgcacattcgacaaacttttwctttaaaggcagcaggttggagaaaggagctccatcacattaaatgctggctattgtgcttttcattcagcttgacgaacagtggccgaaaatggcaggggattaaactgatgtaatgacaagaattcatataagaggctgtgggaatggggcagaagaatgctgaggctttgcagtattatggtgttctttgatctgccgtagatggaaaacataatgtacctgtatttatgttgattctaaatagggagtgtgtaaacagaggcatgtcattttccctgcagccttcaagttgaaattacacagctaccatttctgagcaatggacatatttctgagtaatgagttaaatgcagtttttgaatatttggatcttattgtacatcacaataagagcatttttgttgctcaaytgggttcctgttacagaggcacacagtatgtgggcatttgtggattattcatttgctaaagggcattcttcttatttttaggaaaattcacctttgtcttggggaatttaagcaaaaacaactgcaatcccgaatagaatgaacacctccttttttcagcctcattctttagtgtgggagagccgcagatgagatgtccctgccttctggagaaatacatatgtgtctttcatctgggaaatgtctttctgggacagcaccagctggaagatgtcacctgggatgaccaaagacttgatcaattgacaaggggagcatcaaaagtggctgagaaccatttatgtttactgtgtttgaaagcactttggagggcagggcgtgcgtctygtgcatctgtataatatgaaagcatgttttgtgaggcacatcttaacatatggttccagaaaaaggaaggtggtgccctgcactcaaactttttcttttctatacatagctagaaagtcatctttctataatcatttgaataatgatgttcacactttttttgttgttgttgagatggagtctcactccgttgccaggctggagtgcagtggcgtgatctcagttcactgtaacttccgactccttggttcaagtaattctcctccctcagcctcctgagtagctgggattataggcatgcaccaccatgcgcagctaatttttatatttttggtagagacagggtttcaccatgttggccaggatggtcttgatctcctgacctcatgatccgcccacctcggcctcccaaagtgctgggattacaggcatgagccactatgcctggcctgatggtcatactttttaaaggcttcatgaggaatttccctaatttcttagaatactgctttggtcatctccacaattatggtaggaaaatgtggactcaaggccatccacagttttgactgactctgctctgcacagaagcccctgggccagaatgtctcacctgccattagttcccatcccagcctcacatttgtgcctctatggaggctgtgccttctactagaggggcccacccttgctggcttctgcccactagctgctgcccatcctctgggggtcagcttgttccagctcccccaccaccttccctgcaggcttcatagccacctccccagagctgagtgtgtcctgtcagtagcactcggggaggatcagccaccttgctgccaggtggcctctgcatctcacctgttgcactcttagcgtcagtgatggagggtaataacactaatgataatggtaataataaaatcatttattcagcctgcttttactgattgcctgttgtttgctacgggtgaggatggagtggtcatcaaaaagcagacatgggccaggtgcagtggctcatgcctgtaatcccagcactttgtgaggctgaggcaggcagatcacctgaggtcaggagttcgagaccagctgatcaacatagtgaaaccctgtctctactaaaagtacaaaaattagccaggcgtggtggtgtgcacctgtaatcccagctactcgggaggctgaggcaggagaatcgccttgaacccaggaggtggaggttgcagtgagcctaggttgtgccactgcactccagcctgggtgacagaatgagactctgtttcaaaaacaaaaacaaaaaaagacagacatggaccctggattcatggcacttcatgttccagtgggaaggatagaccaaccagtagtcactcacgtcagtggaaggatgttgactgacaggtggtgcgtgacactgtgagggcttgcaaaggggcatgtgaaccattcaggaggtcagcgaaggctttcctgaggacagaaccagctacataattttcagagtccaatgctaaatgaaaatgcagaggtccttgtttaaaagttattgagaattttatggtgagtggtggcagcagggtattaaatcaactgtggggtccttctgtgcagggggccttgtgtggctatgctggttgcattctcatgaagcgggccctgcctgaggagtgacatttgagctgagatgtgaggggagaagagggtaggaagatggctccaggtggacgaaacagcatgagcagagtctctggcaggaaggaggttggcacattcagaaatgatgaaggggccagcgtagctggagttcagagagcaggtggggcatgacgaggccagggcagtagagttggtgatagggaaggcaaagcagaaccctacacagctacttaagtgtcctgagcagggagctaaagacactgggtttggattttgcagtcacaccggctgcagtgtgcagggcagactgggtaggtagcaggagcgaaagcagggctgttcggaggatgtcagagctgtccagttgagggagggcaggggctagtccagagtggtgccagtggagggagaaggtgtgcaggaatattgaggacacccaatattgggcatagtggagctgaaggaacaaaagacgccaaagatgacatctagattctggctttgaacccctgagttgaacctcatgaaatcaccaacattctgccacttttgatctgcagaaataccaatttcacacaacttgttctgatagatgggtggttggtgggacatccctttacacgggaatgcttagaggatcagaggggtttgctttgtttttgctttggtggtggcagctatgagagacaattacaaactgggttctagacacagtgagcttgaggtgcctttgcaacctctaagtgagggtaaggaaagaggtggactatatgcatctggagcttagaggaggtgcctgagcaggagatacagttgttggagcagatgctgtatagacaccttatcagggttaccctgtttaaaacttgcaaacatcctgtaaagaatgtactattgtattcagtttccagatgagaataatatggctaagagaggttaattaacttgcccaaggtcacacagccaccaagtggaggagctgggtccagggcccaagctcctaattactgtgcctactgccttctcagtggtttcctcacatcaggatgcacagctctttgtactgagtagatccttaggaattccttattggataaatacatttaaaatatttggtggaaataatgatatcttcccttcttaataggagattcttgaaagaggtcccaaggccccaaagtgtcagcaaccatagatggaatttacatggttgcctgtctggttattctcatcacactttcctctccttcatgggcaagctccacccccaccccttgctgaggtctgaactttgtagagagcctcagttgtggtcatagcaacatcttgcagatgaatccattaatgataagttaggctcctcctctagtattcttggggtgaattttataggattttgacattttagggctaacagctgcctcaggtgctgctgcgctccctcgggaacccctagggcacattactaaatcttgctgggcctaggcacggactcaggatccttctcaacatggtactcatctcattttaggactgagggcactgagatccagagagatgttacttcaacaatcagttaatgctagaataaatctgtttgcttattaaatcaaataaagtagattctagttcagtccttttacaggtaaggatgctgagggcccgagaggcagtgacttgctcatttctggtggagatggagctcatgctcccattcctacctcccatctagtcagtggtccctccttgggcctggaacacacggcaaatccacttgctgtgttggctcattcagcaaaacggagcacatcttgttgtggacatgcatttttcatcagctgttcctctggaacttccctcatcatgcttgtgtacagtgaattgaatgatgtgaattatactttattaggattgccttttgatacaagtatttcttttaggctgctttgtgcccgctgtgatgcccaccctggattttcttccctttgcccttgacgttgaagtgaaacatattgtttccctttagaatgccattaaaagtcgatgatgacctttacagtgactaatagtttctaaggggctttaattgtgattttttttttttttttttttttttttagcagagyggcattagtttgcttcatatgtcttttgtatcagggaatcaataaaaactcctgccttttgttgatgctataggatattttatgccgatgacaagggatttgatttaatattctctttaaataagatcaacactgctgcagttataaactcttcgaaaaactgtcaagcccgtcaatgtagcatgaaacaaaaagttagcagcctggtataaattagcacgtacaatgtgtctttgggaagggtggtacatatttacgattgtgtgttaaaatatrtatatttagagatttctttctgctctttcgaccataagtgggaaatgcagagaggaacatttcattaccaccaccttccaaaccgcaaactttctttgccagttaatgattttctggggcaattctgaacgtggtgacatgatataaacaggtatttatgatctgtgatacaattcttcgtgagtatggatttatagttaaatggtgcagtgggaatccagccagagattattgacagagcttctagaatccatattttgtctgtttccattattcacatacattttcttttgagttctgattatctgtgtagtctgtgtttcctggtttacttgagaggtgagcataagactttgaaattcaagggcatgtgttctatatgcttgggggccatatgttctgtacatcttgaccctgcacctcttccccaatatcttgccattttcattcaacagcgattaggttatgtgattagatcattccatctctctttggctttgtcccagatgaaccaaagtaggagcagagctgatggacaagaaatgtttggggtgagcacatgggtacagtcgtggcagtgtcagagacctgggagagtccagagcttcctagatgagagttacrcggctcctgggacaaagtgaggctttttcagaacagcagcagacaagtgagggatcactcacgggcaatgtggatcatgttagcaggataggaatggataggcaagagtctgaggggcggcaaatctgagatcaggtgatccagagagaaggtctgccttgcacactgggaagattgcagtggagctgctggtggcatcaggagagccctgggaggtcactgcttccatgactggaggaggtccactcagagttgcttccagtgccgacccacggggagaaactaccagaccagagtttcttgaagtatcttccctggagggtctacatcttaatcacttgggatttccatcagaatctgttgtgaggaagctgagaatctgtattttataaagctccccagctgatttccatgcaaaccaataaagctttgaaccatcgcttcacacttaaggagtctttccaagttagaacaaacttaggtctcctttcattttttccgaaagagtttgggtttatatctggagagagagtgatgctctttggacgacgtgggacagatacgcgttactccacaggtccatttgagaaagtgatatttgccagaaaatatacaatatatgttttgtttaggttatatttgttgtattatagatacaactttacatgcagtttcagatatccaaattccctgatcgtgaactccctgttgaaagctcttggttggaagacagggttatattaattcttgctacctttcactgattaccctatgcttgctctaaccatttgtgttgaagacaggatcaagatatgacctctagttactgtcctagaaaaatctctgctgggtcaaaatgctgaatcttcattatgctaataaacaccttgatgaaaatcgaagcatgtggtccccattccagccaataaatccatttgtcactattggaaagcattgtaattcttgaattcccatttctgctttcatttgaatgtttgccattcttccttttgccttagtcctacatatgtgaaccatttaggaatatgatttatgcaggaggaagagtgaagaggttccttctggacactgggcccttgaacttgaagatcctgcttttctgtctggaagacatggccctaatatgcagtggctcaccaaagcaggtattgatcttgttttcttgagaattcttcataggcatgagtcactagccagaccacacatcagctgtcatctgcccaacatttttgtcattttggaggagatgagtgcaaactgagaaagtctctctgcttgtttccctgggtggtacttatgctgtctgaatgttcctttctggratttattagttagtgattttcttttcaataaacacttgtagcatacatactagtgtgctctcctaaagggggaaataatttggcagccttatcagcatgttattggactttcgttttgtttgtaatcttaagacacctttttcccactcagccattcagcaacattttcccttycccagccttggccccgccacctgaaacattcatgttcttcctctaagacagaataccaaccaagtgcaggcagccggttgacacaaccagatcaaaaggctttgaattctgaaaatgattcccctcttggtatcaagcccagtgataaaarcaaagcagttgtcatcttgaaaacagagctgtatacacagcagagcctttccaattagcacacttaagatgcgtgttagaaatgatgggaagtgggatgttacagagtgaaatgcaggtaatagggctttaaattttcatgtttcagttgatttttttctattgcagttttaagaaaatcgttgcacattattgaaactcctaagtgcatcttaccattgctcttctgtttacaataatatcttccaaaacaacagaaatgttggtcacaaaaaagcttgtacccattggttttccaagtagaggaagaataatctattattcaaaatttccctaccatggatgaacaaatcagtttaggtggcttttctgcctgctaccagccaactacttcaatggaatccctgaactgaacaacctggcatttttcatgttcactagactcaggcttagaaatggagcctcctcacaggatccacacaggcatatggagaaattaaagccaaatgtccagcaaaaaccaatgggtgtgttacataaagataccagagttatttaaatatgtaacttactcaccagtatgtaggctgctagaagtcaggggaaacctattaattttgaatctctggtgtctagcatggggcagcatagagtaataattacagttgtggtggatgtgattagtactcaccaatatttccagttcccctctccttttgtgtacatgggagaattatgctttcctttcctcttgaagtgagatgtgccttgctttggtcaaatcagtgggagcagaagtgatttgtgtcacttctaggtataagcatttaagacctagtaaatggcccttctgttatggtaaaccctaaagccttttattgagaaaggagcattataaaatgttggagactctgttagtttaggtcagtgaataactacagtcaccagagcccctttcyaccagccaacccacactggacatgtagaatgagagagaattaaccttttgttagtttaagccactgagatttgggacttgttattgcagccaaaataatctaacatattttggctgatatactaatgaacatttattcagtgctgtgtgcttcaagtatttttatgtattaattcacttaatcatctctataatcctgtgaaaaagatactgctgttatcaccattttgcaggagaagtcacatgggtgatgagatgtttagtcacttgcccaagattgtatctctagtaaggagcagaactgaaatttgaacctaggcagtctggtaaataataaatggtgaatgagaaagtcaagatcagagagtgctttgtgatttgctgcagctatgatctttcatgtgacatcattggaggaggtaccggtcagtgtcatctatcccagatctctctgctacctgtcatttttccattatggtttcttacttttaggtcttgaaagttttcggctttctatctgcctatataattcacatagtgctatggtggacaacactctgtaatggtttttggaaagctaggtactccacaagagtgcatgaagcgtcagagaggaggtctagaactctgggagagctaaggagcaatcaaggactagagctgccctttggctgagggttccttcattaagactagtgactgccatgttgtgctgtgagcccagagaagacgagcatcctgtgggagttcccacctgtggagttcatccagcctttccaagcagtagtgggagataggatgactgtgggtatgctcaactgtttgttgcttccaaaagaagatgagggccaatttcccaaaagggtaaaaggaaagaagttgtggcatagtctgagaggctcaagaggtttgattttgctcctttgttctaatatggtttggtcaaggtggtttggtgaagctttagggaacttcttattgtaagtaacagaagcccattcaatgttgtttaagcaaaaagcaggatttgttaaaacaatgtaaaatatagggtcctcttatggatccccaatcctggatgtatagcgagtcctcatggaggactggaacaagaaattgggaagctctctggaggcacagctccctcttcaacttttggaggttatgcaaaacttctctcaattttctcagtacatttcagctcttctacctggttagtattctctgctgtcataggttcaagggcaaacatggccatgatatagtacctgagcttatggatcttcagttcaaataaccatgaaaaagtgattagaaactttaacttccaattcaacaaactgggaacagaaaatttgatccacgttgcatggtctactcctggcctcatcatcggtagtggtgggatcatatctgacatttgttcagcagcatatgttgattgcctaggatgtgacaatcactgggttatgtgctgaggatgtggaatatgaataaggcagtgcctctgtcttttagattctcctgctgcggaggggcatgtgaggccagaactcaacccaagggatccaattggacccatgcctaacagttataaggagccacattttgttttaatataaggaggttttaatagctactattgtgagatggtgaactcactgatgctgaaattatttcatctgagataggatgatcatctctgtaacaggatgttatctgaataattctctcctcttccagcagattagaccacatgacccttgttctttccaactctgtgattttaaaataaaccatgtgatacagtctgtagaaatgaagggggaaaatatgtgctagaagtggtcagaaaagtctctttagagtaatgaaaacttgaatttatccctgaagaaagagaaggcacatagacacaggagaaacaatatattcccagttggcatagtgaaatatgtaaagacacaaagacaatggatgtggtatgtataaaagagaagacacacatctactttgtgtctttaagaagctaaaggaaaataagcgtttgggagggtattggaatgatacaattaggaaagtggacctatagctatagtatcggagaaccagagggaacttgttttaggtagaatattatttgctgtaagagaacacccaagagaaagtgacttaagcagggaggatmtttcattatctcacgtaagagtaagactgagttaaagaattaagggattgctccagcagatgacatcagggaccaagactcyttccatcttttttctctgcccattttaccatcttggcttggtgcttacacttgtttcctcatagtcacagcctgagcatgatggttccatgaattgcaggtggacacaacaagatctggagaagtgagagggatgtgtctttctgtgcatccctttttatttgagatatcctttttcaaatgtcctccagaaaatgtctgtttgtgccccattggccatggttagtcacatacccacaccttagagttaggggagttagagaggaaggcaggctttgctagtaatgagggggtttgtggggtaagagttgtggggtcagccactagtggtattgctcccagccagctcttgcaggtcatcttgccccatcacttagtttcactgataaagataaatcataactgtcatatgtcaagtatctgttatacactgggaactctgcagtattttgtttttactcttggcagcaacttttccaggtagatcatgtcattctcacttactgatgaggagactgagtggtgtgtaggtgactcagatacttagtgcctagagagatgagatcttatttgaattttagaatcacagagtctcagttttgaaaaacgttttagcccagaactgccttcttctccagaggtgcccagccctaccttcaacatccctgcccagtggcaatggagccagcttttcaatatttgcagagacgaaagttttctgaccactggtccagtgttctttccaaaccggatcactggcagagcacagacctgtcatgggatagaggataactgctggttttcttctgtggttccacctccccacccctgggagggatcttttaagatactggctgctggcactagtgatgtcatggcaactgttattgcagggcacgttgaaatccattagcaggcattcaaggctcctcatgagtaaartaggggcaatgtaaaaaagttagtttggcttccccaacttccttaatcccaagaccccgtgccaggtacttgtattttctatttgctaaatgttagttgaaacaaagggctgttttgttgggtttgtgtttccctgtggaaaagattactctaggcaaattttagaaaatgcttttaaaaagaatcttgtgtaagttgaaaacagagggaaagaaagtaaatgtcttgatggctttttattacaataaaaattgtagtgagagctctttcaattccctccctcctcccatctactaaacaaacctttgtctgtgggaggaggattatgtttaaacaagagagcaaggtgggaaagtggcattatttgagaagtcctagtgctgataagtttgtgatcagtgacttcttgagtacttgtcaagattaaagaggtgctttaaaagtaagaatttgctattggtggttgtgggaagggattacctatagatccaataggaaaccattttgagtctgtaatgtgaaattttggggagtagaggagggtaaaggaaacaaaattcaagcaatgaaaatatttctttttggtaggggaaatgcttctagagttcaattgctctcctcagatacctttaaaattgccttacctttttttgactatgataaaaggacctcttaggcatatgtgccaattatcagagattttccctgataatatgataaattttcatactccagtgaaatttggtgattggcaggtcattgggttggcagttgtggttctggtgatgtcctagatatgttggaacttgggataggtctctggaggacatgatgcaggtagccttctggtagtcaggaggaccccagctgtttctccacatggctcctaaaacaggcaagaaaatggtggrtctagacctgtactgtcaaatatggtaactgctagtagccatatgtgactattgagcacttgaaaatatggcaaattgagatgtgccataagtgtaaaatacacaccaaagacgtagtagaaaaaaggatgtaaaatatctcatcagtaatcttttattttgacaagaggatgtaacaattctaaatatacatgcaccaaatactagagtgcccagaatcataaataatattagacctacaaaaagatgtagaaccaatacagtaataagggggacatcagtaatctactgacaacattagacagatcatcgaggcagaaaaacaacaaaccctggacttaaattggactttagaccaaatggacctaatggacatttacagacattctgccttacaaccacagaatctacattcttttcatctgctcatggtgcagtctcaaaaattgaccatatgctaggccacaaggcaagcctcaatacattttaaaaaattgaaataatgtcaagtaccgtctcagactagagtgaaatagaactagagatcaacaccaaaggaaccctcaaaactctacaaacatatggaaattaaataatctgatcatatgtgattgttgggtcaatgatgaaattaagtggaaaaaaacccaattttctgaaacacatgaaaatagagacataacataccaaaacctctgggatacagcaacggcagtgccaagaggcaagtttttaaaggattaaatgcctgcataaaaacatagaaagatctcaaattaacaacctaaccttatacctagaaaaacaagaacaaactagaaaaacaagaacaaaccacacccagagctagcagaagaaaagaaataacaaagatcagagcagaacaaaatgaaattaagaccaaaaaagccactcaaaggatcaatgtaatgaaaagttggttctttgaaaacataaataaaattaatagaccactaactaaattagcaaagaaaaaagaagagtcacataaacacaatcagaaaagttaaaggtgtcattacaaatggtataaccaaaatacaaaagatcaccagagactattgtgaccatctgtttatgtacaaactagaaaatctaaaggaaataaattactgaaaacatacaacctcccaaggttgaaccaggaagaaatagaaatcctgaacagaccaataatgagtagtgaaattaaataagtaataaaaaaccctctaacaacatcaaaaaaattccaggaccagatgggttcatagccgaattttaccagacatacaaggaagaactaataccaatctttactaaaactgttccaaaaattgaggaggagggaatccttcctaactcattctatgaagccagcatcaccctgatactaaagccaggcaagcatacaacaaaaagagaaaactacagatcaatatcccagaagaacacagatgcaaaaatcctcaacagaacactagcaaactgaatccaatagcacataaaaaagatagtatactgtgatcaggtgggttttattccagggatgcaagattggttcaacacacacaaatcaatcattgtgattcactgcatgaacagaattgaaaacaaaaatcatatgatcatatcaatagatgcagaaaaagcattagataacatccagcatctcttcatgataaaacccttactggctgggcgtggtggctcacgcctgtaatcccagcactttgggaggctgagatgggtggatcacgaggtcaggagattgagaccatcctggctaacatggtgaaaccctatctgtactaaaaatacaaaaaattagctggacgtggtggtgggtgcctgtagtcccagctactcaggaggctgaggcaggagaatggtgggaacctgggaggcggagcttgcagtgagccgagatcacgccactgcactccagcctgggcgacagagagagactccatctcaaaaaacaaacaaacaaacaaacaaacaaacaaaaaaaacccttaccaaactaggtatagaagggacatacctcaaaataataaaaaccatgtatgacaaacccagagccaacatgatactgaatggggaaaagttgaaagcattccttctaagaactggaacaagacaaggatgcccactgtcaccactctgattcaactggaagtcctagctacagcactcagtcaagagaaagaaataaaagtcatcttaattgggaaagtggaagtcaaattatctctgttcactgatgatataatattatacctagaaaaccataaaccctcctagaaaagactcctagacttcagtaaagttccaggatgcaaaatcaatgtacaaaaaccagtagcatttctgtacactggtaatgattaagctgagaagcaaatcaaagactgaatcccatttacagtggctaccaaaaaaacactgaagaatgcatctaatcaaggaggtgaaatatctccacaaagagaagtacaaaacactgaagaaagaaatcatagatgacacaaacaaatagaaaaacatcttgtgctcctggaatggaagaatcaatataattaaaattaccatactgcccaaagcaatctatagattcaacccaattcctgtcgaactaccaatgtcactattckcagaatttaaaaaaaaacttaaaattaatatggaaccaaaaaaagcctgaatagccaaagcaactctaagcaaaaatataacaaagctagtggtaccatattttttacttcaaattatactacaaggctatagtaaccaaaacagcatggtactggtataaaaattatacttggaaaaatagaactgaatagagaacccagaaatattacttacctataaacaactgatctttgacaaagttgaaaaaaatatactctgggggaaaggacaccttattcagtataattttttttttcagagacagggtcttactctttcacccaaagctggagtgcactggtgagagctcaatgtagcctcaaattcctgggctcaaacagktctycagcctcagactcccaagtagttgaaactacaggcatgcaccaccatcctggctgataccctatccaataaataatgctggcataattggagagccatatgcagaagaatgaaactggacttctatctcttaccatatataaaaatgagctcaagatggattaaagacctcaaactacaaaaatcctaaaacctaggagaaactgttctggacattgatctaggcaaagaatttatggctaagttctccaaaggaaatacaacaaaagcaaaagtagacaaataagacttaattaaaccaaaaagcttatgcacagcaaaagaaacaatcaacacagtaaaaggacaacctacagaatgggagaaaatatttgcagacaatgcatctgacaaaaggctaatatccaccatctacaaggaactcaacaaaacaaacaaaccaaataacccattaaaaagtgggcaaaggacacgaacagacatttttcaatagaagacatacaagcagctaacaaacatgaaaaactgttccctatcactaatcatcagagaaatgcaaattaaaaacacaatgagataccatcttccaacagtcagaatggccattattaaaaagtcaaaaaacaacagatggtagtgaggatatgcagtaatatgcagtaaagggaattcccactcatacaccgttggtgggaatgtaaataagtataacctctatggaaaacagtatggacatttctcaaagaattaaaaatagaactaccctttgatcttgcaatcccactactgggtatctacccgaaagctatacaatcaacctaagtatccatcaatggatgattggattaaaatgtagtgtgtgtgtgtgtgtgtgtgtgtgtgtgtgtgtgtgtgtgtgtacacagacacatatatatcttcaccacggggtgaagtacggtcccgcccgcannnnnnnnnnnnnnnnnnnnatccctcacacaccatggaatgctactcagccataaaaaggaatgaaatcatgtcttttgtggcagcatggtttgaactggaggccatccattatccttagtgaaatgactcagaaacagaaaatcaaaaaccacatggtctcacttataagtgagagctaagcaatgggtacacatcgacatacagagtgggataatagacactggagacttcatatggtaggaggatttcgggagaaggatgaaataccacctctagggtacagtgtgcactatttgggtgatgggtgaactaaaaaacccagatttcaccactgtgtgatatatccatgtaacacaactgcatttgtgtccccaaatctataaagaagttaatttcaaaaaatattttgattacatgttgattgtatttgggacatattaaatgaagtatattatcaaaatatttttttctacctgtttctttttgcctttttaatgtagctactagaaacatttaaattatctttgttggctcatatttctattgggcaatgctggtctagatcaggattcagcaaagtatagcttactgtctatttttgtaattaaagttgcccacttgtttatgtattgcacatgctgtgactgctttcatgctatagtggcagagttgactagttgcaacagagactatatagctcgcaaaacctagaatatttatcatctggacttttacaaaagaaggttgctgaactctgatctaaataattctagaagacttggcaggacctaaaatcaatctaggaaaccctgattcttactcttgtaggtcacactcttaggtaaggaagagagaaccaaggattctcctgacactttagaggtgcttctggcttttgctccctcttattcctaaactactttatctaaacaagctgtaaactttcactcccctcctgctaagagcctggaaggagggactggagagccagcatattggctctgcatagaaggcagatttggagcattttaccacccagtggaagactatgaaaactttgctactgattcatgcatttctaaaggttttccagtggagacacagagtaagggctgaaaggtagggacaaacatatggactgacttaagaggtccagtgaccccaatgagcagccatagtacatttaaattatttggggtggtaaagatattttagacccaagmggtttcatcatcaagaacctttttcaaggaggtgtgtagacctaacaccttcattatcagctgacgccataagctttggggaatggagaagactggaaaggagatgtggaacacaggatagaaggcacaagaggctggagcttatcttgactagaccacagcccacrcccgagaccgccctatgggcatgggccactggagggtaatcagagactttggtgtgacgcctccttaaaaatctcttcccactttcttctcccaaaataaatacattttctaagacaagaccctgaatcagaatcagtttttctacaaactttgggtggtgttaattcctgccaacacagggcaaagcatattacagtgaatggagttacagtattcagaatgaattatagggcgctaggcacgtgatttaccacctatagtaaacagggcttcacacatggtgtatttctgctgtgttggttagttattaactgcaaaaaaggggaaattcatttagaagacgtgctcattttttatgaggtaaggctgcctggagatgcatggcattttaaagcaaacgaattcctgggagagcccgagcttaccacccagaaatgtggcaaggaataaaaacatttacaccagtttaatatgaatggttgaagaaaatatctattgcacattgaacatgatatatgaaaccataacctactcttgtgtagtaagctacagaaccattcacctaacagattactattcgagttgacattattctgcatcttttcgatcttctcttgccaagtgctggaaactgtcagagaaagccagccagatacataggcactgttggcctgggggttgagaactcataagactcttgaaggcggaggttacccagtgacccccttgctgcaaactatagtggaagtcaaaggatgacagccaacataaacagcggctgcatgtggaacgtcaaagtcaagacaaatagaggtgggactttctctgtctcctgctccctttctagtctgtaaaatggagcttatttcctatcatctagcagaataaaaagtgccatatggctttggggggcctcagaagtgcttcttggttcattcttataacataggtggaatttgacctcctcaaaaattattaaggggtgactcttgcttaatcctactgtgatttattggctacatactggatatcaaagccaaaaggaatcgtaggagacgttttggtataactctttcttctcccagagatgaagaagctggagtctcaaaaaggttaatgaattgccaaatgtcaaatgctagttaagtgcaggactggtgctaagaatgcaagtatatctcaatttctggcccggagctcttgccttctacctttctgcttgtgtgtgcacacacaaagttgcttgcaactgctgttttctttttgggtagagtaatgaaaaatgacttttgatgtttttgtaaatttgcaaatggtctaggtcagtgtccatgttaagacaccttactcggcctgacactcctaattggttttaagattctgggcctgtggagctctttcttttaaactattaactacgaagttttatatttcaactcattcacatctactgaagtgatagcagcagttttatatgtgggcagattaatgcactttgggaattttagagaattaactttactgcccagtgcatttgtggcatatttaagtaaactagagaggccgatccttgcaaaagcaaaagatattctttttaatgtgaaatatatgggttttgacatgactataatttttagactctcaagaattttattctgatgttttgtctgacatctctaagctctttaatatcaccaaagaactcttggtttgtattaattctgtttcatttgtgtattttatgtgtttagtggtcatatttgaaaaacatctcttgtgagmgctctgtataattttggcagaaaattactttttttgtgtttctgtgatgatcccctgagatcatttttgcataaatccggccttctattttcagatacaaatctgttgtacagatgattcttcttagaagaaaagatgcatttgtagctaaaaaatgtaaattacttttcmtggaaaatacctctctgggcccccatttccaaaatgtgatgattgcacatcgcatgtttttgtgcgtgctcaggggactgcttttcttataattagaaaagtcttgattgtgcagcaggtagaatggggtggcacggctgcttctgcagcataggtgagtcagtggaggtaccagaggaataagcaagagaccttatgtggaggtggcacttcactaagggaaggaggtcttagttgttgaagtgggtgtgtcatgagccttctttacaggatgggaatgttaacagaggacttttagacctggagacatttaaacacaattgccatcctctgtttgtattttcttcttgcttgtgattttttatacaggattcaaagttttatttggtctcttatggaagcatgtttggaatgaacaccctcctcatcacaagttttatgaaatagtggaggacaacagaaacctcttcctaaaatgtcttctgctcagtacaagggttagtgtttgagggactttgaggcactgctgtaaagcaaagtgcaaaaatcaacatattcagatttgtgccaaagaaagacttgagtttgagaacatttacatctgttttcaataattcctcgcatatgttgcagaatgtacgttatccatcttgttatccaggaaataacatttgttgcaaacagtttgccaattcgtaattttattgaatttgtttatcatgctgtggcttcatatgaggtctgaaagatggtgatctttggtgttccagctgttgtaacattctgcagtggggccttaattccaggatgagctggaattctttggagggtctgggctttctgagaactacagcataagagccggcattgctgatgggcaattatctttggggaacgcagtaactttgcttgtacattcctcaaccccattttcatttctggcttttaaatgtagtcttgggactgatgtgttgaatagcactccttgtgtgccctatactgtctcctttgaaacctgcccaaacttttaaactgtttttatgtttggtttgagaggatactgctccccaggaaaaaaatgattatttagaacgaccccaaactatctcagacctgaaaagaagtagattctcttcaacagagaagctaagaaatatctttttgctgcataaatattatcattttcttaaggagttgttggtaggtgaaaagaaagttcaaccaggtccaattttataattttcctattttatttagcaggcattttctttactgaggtttatattgtctgccaaaactaggaggaaaagaaaatattaacaaccctgaaagctctttcattctgaattattccttaatgtttttaatgatttattataaccacacaaatgtgatcttggggccatttggaagttattgagtttccttggagatgggacttggcattttccaaaccagagtttgcttttgtggcctggaagttgcaaggcatatatatttggaagactaaagattattccccaccaagaagttttgtcaacctgaccttctctactcttatgacgctgcacacacagcagtaatctctgcagaggagagcaaataaagtgaagaaatatagcggtacgtgttatttttacatcctaaagtaaattctccagcattaaggctgactgggaatttccatctcagagttctcatgaatgctgctccactttggtgttgtcctcttgaatctctttttattataggtctttgaaggaggtatttcttgtaatttattcagccagagagataagtgagatgtggaattggggaaacaagggggtgggaaaagccttctggggtcagctgtccctgccgttgagcctgcaggctttttttaggtgctgcagccagtcaaggtgaaggactagttcagctctatttagaaaacaagtgttatctaggttctgtgttatgagatgacttttagcacaagattcaaaagttagtcttggcaaaatggacattctttgaatgttgttggagctgaatggctctagatggtgtgctgagcccttcccatgagatgatgttccagaagaatcccagagatatgaggccatcctcttcagctccacaccaaagcaggcatccactcaaggccagctcaacacttcagctccacaccaaagcaggcatccacccaaggccagcccaacagttgaacccttccactagtaaggagcaaagcagcctggatcatggctgcacagttctckggagaacagttgtctttgttttaatgggctgtctgtggccctgcagcttctctctactggccccaattctgagaatgcagttttaaaaatcactttttggaaagaaaaaaggaaaaattctaggatgttaaaaaataatgtttttctgatttatttttacctaaatctggtgttctgagtcaactttcaaggtcaattctgttattttaaggaataaaatatatttatttattcctgttttttcccttagaatatgttagtaacacttctaaagcattcatgaaatatcttaggtttgaaggaagattcagatatgttaattaagtctatctatacttcccctggcttgtatattctttagggtaagggatactgtcttatggcaaattttgactggtaccatgttcagcacttggcctacaaaacaaatgtttgttgttgagtggatgttgaatgcatacatttttgaataggccactttttttttttttttttttttttgctgctgagagatgtcagttgactgcttgtatcccaacttcatcgtgaaaagatgtttttctgctattcactttaaaagcatctgttcatcccaagtgtgcagtgaaagggcttccctccttccacctcctctcatcatagattttctttgattagttatcactggatcaaattattttgcagtatgatggagtgggaagcatttttgagccctaggtcagccacttacctgcttatgagcattacttgggaaaatatatcgaaccaccttaaacgtccatttccccatctaccctcccttgaggggctgttgtgagcaaaatggcctgtgtgaagctctagtaacccagcagatgctcaggaggtagagatggtcatttcgcattattctgctggacttgaccctacatctcctgctgatctttgtgtatgccaggggtttgggccctgtctccaagtgcctgcattttagtgaacttggattctgagattccatgtacattagtacactgtattagtctgttttcatgctgctgataaagacatacctgagactgggcaatgtacaaaagaaataggtttaattggacttacagttccatgttgctggggaagcctyacaattatggtggaaagcaaggaagagcaagtcatatcttatgtggatggcagcaggcaaagagagggcttgtgcagagaaacttctgtctttaaaaccatcagatcttgtgaggcccattcactatcatgagaacaatatgggaaagacctgccccatgattcagtcatcttccaccaggtccctcccacaacacatgggaattatgggagctacaagagatttgggtggggacacagagtcaaactatatcattctgcccctgggccatcccaaatctcatatcttcacatttcaaagccaaccatgccttcccaacagtcccccaaagtcttaactcattttagcattaactcaaaagtccacaatccaaagtctcatctgagacaaggcaagtcccttccacctatgagcctgtaaaatcaaaagcaagttagttacttcctagacaaaacaggagtacaggaattgggtaaatacagccattctaaatgggagaaattagccaaaagaaaggggctattggccccatgcaaatccaaaatccagcagggaagtcaaatcttttttttttttttgagacagagtttcactcttgtcgcctaggctggagtgcagtggcgtgatctcggctcactgcaagctccgcctcctgggttcacgccattcttctgcctcagcctcctgagtaactaggactacaggcacctgccatcacgccaggctaatttttttcatatttttagtagagacgaggttttactgcgctaaccaggatggtcttgatctcctgacctcatgatccacccatcttggtctcccaaagtgctgggattacaagcgtgagccaccaggcctggccagggcagtcaaatcttaaagctccaaaatgatctcttttgactccatgtctcacatctaggtcacactgacacaagacatgggttcccatggtcttgggcagctctgcccctctggctttgcagggtatagcgccgctcctggctgctttcatgggatggcatcgagtgtctgcagcttttccaggtgcatggtacaaactgttggtggatctaccattctggggtctggaggctaatggctctcttctcatagttccactaggtagtgcctcagtagggactctgtgtggaggctccaatcccacatttcctggccacattgccctagtagaggttctccatgagctccccacccctgcagcaaacttttgcctgggcatccaggcatttccataaatcttctgaaatctaggtggaggttcccaaacctcatttcttgacttgtgtgcccctgcaggctcaataccacatggaagctgccaaagcttggggcttccaccctctgaagcaatagcctgagctgtaccttgaccacttttagtcatgactgaagtggctgggatgcagggcaccaagtccctagactgcacatggcatggggaccctgggcccagcccgtgaaaccattttctcctaggcctctgggtctgtgatggaaggggctgccatgaagacctctgacatgccctggagacattgtccccattatcttggctattaacatttggttccatcttacatttctgtagctggcttgaatttctactcagaaaattggattttcttttttactgcatcatcaggctacaaattttcgaaattttaatgctctgtttcccttttaaaactgaatgcctttaacagcacccaagtcacctcttgaaggctttgctgctgagaaatttcttccaccagataccctaaataatctctctcaagttcaaatttccacaaatctctagggaaggagcaaaatgccaccagtctctttactaaaacataatgaaaatcacccttgctccagttctcaacaagttcctcatcttcatctgagaccacctcagcctggattgcattgtccatatcattatcagcattttggtcaaagtcattcaacaagtctctagggatttccaaactttcccatattttcctgtcttcttctgagccctccagactgttccaacctctgcctgttacccagttccaaagtcgcttccacattttcaggtatcttttcagtggcaccccattcttggtaccaatttactgtattaatctgtcttcacactgctgataaagacatacctgagactgggcaacgtacaaaagaaagaggtttaattagacttacagttccatgtggctggggaagcctcacaatcatggcagaaggcaaggaggagcaagtcacatcttacgtggatggtagcaggcaaagagaaggcttgtgcagagaaacttctgtttttaaaaccatcagatctcgtgagacccattcactatcacgagaacaacacgagaaagacctgcccccatgattcagttgtctcccactgggcccctcccacaacacttgggaagtatgggagctacatgagatttgggtaggacacagagtcaaaccatttcatatactctccctagtttcctggctaaataaggtgatcacatatcataggttttctgtggctatctcattttaaagtatgttgtccttttgtcctctaaattattgaaatgtcaagaaaatctcaacaacttgatgtctagttttagaatctcccagccagccccttgcaccagaaaatagcacaaacgacattgtttaatgcatcctaattttaatcagaaaacagttatcctatttctggcatatcatggatcacctgactggtacaagagaaagaagggttttgtagggatattgcaaccacgtattaaagcctgaaagacactctgaagagcatctcatattctaatgtctctgcctattagggtggtgtatcaagaagatgtatcttgttcattggtactttcaagggctgtgatctctccataagtaagattatcagtgattggagccttttcctcctttgatgatctcttctctttttgcttagtttcccattgctgctgtaacaatttgcaacaaacttagtgggcaaaaataacacagctgtattctccttctgtccctccaaaattcacatcaatcctacgtgaagtatacattcaccccatcccaaggtcaccaaaagtttcagccattacagcttcaagtctaaaacctcatctacatctcatcagctaaaaataacaaatctcatgatctcaataatttaaatcaagtatgagtgagccgctaagtataatccattcttggtgaaaattactcttcatctgtggacctgtaaaatcagaagtaagttgtctgcccccaaaatacagtgatgggacaggcacaggagactgtttatagacattccattttaaaagggatacagtgaaagggaaaaggagtcagtcaccagtcccaagcaattttatacgtggcagggcaaacttctttaggtttcaggacccgggaataattctgtgtggcttgaggacctgcgctctggatttgagcttctacactctgggcttgaggctccacccactgggtcatccttcctttttcgtgaaggtaggatgtgtttgcagctgagtagttttatcagcctgtttcttgtctgtagaacttgcctactttacagccttctttcattttatcctttttatcccttctattctaagctgacagtatttctgctagtataacattctcaaaaaacttatggtatccaatgtatgtcatggggattcattccatgagacaaaagggtcctccatagctttttctggataattctatgtctatttctggcttctgttgagatggttgaggggattcacgagtcacatgcctaatctcttcaaagagctttctgtgtgaaagaatactctgatattttgacccttctgagttatttgccaaaggttgttcatttacaccctggctttctttctagagtatcccttcatggcagtgaacctcctaattttaaccttctttgcaatctgaatagctgagcatttcccaaatcatcaagtcctggctcctttttaattaacatcccttccctccacttatcttttccttcttgcctttcactataagcagcaagaggaaaccagattggaccttcaacactttgcttggaaatttcagaaaaatatccaactttattgctttcaagttgtgctttccatgtaactgtaggacacaattcagcaaataatgctgccattaaaaactaaggatcctcttccagtgtccagtgatatgttccttatttccttccgagctctcagcagcagtggctttaacatccatactgccactaatagtctgttgatgatgatttgggtattctctaagacagtgttggtttctctgcgacagtcctcgcttccttctgagtcttcaccagcggagtcattcatgccaatgtttctactaacagcctgttcaagcccatgtaagcttcttctatcatgctcctcaaaattcttccaacttctacttattatcaaattccgaaaccacttctactgttttagatatttgttacagcagcactctatttataagtgtaaaatctgtattcgttttctattgtcattgcaacaaatttccacaaacttagtagcctacaagtaatacacatttgttctcttatagttctagaggtcagaagttcaaaatgaggcatacagggctaaaattaaggtgatgggaaggctgtttcttttgggagcctctgagagaaaaatctgtttcctgtgcattccagtgtctagcaaccacctgtattccttgtcttgtggccccttcctccttgttcaaagcacatctctcagtttactgttttcattactatatcactgttttctccgactctgactcctcctgcatccttcttataagtactattgtgatgacattgggtccacccagataatctagggtaatcctttcatctccagaattttaactcaatcacatttgcaaagtccctttttccatatgaattcacaggttctgaaaattcatggacatatttggggtggtgttatgtagcctaccatatcgctattatttcagttctcccaacttttagaaggttgatagacagcacgtagtagtggaaggaactaatctgggagtcagaaacctagatttcagtcccacttgggctactaaaaggttttatgccttagatcaagccattttgcttttttggacctcaatatcatcagttgtaaagtgaggggattaaactgagtgatggctaaggcccttcaggactctctactgttatgcttctttggttctgggctttcattgcaatgaggtgcttctttagaaataagaaatggtgagttttagttgctgaacagtttagagtgaattagccaaaatggtgctgcagttcagtgctaaagtcagttgaggtgacttagtttactgttgttgttcttgccagattatgggccttttacatacagtagatgctcatcaaactcaatggaaaagcattatcatgcacagtttctcttagaaggcacttgcactgaataagaaaaaaaatcctcactctcttagtgtaggggttcagggcgacttaaatggtaaaatctgaggtctgagtaaagggtttcttatgttctctagggtggaagttatggctgaggaaggatgggaaggttttccgaaggtccgtgtctccagtaggagaaagcaggtcctttggagaaaatgtgcattggcttttgctagattcttgcagctgcacagaaggctgctgcagccaacacatgttatagagctcaagagagttggaagtgatgtctgatgctaagtcctccacaagcaaaccagggaaatcaactgaagaagaggcctcaaagaaatcaggtcaaggaatttaagcactgagtctaggaggattcagaagaggatatttagtttttcagcttgtcctctgggactctataccactggggactcatatacaatatttctgttgttgctaaagggcagtaagtatgatgattagaatttgaaaagcagtccctctggtaggccttaggattttctaaactgctttgcaaggctaggttaaatcttgtgtttttttaaaagaggaatcttctattcagcacacaaatgagcaccctacctttgagcctttgtaattttactcatgttatttcctatgtctggaaattcttgtccacatctttacctgcttacaatcttctctgtccttcaaggatctgcttaaataccatgctttcaaacaaaacctcttatttcctctctctccgaatgatcttttctttttcttaaactcctgttgaattttcagtctttaattttttaacagcattggccacagtaggaatttaaatgcatgctttctctcaggtgcattataatgtcattgagacatttattcatctttgcatctctcatagtacataaaactggagaggagggcttaatatgtgtagaaagaatgaatagaaaaaatatctaactgtacatgtaagcatagactcactgggtacataaaatataaattaatgtccatagaaatctatattgatatactgatattgatatagatatagatattgatatagatagagatgacttagtactcaagatagtgctgagtgttgatgtaagagatgtataaggcttgaaactctaagccttagtaaaaccatattctaattgtggagagaatatagcaaaatattcatgagcgatagtattaggtggggttaaattttgtgatacagatagtcactactcctgtatttcagagaagaggatgctctctgtaagctggagtggttggggagatctttgaggaggagaaagaatttgagtgagcccttgaatgatcaaacactttttcaggttttaaggtcttcgtagaaatgtcaaacattttcatgtttgtctataggacaattgtcatatctttcattttagttgttaaaaaatagaatggacaaaaaatggtgccagttcaaaatgaatttacatgtatttttaatgcatgttttaaattttgtcttcaaccaagcttaggacacatgtggatttgaaggctcaagaattccaagtaaccaaaagagtataattgtattgtttataacagaaagaaaagataaatgcttgaagtgatggataccccgtctaccctgatgtgattgttatgcattgtatgtctgtatcaaaatatcttgtgtaccccatagatatttactatctactatttacacattaaaataaaaaaaaaattccaaggctccttggtgtggaccatggttctcggaatctgtggagtaggaccttagtaaatacttgtgtgatggtgatggatttctggttaagatttcttgatttttactcttttaccaatttcttaactatgtcgctaaggtttagttagctttttttgttgttgggtagacatgtcctaaaggctttttgtacccgatctcagaagcttgtttttcaactgaattgaaatgtattttcaattcagtaaatgaagtatatrtaaaaaccacaatgactaaaggggcattttaaagaaggttaggggcaggaaaatcaactaaatttgatgactgaaatgttctatttttcaaatgtccataacattatcaggaggggaaaagccagaaaccattgtgattaaaactggtgatatatgagcgtggctttatcgaatatataatatgattatttcatttgtaaagtgctttgcaatgcatgctgagtcaaatgcaatacaaatactaatataatatccagcattgcaaatccagagaaaaatgtattgtgtatcgtcttatgaaatataatttccagtgattctgaatagtttatatagggaacattttttttcttgcttttcatgcttctaattaaatgaccagaataaaacaatcacttgaaaataaattctgaaagattatttcttaacatattttcatatttttgccagcttcgaactcttggattctagctggcatgccagctgatttgtgtgggtcatccagactgtgagttcaggtttttttcagggatgaaaaagtcaagcctcttgctttggctgaagtgtctgagtttatgataatgtaaatattgccttgtttgtcaaaaccaagcctgcatcttggctttcttcaggagacctggaaagagctactacttcttaactcaacaagcatttatttgtttcctacattgtgatcacatatgttttaagcattcttggtaacacaaagagtatttcctggtttcttgccaacttattggtttaaagtcctgcccagtgaagagtgaagatgtgtatttaaatactgcattgtgtgacagaaattccaagagtggtagatgatcaggaaaggagagacaatccatggattctagtaggtgggagagcacaacttgatatggccagtggcaatccaaccccaaagactgtgggcaagctggtggatggagaaatacaatggatggtgctctgaaggatttgggggagtcaaagggaaggggaaaaaatcctccaggcctatccttcacttagctttttatttttaacaaatgaaaaatacatagagcagttgtcatttgttaaagtgtagcagaaagagcgaaacaggccagtggaggcttcatcaagaatgctcattcagaatgatgaatgtggctaaacacacatttgttcgtaaaacttgcagagtggctgagcatcattaagcatgagaaataggtgcagcatgctgagaagagagtggagcaaacagatgttgtgaattttcacaggcatccttcatccaccagtccatcattaatatagttgaaggtgatcctttctttttatttaataagcacaaacaaagtgcatgtgttgtgattctgctgaatgcacttctttttctgaagaagtaagggcgtgcaagaatggggaggatatgtagacacatcagttccctgtgctcccataacatgatatcagccttggggcacagctagtgcagaataccacttttatttttccttttttttttttttcactcatcttgcagtagctctaactgcctcatcactctgtttgctacctagcagattatctggatctgcaggagaatgaaaagctttatggcttttgaccttgctaccttccaattctactccttaggatgcatccgactttcttttttttttttttttttttttttttgagacagagtcttgctctgttgcccaggctggagtgcagtggcacgatctgggctcactgcaagctcttcctcccaggttcgcgccattcttctgcctcagcctcccgagtagctgggactacaggcgcccgccaccgcgcccggctaagtttttgtatttttagtagagacggggtttcaccgtattatccaggatgatcttgatctcctgacctcgtgatccacctgccttggcctcccaaagtgctgggattacaggcgtaagccaccacgcctggccgcattcaacttttataatgacatgctacaacttgtttgctgacatcagctgggtagacactttttttccctattggcagaacttcattgaccctaccctgtatcatccaattctacttctttcccttccttctcttcgtttttacttcttggccctttgctagcatagatcttggcctacatacccttacaggccttccttcacttggaagcacagtccaggcttctcatcttgatccttggacccttgactaccaccaaaaggattgagaaccctctcttttttaacctcatttcccagtttgtgaaatgaagatggtaatgcttcctttccagggttggtctaagtaaaagcattttgtgaactctgaaaagcatcctacaattattatgaatgttgaattgtgatctattaaacaatgagttctcttttgtagagttttcacttagggagttgtcaacatctgcttaaatcctcatggtctgtttgcctagagcttcacatttagtgccagatatgttgggtctgtgaagctgtatctgttttcactgtgtgtgtctgtgtgtgtgtgcacacgagtgagcacgcacgtgtgttgtatgtatctgttcattttcagaccaaactggaggggaaaaaacctacaagaaggcagtgaaactctcatatagagcttgagacaagatattgctttatcttgctattaatgaactatgaagaataacttataattttacagttgcgcctttcttcattcaaaataagcattattgggatcctgaataccctaaggcagaagtgaggaactccgtaataagtcatttcaaaatgcaaactatctactggtaatcataaatttgtttaacttgttacatgtactttttgaccatggcagctgtctgcctatgctttgaattggcatgttgagtttaagtgtgtttgtgtgtgcttttgtttaaagaccaatatctctactgtcatagagacccatctgagttaaaattgccaacattgccagggctttgtgacagtgctcatacatgctgtagctctggggttcatcttcagcagaattcatagaccagagtgccaggcattcactttgaagcaaagagaagtgttattttagctaacattgagcccacattctaaaggcaacatgcttggttcccgaagccttagcaagaggacaagataacatatttacatgttggatgtgttttaatcatctccttccatgggccttctcactctcaagtgcagcacatgtgtccttaaaggccttgagtagctgtggatctcctatggtttattatcgaacttaaatatacctgcagttaggaatgctatgttttgtctgtgtgaatgattgccctcaggaagagcatatgcatgtcgactcaagccagtcctgggagcctgagtcctaccttgtggctgccacccaaaccttgagagccctgctgttccctctggttgcttgggcacttggccaaatgcacaggaaagtggagtatatatgtggagactttgaatggtgtggtttgtcttcccacttgatactagttatgccgtgaagacttacctgtgaatgaggtctggtggtaacttatgttcaagcctggtgatgacagttcagctgctttgagatccaagcaccctgtaggtgatcagtgttatgccaagaggaaaggagggttggctttggcactttttggtaacctgcacgttctaaaagaaaatttctttattggaatgcatagtcatctctgctggtgcctctggagtagtgagtgagtgcttgctccagaactgatcttggtctccatgctgtgatcatcctagttaggacattgtcacagcttagatggctgtagtacaactagccctgggtttggaggcttggagtctcgtttcccctctgtctctgtttcttcattggtagatggagatgatggggctgaactcatcgcttgtttaaagttcctcagttatttagatatccacgtttttctgggtctttctccatgccaggcattgaaatgaaaaccattgaaattttaacattatcaatgaaaactgggtttactctaagtcgggrttggcaaactatggtctgctgcctcttttcatatgcctgcaaggcaaaaatggtttttacattttaaatcatggagaaaaatcagaagaatactttgtgacaagtgaaactgatatgaagttcaaatatgagtgtccataaataaattctgtgcttctcattagtaagctgtgttataagaaattatgctcaatatttattatatttttaattttgtcagtaaaatttatttggcaaaggaatttttttctcttgttagtttctccatagtacccttgattttaccacttggcctagaaagcctgaaatatttactctctggtcctttacagaaagtgtttgctgacctctggtctatgttatttcacagtctcactagatgagtggtttgcaaactgtgggtcatgatccattagtttttggtgaaatcaatttagagggttacaaacagcatcttataaataaatgaaataaaagagaattttaaaagacaggacatatcaaagtgcattgcatgtggtatggcgaatgctgttttatgaagtttttctttcagatgggagcgtgtttgtatgtgtgtacatgctgggtcaccatgtcaaatataacgtgggtcatggcccaaagaggtggaaaagggtggggcatrgtgtctgacacctataatgccagcactttgggaggccaggatgggaggatggcttgagcccaggagctggagtccagtaacacagtgagacccctgtttcttaaaaaaaaaaaaaattacctggggtggtagcatgagcttgtagtcccagctactgggaaggctgaagagggaggattgcttgagccctggaggtcaaggctgcaatgagccatgatggcaccactaccctctaccctgggtaacagagcaagaccttatctctaaaatacgtaagtaaataagtaaatgaagaggtggaaagccacagcactagagcacaagctctttgagggcagaaagcctgtctcattcatttttgtttccttgggcctggcacaatgcctgggaaaaaaataggcttttaagaatgtttgaagagatgaattaatgagttcagggaagaaataaggcatgactattgaacattatggacacagctactaaataatctctgaacatgtcttaatgtgtttagctcaatgcatacggtttcctgaaatgaggaaatgcatttcagagagtgaacaaataatttattttctgtattggaagatggcacctaggaagctgggtttgagttccatcctgaaggatagtcaggtcatgtgttaagtgtggtatagagaagggggacaagcattggcttaggggtcctgagtgccagtgcttgctctaccctgaacttctgggaacttagatgagtttcctgtgtctttcttgccaaattccttcagcccaggcaaagtgagaatgataataatgattatcagacactcagctgtgaagatcagaggagaggatgaggtggagagcactttgaaaagtataaatccgtgtgcaaaggcagtgctcattattatgtcatgttaaaacgtttgtatcagaccctttctgtgggcaagacatgtgcttggcacagtgggaactagaaactcagaccccttaaggtcctcgtggttaaactaatgaatctttaaggttgttatactggtgaaaaggtaaatagcaacacaaaatttaaaataagccaatagaagaggagatgttgtaaggtcatccatgcccttgcaaatgttcagactccccaggctgaggcaaaagctctggggaaaggtgagaaggggaggtggtgccagaggtatgagatagagagtcttgaatagaaaggaaggcccttctcgctgggctgtggtagtggcagcagaaaggagaagcccctgtagatgaaaaagtcccctctcagtgagtgactccctgggctaattgctgcattactctctttgatgggcctgatggtgctgagataacaaaatgaaaaatcaaatgagaaatggaacccaggagtctaaaaagttagtaaattttgacattagaaatataatcaaatttcaccagtgcttttctgtagtgacagccaaatccatccatgtcagagcaatggcctatggtatgtggtttcgtgtggcttttcttccccctttctcttttccttttgcaaaatcagcattaggctatttggaggacaggcgagaactattatgttaaattgtgctacctacaacttaagcttctgtctttgctaaagctgccagtttttataaacaacagaagacagaaagggtttactaagaataatgttgaagcccaaaagaatcctacagcctataaatcttaatagaggttctgagattccagcaggctggatgtgtctcttttacccgggctcactccatcttggctcccccgtgatgactccaattttctcgaaacacaggcacagtgccttgaatttacttgtggcactttttgcctacaaacaggaatacatgcatataacctatgcaaatcaataaaaacatgtcaagaccccttagatcgcactactctcctaaaatgcaatttatcttgctgcaaatgagagtaagggactaggtaacaaatagcgtctgatcatttaactagcacctgttgtcaatgcatttgaaaacggcatttttcatttgacatacagtaaattgcattttcatatatatcgaatagaaaagtgagctgggatgtacatatgaagccctttatgaattttatgaacaatggatattttagagctgtatgtttaaaggggtcacgtcagttgctgcaaatttatttgttccttccagcattggttgtgaacataccatagttttcttatggctggatgttgaagtgtggcaacgctgaaagtataattatatcattcatgttaggtgaaggacaattactataatttttgtataaaattgaatataacttaaatgtgtaaatatgattttttttkgtttttttttacaaaagtttcttgggggaaagctgctttttatacattacatttttcagtcaattcctttgtcggcttaaattatgagccacaggtttttttttaaatgcaatattttgtttgcagacgggtggctgttgcacaaattcaacaacacttaggcttatcagcaacaatggttttcacattagtgagcatggtttggcaatattatttgacatctggaacaagctatattataccagacatatcaagtataactgaatggatcatttaactggcatttgtttcaaaaactcccactccagcttttgcctggctgtcatgatatgccggcaacacatcctgtgtttccctggcttctgtgtccctcattggcatttggcagtctcatgctcccttcccaccttcaggtggacacttagtcatcacgacgatgaggccatattcttgcgtctctttttggagaagtccaggatgccaggtagctgcagagggaaggagctctgtgaccattttagccaggactcaggccatcaattgcaccatcagctcttctcttattttgagtgtttgattatggctcccccctggcacatctacatgttttgtaactatgtcacacagggagatcggctttgttgaayttcctgtaacttggatagagaggagaaaaaacaggaaagggccctctgcgttgcatcctttaataaaagaaccacatgggggcagagagagaagaagctggaagtaagaggaaatggtaatagcagaattttaacacttagtttttctcagtctacctaagattttcctttagcaatttggagtatatagtcacaacttggcagcctagcaccaaagttgtatatcattgctgctattgttttactttgttgctctgcctaaggaattcactccttaggatgttgaagccaggcttatgaagaatctccatggggaaactggtatgaaaatgctaggtacctcctaaataagaagtaatgcatttacttcttgcagaaacgctgttgcttttgttacttatttgtgtgtgtgtttgtgtgtgtgtgtgtgtgtgtgtgtgtgtgtgtgtgtgtgtgtgkatgagcttttctctttaaactaagcaggatataagcagaccccacccagcttagtgagtaaattcataccaaccattcaaaataattaaagggaaagaaggacttgttaagtaaagcaaataatgaacaagtctcaaaaggcaaaagccaaataatgagaaaagtcataggcttaacctcattttcactgcatttggtaaaattgtttttatcaatataaacaatcagaaattgaggcttgaggcagaaaagggatttattatctaactaatgtcactgaaaggaactgctcaaggtggtcatagcactggaaagaaagaagcagccttaattctcctaacattgccgtttagattagttggagacaaattcatttttcattaagtcttttattcattccacaaatatttcatgagcttcaaatgttatgtgcaaagcaccatattaagtgtggagtgtaggcaaagtaaataaataaataataccgaaatgataccaaaaacaaaccccccaccaccaacaaaaaccaaagcagaacaaacccatttataatagcatcaaaaagaatacttaggaataaacttaaccaaggaggtggaaaacttgtacaaaaagtataaaacattgctaaaagaaatcaaaggtaccaataaatggaaagataccctatgtacatagattggaaaatttaatactgttaaaatgtcaatactacccaaaacaatctataaatctatgtaatcttgatcaaaatctcagtggcaattttgcagaaatagaaaaagctattctaaagttcatgtggaatctcaaggaaccctgaatagtccaaacaatcttgaaaaagaagaataaagttggaggcctcatacttcctagtttcgaaatgtattacaaaacaacagtaatcaagatggtgtgctattgacataaagacagacacatagacaattggaaccaaatacagagttcagaaattgaccattgtgtgtatggtcaaatgattttcaaaaagagtgccaagacttcaccatgggtaaaggacagtctcttcaacaaatgatgttggcaaaagtggatamccatatgcaaaagaatacagttgggtcctaacttcatattatatacaaaaatcaattcaacattttatagttttagttattactcttagggtctaaaactataaaactcttagaaggaaacataggaggaaagcttcaatgcagtggattaagcaatgatattggatatgacaccaaatgcacaggcaacaaaaacaaaaatagacaaatggaactacatccaacttaaaaacttcacatcaaaggaacaattaacagaacaaaatggcagcctatgggatgggaggaaatatttgcaaatcatatatatgtagttaaatccagaatatataaagaacttctacaattctataacaaaaagatgacctcattaaaaaatgggtgaaggacatgaatagaagttctccaaagaagatatacaaatggctaacaagcacatgaaaatatcacatgattcaacatcactaatcataaggggaaaatcaaagaaggtaccaataaatggaaagacatcctctaaaagattcatcactaatcataagagaaagaaaataaaaaacatgagctatcaccttatacccatttggatggccagtatcaaaggaatagaaagtaacctgtactgctaaggatatggagaaattggaacccytgtgtactgttggaaggaatgtaaaatgatgcaactgctatgaaaaacagtatagaggttcctcagaaaattaaaagtagaattaccttatgatctagcactctcacttctgtatatatatctgaaagaattcaaagcaagatctggaagggacaatttctcacttatgttcattgcagcattattaacaatagtcagtaggtagaagcagcccaaatgtccatcaatggatgaatggataaagaaaatgtggtatgaaatgttatgcagccttaaaaaagaaggaaatccctgtcacatgctacagcatgaatgaacctctaggcttaattaaatgaaattagccagtcacaaaaggacaaatactgtatgattccacttgtaggaagtaactaaagtagtcaaaatcatagaaacaaagtaaaagttggtgatgatgtagagtatgggttttcttttgggttgtggagtggaggcccattgcttcactgggtgaatgagcagcttttctaccagagcctgctgtttgttcaacaggcctgtaaacatacctctgtgctatgctgagtcctggtactgtgatccagcattgggcacccgggactagtctcttcttttcctgcctccttcttcctgggtattcataggcatctgcctatttacttccaaattccaagggagaattgggctcataaatcttcacaataccccagatgcattacagtgttactcactggcattgttaccttaatgcctctctaattatcttgtgtgcccagaccatagacacttcttagggaggaagagcaagagcagaagaggacagccacacctgcatcactcttctgtgtaagttccatctggcacatcctcttttctctttgggagggaaaagtggctcgttttgcccttagacccattcttgcccatactctgctttgctgtctatcacaggggctgtcatctgtgggggcagttcccaagctccttgaccagccagcttcctattgggtttgaccaatgggaggccctgtcaggagactggaaggtggagcaagtggtaagccagggtatctgtccctgtcttctctgcctctggtagcttctctggcatgggctgatctctgctgtggctccaactcctcctataggacatggcctaccagggcttagttttagttggtgaccctcgtcccagtgtccccattgtctttcagtctgagagtggtaatgccttcttattcttgcttctcctgtgctgtatatccttgctgtaaattcaattcccagcattgcatttcttcttatgtagatacttgaagcagttcctattttctcggtttgaccctaactgatgcagttctgtaggcctttagaaagccctaagtagttctatggaatccacccaagtgtccatcaatgatagactggataaaaaaaaaattgtacatatataccatgaaatactataaagccataaaaaggaatgagatcatgtcctttgaggggacatggatggagctggaagccattatcttcagcaaactaacacaggaacagaaagccaaacaccgcatgttctcacttctaagtgggagccgaacaatgagatcacatagatacagggagggaaacaacatacactggtacctttcgggggtgaggttgcgggagggagagcattaggaaaaatagctaaagcattctgggcttaataactaggtgatgggttgataggtgcagcaaaccaccatggtacacgtttacctatgtaacaaacttgcacatcctgtacatgtaccccaaaatttaaaataaaaatttaaaaaagccctaagtagttctgttgaaaaaaccatttactgaaggaaagcaagattggaaaccaacagtgtcaaatttttacacatggttcagtattagttatagtattagttagttgtctgctgggtctgtagccaaagctgaaagcaattgatgacaatgtgaaggtaaactggttcatgtttgctgagtgtttttttacttgtggtagcatataaattgtgaaatgggatggaaataaatgctggtatcttagactttattttagatcattatgatgataaacatggtgttttcatattatagaaacttctatcatcataactcagcatggatagtctatccagtttaataagactgtatttattatatgagcaccttgatggtctggcatcaggccagacataaactagaaagagagcccagtataagctgaaaagcggtctctcaattgggaataaaaagattaaaaactgcagattacatttagtctgtaaccattttttcattttatttgagatttttaaaaagtatagtagggctattgtgaaaattgtaaatgatggagtcttttattttaggagtctttcattcctttttggtgtatgctggaggtgccccaacaagctgtcaaatccactattagcttcaagagttgggcattcccactcaaacttagtgttaaaaacattattttctttcttctcagtttttaagctcccaagaattactgggtgggtaagaatctagtgtttttctgttgctcatataacaccatctgggtttccaagaggtacactttggcctgagagaatggctgttgagtggtatagaaaacatcaaagtcaaaacagtaacatattaaaaaatattggttcatctaatacacagggtttgggggttagaagctaagatcactcggttcggttcctgccatcttggagtttataatctactggaaaatgcagacaatcaggatggtaactgtgaagtttcggggccttgggagcagaggaaaggttgtctggacagatctggaagctgaaacttgaaagacaagaggaattcatttgacaggagttgaaacagtagtgttctgggcagaggctaccagagtatgcagaggtttgaaggcatgaacaatgagagaacatattgtctcatgagaaatgacacagaaatattttaaagttgggtctttctaaaagtaaaataacagctttaaaaaaaattgtttttttaaccccgcctggaagaggatcattttggtggttgttgttgttcaacatgattgaatatgattgggtattattacttgctgatgggacttaattttctcttgtttaaatgtgatccattatcttgtgtctagaacatattaaaatgacttcaaaatgagaaacaagggaaccttggttacttcagcacaaacatccttgtttattgagctgacatgaagggtgctgggatattttaatattacgataatatagatgcttaaatctcagggttaaagaactagattagtcctctgtgatgctgggctactcagaccataaaggtaactcrgtgtttactgttatgtttttctattcttatcctgttgtgtcttgcctcctggcttctctctttttctttttttcctcttctttccttccaactcaaaactcatcaacttgcaatacccctgataaaactcatttatactgcttaccaaattttctggcttcagccagctgttcagttttttttattgtggaaggccccaaactcttctcactacttgttctgaagataaattagcgacttctaaataatgcagtgaaccctaattctctttgattagtagcaagttagatgatagtgacccattgaaattggccatcagcataaataatgagtgaatgaactgataaaatgcaaagtcactggccatcataaatcaaatgaaatccactttctctggaagtcactgaaattagaagtccatgctcctattaattattttgccttctgaagacgacagtgttataaatcagccttgaaaggcccttcacttagaaagctgaaggagtacggctgcctgcaaattgctttgtgtacgcacctaattgtttcttaagtaattcacctttgtagcattgcttcaggaaacgaagaaggtcccttcggttgagatccatgacttgtagccttaggaatggccttgagaaggctctctggaaggtccaaattggagtgggcaattccccacccccttctctagaacagatatcctcatgttctttgtcttacaactcagaccccatcaggtgggctggcatttttggagtggtttgctatggcaggatccaaaaaaaggctggcagtaggccctgagccatttcatcatcttgtctcaacttaacttccagccaggcctaagaagccaagcttcactagaattcagtgaaaaccaagattttaaaagttgagaaaaaacagagattgaaaactctgacttctgaggttcattgtaaagagttgttgtaatctgcatatattaggtatgaagtgacacataatttttggtaaaaggtgggtgggaaattatattcatttaggagcctattttgcaacagatattttaaaaaacaacactttttggaaaagaggttaattggatggtaggaaatgttgtaaattagtttcatttaggaccattacctgtcatttaaagttctgaatttgagactgctgattaaaaaaaagcaaaacaacaacaacaacaaaaaaaaaacaacaaaaaartagtaatctcttgggtgtggtctcaaaaatttggtccagctttgagatgtgatcctggattgttagcaaatctattcagagctgacaaggaaattctctgttgcctattgagtgtgggtgacttttgctggcctctgtagagagatggatgggcaggcttgtggaggtgaagacagacatcagtaggcggtagctcctgagacttccagctgctagttaagtatatgatgagtgttcaaaactagctttagtataggctccatagatgggggttgtattagtccgttctcatgctgctcatgctaagtaatttataaaggaaagaggattaattaactcacagttctacatagctggagagacctcaggaaacttacaatcatgtcaaaaggggaaccaaacacattcttctttatgtggcatcaagagagagaaatgctgagcaaagggggaaaagccccttataaaaccatcagatctcatgagaacttagtcactgtcatgaaaatagcatgagggaaactgccctcatgattcgattacctcctactgggtccctcccacgacacatggggattatgggaactacagtacaagctgagatttggatggggacacagccaaaccatatcagaagtggaatgaagatagggtttttaaggaaaactcattcttacttttctcattttctaaacttcctatcatctgctgcaggcctgcccaattcccctagtggccagtacagtaaatgtacatcctggccttggaaaatgaaaatgatctcctggattgtaagaagcacattctcttacttctttgtgttgtgataatcagagtgtcctggcatgttctaaagcatccacctaaagaagaggggtgtgtgtgtgtgtgtgtgtgtgtgtgtgtggtcacatgcacacacagtcatctgcacagctgaaagaacaatctgctttcaagtgartggtgcaaattctcatgtgtgagtgtgttctggtgttggggttagttgctgctaaatcatttgtgcatctgaataacccattctcaaaactaaacttaatgatgtataattgagcattatgtcatgaagtagaaaggagcaattgttccctgagatattgaataccaaatgcaaagatgttctgggctgtgtccttgaaaccagccgactctgtgatttcacagtgattccatgaggcattctacaccttcaggatgagaggacatcttaatcctctggacatccccagaactgcctatcccagctactgggcctccccaactcttattagattcctacccatagtagtagaattctgcttgttgttggagaaggttggtggaagaaaatgcagctaatggtctttctgccttgcttctggaagtccaggagggccctgccagtggtctgtgctgcaggacagagtgaggcatctgtgggcattccttgcctggsagctgatattgtgtgtctctgttggtcctcattcatctagcttgcgttttagagttgtggttatgtaatgggggcgtgtaataaagatttgttgattgttggacatgctgtgggagtgcaggaggagctcatgcgaatgagtggctctagtatttttggatttgtttctgaggtttgtacaggataggcaaagtctcgaccatctataagactgtcctcctggcatgygtcatttattgctcaaggtttctggattttagaacatccttctttgcttgggtgatattcccctgtgtggtatataatcaagtaaccatatgtcctggtttccctgggatagtctcaatttatgcctatttttctagtatgattattaatattggccaccccccatgccttttactctcaaaatatccagatttggatggccactttctatataatactgaaaaggaatgtttatatttgttgtcctagtaccatagaaacagtggcatattgaaataatcaaggctttggaaaaatgaccaatttatttatttatttatttatttatgttttaattatactttaagttttagggtacacgtgcacaatgtgcaggttagttacatatgtatacatgtgccatgttggtgtgctgcacccattaactcgtcacttaacattaagtatatctcctaatgctatccctccccactccccccaccccacaacaggccccagtgtgtgatgttccctttcctgtgtcctgtgttctcattgttcaattcccacctatgagcgagaacatgcagtgtttgatttttcgttcttgtgatagtttgctgagaatgatggtttccagcttcatccatgtccctaaaaaggacatgaactcatcattttttatggctgcatagtattccatggagtatatgtgccacattttcttaatccagtctatcattgttggacatttgggttgcttccaagtctttgctattgtgaatagtgctgcaataaacatacgtgtgcatgtgtctttatagcagcatgatttctaatcctttgggtatatacccagtaatgggatggctgggtcaaatggtatttctagttctagatccctgaggaatcgccagactgacttccacaagggttgaactagtttacagtcccaccaacagtgtaaaagtgttcctatttctccacatcctctccagcacctgttgtttcctgactttttaatgatcgacattcgaactggtgtgagatggtatctcattgtggttttgatttgcatttctctgatggccagtgatgatgagcattttttcatgtgtctgttggctgcataaatgtcttcttttgagaagtgtctgttcatatccttcgcccactttttgatggggttgtttttttcttgtaaatttgttggagttcattgtagatcctgggtattagccctttgtcagatgagtagattgcagaaattttctcccattctgtaggctgcctgttcactctgatggtagttccttttgctgcgcagaagctcttgagtttaattagatcccatctgtcaattttggcttttgtttccattgcttttggtgttttagacatgaagtccttggccatgcctctgtcctgaatggtattgcctaggttttcttctagggtttttatggttttaagtctaacatttaagtctttaatccatcttgaattaatttttgtataaggtgtaaggaagggatctagtttcagctttctacatatggctagccagttttcccagcaccatttattaaatatggaatcgtttccccattccttgtttttgtcaggcttgtcaaagatcagatggttgtagatatgckgcattatttctgagggctctgttctgttccattggcctatatctctgttttggtgccagtaccatgctgttttggttactgtagccttgtagtatagtttgaagtcaggtagtgtgatgcctccagctttgttcttttggcttaggattgacttggcaatgcaggctcttttttggttccatatgaacttttaaggagttttttccaattctgtgaagcaagtcattggtagcttgatggggatggcattgaatctataaattaccttgggcagtatggccattttcatgatattgattcttcctacccatgagcatggaatgttcttccatttgtttgtatcctcttttatttcattgagcagtggtttgtagttctccttgaagaggtccttcatgtccgttgtaagttggattcctaggtattttattttctttgaagcaattgtgaatgggagttcactcatgatttggttctctggcagagacacaacaaaaaaagagaattttagaccaatatccctgatgaacattgatgcaaaaatcctcaataaaatactggcaaactgaatccagcagcacatcaaaaagtttgtccaccatgatcaagtgggcttcatccctgggatgcaaggctggttcaacatatgcaaatcaataaacagaatccagcatataaacagaagcaatgacaaacaccatatgattatccaatagatgcagaaaaggcctttgacaaaattcaacaatgcttcatgctaaaaactctcaataaattaggtattgatgggacatatctcaaaataattagaggtgtctatgacaaacccacagccaatatcatactgaatgggcaaaaactggaagcattccccttgaaaactggcacaagacagggatgccctctctcactactcctattcaacatagtgttggaagttctggccagggcaatcaggcaggagaaggaaataaagggtattcaattaggaaaagaggaagtcaaattgtccctgtttgcagatgacatgattgtatatttagaaaaccccattgtctcagcccaaaatctccttaagctgataggcaacttcagcaaagtctcaggatacaaaatcaatgtgcaaaaatcacaagcattcttatacaccaataacagacaaaaatgagcgatttaaacttactccctggcatgtgacctctggcaagttagcttctctgagcctctgtttctttatccaataaatggggatcgatcattgcacatccctcacagatttgtgctgaggattaaataacagggaaaagtcccagcagattgttgggcacataggtaggtagaggataaacatttgttcttttcctcagaatatgccaagaaacttggcgggttgggggccagaggctttggcatgtttccgaacytccyttcmagttgatgcaggcagttcagtcagcatcaggtgtcacaaaaagagagagaaaaatcatcctctcaccacctggtgtgggtgagagaaggtcctctttgagggaaaacctctccccctaaggctcttggaatgccccatgtaaagagatgcaaaaagatatccccagaagagtgagaagctgaatttgctgtttgctcaaacaaaggattgattcagcatttctagcaaaaggagcaggaggcttgccagagggccaataaataactttgcctttcacatgtaatataatggtgaaagtaatctattggtttgggagcctctatctcttcatctgcgaaatggggatagagatcatagaattaaaggaggccataaagataaagcagtgttgcaaactgtagatgcagggcaaatcatgtttttcttgtttatacagaagtaaagcaccaaatgagctgaacactatcctggggtaaaatgaccacatgaagcaatacacataagatgcacaggtctttcagacgatcttcattcatacgcttgctgtctttcgctaatgctgcaggagggcacacacagttctgttttactggccctacagggattgctgattttaagcaagttgtgtagtttcatggagattactattcctgttcacatttttaattagaaagagaaaaaggatttatttttctcagggcctccagcccagatggctcaaagtctatggaagaagggtcccgagtgcaggtggccaggcctggttgtctgctgtgatgctggctttatgtgacctttctggctgcctaggtggggcacagattctgaggcccccccgtaccagcccaccagcagtgccctggcccctctgtctactcagtagaagcaggtaccacatggggaccctgtatcaccgcagtaagtggcagtatgcagctcatgctaggcccggtgaaaagatgctgatagcttgcaggagcccttggaaggacaagctaaaatatatccatatgtgctcatgtctgctccttctggtacctgtcgcacccttcccttccccatcttctcttcttccccctctccactaattatcacagtacagcctaacaatgcataaggctctccacccaaactaggtgggactctgtgctgcatttatttagctaatacttcacatagcacttaatgtgtgctgagtaacagcagcattcccttgaccaagtcacatgccattgagagtgggagaggctgggattagagcttagccagctgatgccacagtccttgctctacattgtttttacttcccatccccctcctttctaatggctacctttccattcatctggtttgcttgttgtttgttctataaatttctgaaaatactatgaactcttaattggagaatgcttgaagggaaggttgccctgccatgtctttttatgcattgaaaattaaattttaactacacaggtattctccatactaactgctgaggctcagttctttttggctgctcctctacccctaatctcttccccagaagagataaccacattaggaatttgctacattgacttctgcttcttctgtgaatttatatccctctctgccacaggcacgtttatttatgcatgctaaagaaagtatagtgctgtatacattcagcagcttgctgtttacacccaaaggtatgtcttagctatcttttcatgtcaatacatgtaaatatacttgcactttttgacttgtgtgcaatattccatagtgtggctatgccaaagtttatttgatccttagctttctaatgggcattttgggtgttggtcatttttggtgtcacataagtaatgaatggccttattatgggccttttgtgcatatgtacaggtgtttctcttgagtatgttctaagagatggaattgcttaatcatagggtttgcacattttaaatggtactggatgctgtmagtttggcccctgtggtgatttttatcagtactcacccctcccrgtgatttatggaaagtattatttgaccagctgccctgcccacatttggtattagcatgctttcaaaatgtttgcagtctcttgggtatgacatggtacatctcactgccatttacaattttcattttcctgccaaatttgaaaaataatttcacatatgtattgtcttttttgttgtgaattgcccatgtatattattggttcatgtttctgttggcttgcatgacttttagttattggtttctaggacatctttatatattcagggcatacacacacacacacamacacacacacacacacacacacacacacatacatctggcctcgatgcctcatacattgcaattattttcttctaatttgttgccattcagctttatggtaccctttttatatataggttttaaattttgatgctgtcaaataaacaggtcttctctgttatgctatttatgtctaatttaaggccttcctgaccttttggctgtaaacatattctcctgtatttcttctaaaactttgattattctaattttaccttttaggccttgatccattgaatttttttcccttggtgaatggttttatgttaacgttgatgttaaaattaatatatttttccccaaatggatacattcgacccaacaccatttgtttttaggtcattttgctaagtattttgaaatactgtttttgttacatataaaatttctaattatacagaaaaccagactctctattctgttccgttgatctatttgtctatctgtttgctattagaagtattaaaaatagtgtctaaactggctaagagtatttcacaaaatttatgagaggagcccaagaggtcgccttgtgcaagaggtcaccttgctctttgctggctgttggcttcaactgaacagtaatctctagagcctgaggactaygctcgattcctgtgttcttggaaagctagatcattatgatgtttctggttttttttttttttttttttttttgagacaagtgtcttgctcttttacccaggctggagtgcagtggcgcgatctctgctcactgcaacctctgcctcccaggttcaagtgattctcctgcctcagcctcctgagtatccgggattaaaggtttgcaccagcatgactggctaatttttgtatttttggtagagacagggtttcaccattttggccagactggtcttgaactcctggcctcaagtgatctgtccgcctcggcctcccaaagtgccggggttacaagcatgagccaccacacctggcacattatgatgtttctaactcatgctttgaagcccaatgttgcttgtgtgatacattttattactaacaaacattggaacgcttctcataggctttgaggcatgtgagtcaaagtgatggtgacagggtgtccatcagaagatacaggttctaattttaattctgccctwagttctgtggccacagattacttaccctgcctgttatacactggggaagaactcggattgagtagacctagcatcctggcttgcacctgccacttattgaacatggggtttggggcaagtatttaatttctctatctcatctgctaataaagatattattgacctctcaggatggttctaagagatttttatagaaataaggttataagatagcattttgttaactgtcaggtaccctggaaactggaactatatactaatgtgtacaagcttcattttcattttggtccaatgacgataataaatctttgtctcacctgcctcagatagctgttccaatcatcaaatgggatgtgctttgataaaattgaaatgtcatacaaattatttattgctgatgaataccaacaggtggattggaatcagcaaatattaaccaagcccatggggttattacagtgaagcagggtcatattagctgggtatcctcaggggagaattgttggagcgtgatttatccatttataggggtcctttttactcacttgggtgaaaaaaggtgtaaagttggtcctttgaaagactcaaatggtctgttaagtgtgaataatgggagaacaagtgctgtatggagttcttctgttacaagagtcaagaggcagagtgggactggctgcagtattccttgtgttatcactggctatgtctagagtttttcaaattaaaaaaggaagttttattttttatttgtttataaattgtgaaatgcttctctttttctctttccctacttacctaaatgtaagaacactaggtcattgaatattaaagtgaaagactagaacaagaaaaaaaaagatagtttcttgggatttactattataatggcaacagtctttatccctctagagggaaggtgctagttatggtggattcttactgtggtggcccccaatgaaccacacttcctagtagttcccttttatatctagttcccttttatggtgactctggacttggcaaatgggacattagcatgtgggatgcaagcacaatcttagtaaatgcttgcacattggagctggtcttcttggaatgcttgctcttagaatccacctgccaggtaaagaagctctacctagccaatgtggagagaaagagctcacagcctccagctatccccmccaagattcttgagatataagtgaagccatcttggacgttccaattcatgccactatctgacaacaaatacatgaggggcctcaartgagaccagtagaagaactgagcccctatcaacctacagaattatgggcaggtaaaatagtggttgtttaaatccactacatttgttatatagcaatagataatcaaaaccttgggttcacacacacacacacacacacacacacacacacacacacgcacttaagtcagtttaatgtttgagcatgaaatgatttttcatatctgagaagttggtgtttttggacttgggttcaggctactttatcaggaratacttttatttacttcctaaatttagttcagactcaagatggagcattgcatttggggtatgtccatttcattaagaaaaaggtagtgaaagaactacctgttttcccattagggcacagtcccttcccattaggtcccctcaatccagaagaggccatgaggggaggtgactgagaaaggatgtttatttctgcagcttgcatgcatggagaacctggaagaatttataaatccatcatttcaagtcattaggcgatatgttggtcagtccaggagactctgttctcattaattcaggggagatttacttgtgtcaccctcattagtatttatgggatttatccacatcaatcggtagtgcattaacagggaaataactaaacctcctagggtttgttggcgctaataaaatgagctggaagttccagaaatcaccatgatcagaagtattctaaatcagggctgtaattgatcctttcaaagtaccctcaggatgtttttctgttcgcttcacttccartggcatttgcatattagcatggtgtctacagccttagagggcagtccatttcttaccatgaaacgatgtgggagaacccaatggagtgttgaaaattcatcgtcasaccagggcatctatgtaaacaaagggttaattttcttataattctttttgtttggtcctggcttataaaaaaaaaagccctgcatgtaaatatatcttttatgtattctgaacataaagatagctctgtcctaccatattgatttattagattctctgacattttagttgtggtcgttatgttatatttatgagatgaatgttggattccctcattatgttatcctcatttattttacatacttttatggctggttgtgcatcgctttacagttaaagctttattgcagctgttagcgttggggggaggggaaggcaagtagttattgatcggaatttacatgtttactgttgtaatcatgatttatttaatctgtctgcacatataagcccactctctgaaatcaaaaatatatactgtatctatattttagatggtggagcattcattggcaccctcatgccctttggagtagagaatttggggatgatctggtgttctgtggatgagcacttttcttacagcttggtggtaaatggtgcagactttggagccacactacctggactcaggtcctagctgtactgcctaccggctgtgtggcctaggtcaaggtatttaccgctctgtgcttcagtttcctcacctgtaaaatggggatgatatttatacaacctcataaagttgttgtgagaagacaaccttggtaaaatgaacaacattggtaaatgcttagaatgctggacactggaaattatgaaatgctagttattacaactccaatgagtaggtggcgagctaggtagagagggaaggctcagctactttcagatgggaaacttgactttagttttaattcagcagagcaaggacacttagaatgtgcttgggtatcctctagacaagaaaagacttcattgagagctgaagaatagtcccgaaaattgatttttcccatatattattttttaatgtttttaaattttgggcctgccattagctagcttctaaggatttgaagctttgcctcagtcttctcatctatcatgtgggtttaatgttacttctctgcagcatgagatagtagtgatgtgaacagtgaactagaagtcaatagacaacttacagcctcaggcctgctactgcataaccttactaccttggcagaagacttaacttttaacggggcaaggtctctgtctactctttaaggttatcttgagaaccggatgagataatatttgcagtgttattttgaatactctaaaactctatagtaaatgttagggaacttctaataataccacctaacaaagttattgcaaagacgagatgatataatagatatgaaaagactgaaggaagcaggatgtgctctatgaacctatgggatgtgctctatgaacctatgggacatgatgcaggttcagccctttaacctcctgttcccctgagtgtgagtcctaacccttcccaagacacagaggcctaggggaacctcaggctccctggattcttatttccaaggagttttaccctttcattcaacccatgtggcattaatatggtttataatatactatttgaccacatccttaggaaaaaaataaggccttcccttgtaatttccttattgtttgtttattgggtgcaagactgtgttttatctccatcatttaatggaagctacactttctgctctaatgttagtaactcaacatttgctttttacaatttacaatttggcagtgattctttgaaataatttacttttatcatcttgcttcagattttcaaagaataatccatctagcaaaacagttttatcctttctatatattcatttttgttttgaggctctttagcagaattaatgatttttaatcaaatttctaggccactcatcataattaggtttagaattatgaattatgtacagcttgccattatatcatacctccttgtggtaggtgagtgaattagagatcatcacaggatttccagagcctttcagaatgatttatgacataaaaaaatcttcaattttttcttccttgtttaaaatgtctctagaaaaatctgttttttttctgcctctttcttttaccctctacctgaaagtactgttgcttgtcagttttccctccaaatcatttggcctctgaaaaattttgcatagctaagttttaaatgaattaatcaaaattgaatctcaaaaacatgctgggtgaaataagtcatacacaagagtatttactgtatgattccatttacatgacactctagaactaatctggggtgatagaaagcagaataatagtttgttctggagagagccacaggataactttgtgggacagtggcaagttagaaatgttctagatctgaatggaggtagttctatgggtatatgcacttgtcaaaactgatcacgttgtatacttaagatctgtgcatttcattatgcaagtatatctcaataaaaaatatgaaaaaattaatcatgactcactggttctttacatatattattttagacacacttctatggtgattaaaatctatggaattcttgaggtgatatgatgtgttttccttgtatatttttagccagaatttaaagaaaaggatgttatcttaccataccagttcttctgaatcactggaggtttagaaaaaatttgtttgtcagctctgttgtccaatgatattcaagtgagtacctgccatctgggttagcttttataggaagccattactcattctaaaaatgttcccttctcctgccatttgacttatatggaggaataatttcttggctaattttttttttgctttatacttctgaaatacaaattcactttttctaatgaatcattatcatgtactaccatcaaaggttattcactgaaagctgaagaaaaaagcaatgaaaactaattttgattgttaatggaaatgtatttttagtcctaaagagcttccctcagcaataattatagttatgcctcttgggtgtttttggacttttaaatttacgtctagtagctctttttcatttagtagttaatcttttaacagagctctgcaaatttgttctttagtctggcgttagaaaaggattgacagagattttatttcttctcttctattcaattttttcccctcctcatcgtgctggcagcccaggctactccccttattgggcaaccctggaccctgtgactagtcatatgggcagtgagggatcaggatggaaaggctagagagggagattttgcttttctgcagccagtggccacccatggctctgtgagccacctctgctccacacagcacagaattgtggcacagcaagtgggctcatcaaaggtgtttgtgggagatgggcaacactcagctttgtggcctacaactctggaatacacactcagcctgtaaggggactggctggctgctgcctttccctggmttcagacatccaagtacctgtaggcatgtggggagcttgcaaacaacaagatgtaaagctttggtagcaatgaagattgcttgttggttttgctgcttctttgctgatttcagagagaggcatgggcagctgagagggcatgagaagcgaaggggttctggcaggaagtttgctcaggttttgccctcttattaagaaacagagtacgtcaattaacctggccaacctgattagagaaagtgcaagccactgctgaggatcttgtttctggtgaaaattgacctcacccaggaacggccagacatttgggtatttgcaaagcastgctgaacattaaggaacagttaaaattaatcctgtgtactgcagctcctgagaaagccagcccacatgtcaataaatctagatctgtttgaagctaacgtcactaaatcttcgtcttgactgtttgctggtcgtgtcaagagctgcctgggaagatgaatttgaggggaggatgaaaaaggaactgtattaaactgcagctctgataagtttagttaagaggcaggagatgtgtccttgccatgacattcagtggctgatatttgtttccctttaaataatatgctgtacatctgtgagaatgatggtttggggctggtgacattgcatctccaccaaggttactgccgtctggacaggcagtctctctcctttctttctctatcctgcaccctgtcaataaatatcctcttgtctgagcaagtgagatacagatttttattttttttttgagacggagtctcactctgttgccagactggagtgcagtggtgcaatctcagctcactgcaacctccgcctcctaggttcaagcgattctcctgcctcagcctcctgagtagctgggattacaggcacccgccaccacgcctggctaatttttgtatttttagtagagacagggtttcaccatgttagccagggtggtcgcgatctcttgaccttgtgatctgcccgcctcggcctcccaaagtgctgggattacaggcatgagccaccgcacccagccatgatacagattttacagctaacaccagagcgtcttcatttctagaagcaatgaggttcaacccatgtagacacagtagggaagggtgaggggttagagagaaattaaagtgactggaggaagctgttttggttgtgaaactgtcaaaggaaccccaaagcacccagtgggaaggtactgacactttaagaatttatccctaaaaaccccatttttacaagcaagatatatgaaatctggggactcaggatttagggttctgttttctcctgtgattcccctttctaggtgctttggtccttgctgtgatttgcagacctatgatctttggaagcagtcagcaaactttctctgtaaagggccaaatagtagctatttttggctttgggtccatatagtctctgttgcaactattcaagtctgctgtagtgtaaatgcagtcacagtccattgtaaatgaatgggcatgtctgtgttatggacaccaaaatttgaatttcatataattccccaggtcacaaaatattattcctcttttgattttttttaaccatttaaaaatataaaaactatccttagcttgcaggctgtacaaattagatggtgggctagattgggcccatgagctttagtttgcttacctctggtctatgatttgctctgtcttgttattttccttttgtcattgtgaggtgttggctgtcgtcttggtaggaggatgaggacaccctaaagattaagttcatggcctattcaacaaggagacagagtggatgggaatgaagacaatgctgggctctgaggcagacagtccaggttcccacaccaatcccccattaacacttcctagctgtgtaacctcaggttggtcacttaacctctctgagctcctgtttcctttttctttttatgaaatgggggtaattatattttcactgtctgtattacatgactatactatagcccaagtagtcaagagataggagaatgcctagtaaacgttgtcattatatgaatgtaaggctttgggattatttgcactgcttcaccaatgcagactcttattaactctgattgttactagtattaaagcattatgtcttttgtatttcagctacaaaaacagaatcagaatttgaatggtgtaaagaaaagatactcttgttttttcactttcttagactctgatgttggctgggcattcctgagcctctcccgcttgtttagcgatttctcccagtgtgtccagatgcttggtgtaactgaagggatcacatgcagtttgtgctgtcccactgctcagaaagccccgccctcctctctctctccatcctggctcaccttcaaggcctggctgaagtgccgtctcacccaggatttctccaccagggtccttaacacatgcagctccgtcctgtgtgaatggcttgaccccacccctggcacacaccttatagaaaggacatcctgtcctcccaaagatgtacaggttttaagaaaaagggtaaaggcaaataatggaggtcacaggtaaggcaagcaggatgtcttctggccaagttgagtgcccctgaaatcactgaatgttgcccaatgggagaaggattcagatatgaagggatgggggtctagagaacttgttttctgtgacagtgttccatctatgtcatctgttacacttctagaacattttcacatccactagctctttgatcctataacaagtctttgaggcacagggaacattttaatccccatttgaccctgaggaacagaggcccagagaagctaatttacctgtctttgcatcatacagatggttaataatgaagttgagactggagcctagttctggttaccatgctgcaccccatggccaaccccagcctgatacaggcccatattgctgccatatgtgatattccgtcttgagggtgagggcacatttctatatggatatatcaaactagctgtctttgagtatgttagctcgtcttatctttccatcccagaatgcatttgtggagcaggtttttgagcaagagagcctgttatcacgtattttcagcttcttctattccggtcatacctgcattatgtaaatatgtatacacagagtgtttgcttatttattcggtctgtggtgggaaaaccaagtgcattactgattcctgggctgtgcttttcagcctaaacactttctgcagctcctcattgctcacttaatgaagtgtgaactcttcaggttggcttttaggttctccgtaatctggttcctgcctgtcttccccatctccccttccatctcaggggaagccatctgcctcttcttgatccaggctcgcttttctgtcctgtctcctctgtcatctagaactttgatccaccactcctctttttcatgtgtcttcaactctccctctccaaagataatttcctgtgaatctgtcatactctatgtgctttctctactcttaaacacatccttgatcctaactgtcccttacactattgtcctctcccctcttgctgcttcgtttatatgaaccagcctttctcacctggggctgtgggtgataactaagctctgatgtcctaaggaagggacaaactgtcacctgaaagccacatgtggccaccatctttttttgtagggcttgtgggctaagaatggtttatatattttttgaaggttgaaaaaaaataattcttgacatatgaaaaatagataaaattcatatttcagtgtccacaaataaagttttattggaacacagctgggcccattcattttggtattgcctgtgactgctttggcactacagaagcaaagtgtagtagttgctgcagagaccagatggctctttgtagaaaaaggcattgattgtgtataatgaattgatttctctgcatttagaaacatatgtgttatgtacgacatttgggagaattaagaagtgagtcacaggaatcacattctgtgattcagatgaggaaaccccattgcaaaagactgactctctcccttattccttagacctttgttgtccggattctggaacaagcccttctctactggaatatgtcctttggagctctcccatgacttctcagtcaccgcatctggtgggcgcttctaggtcttatcattccatcctctctgcagcacctcccactgttgaccagcttctacttctgaaattctctgttctgtctgcttagaccttgtgatctctccttgctgtctcatcctttgtctactctccccattcactgtttctttgtgtctcatctttagcaaactcccccctttcttgtagagtgcttgtagcaaaattgtgatatttatccctgtctccatgccgatgatttccagttcactgtctccccagctctgtcccactttccggggcatcatcttctctttgctgctcttctcgtgttcacttctctttggtccctcacacccctttgttctctgttgtcataagatttagaatctcagttatctgtgatgtatctcctcaactccaaatagtttatcagttgcttaatctgtgaggatattttcagcatccattcccatctccctagtccgaccactccttcagctctttcttatctttctctttcccaggctagccaatgaccatttcccctagctgttccccttcttccctgctgtgcagtcaggctgccacctgactctagcagacactttaggggcccccattacatctccttggctcacctctggtttcagtgacagctcccatgcagagtttcgcatgggcttagtttcctgctgatggtgtctcacaagttactgcaagagtctgtcttctttctgccccaggaccttcccaggagccaaatgagcctgtgcataagttcagtgtagcctgcaagtgcaattgagccagtgcctccatcaggggtaacctgcaactgatgggggactaaagctgatggattgctgcccagcctcttacctttcatgcaggcagctctgggaggcctccgtatgcttcttgggcctactggaggaggagtcatgcccattgccaagagcagcaaccttgataatgcaccctgatgttggattttcctcctcccctccctttcctgctctcttgggtcatctcccaaataagcttcctgcccccgtgtcctctcaggctccactttcagtagcattcaaaccaagacacagaccagtcttctaaaagcttctgcccagacatcttcagtggcttcacaagctccccaatatcggactgattgtgttttaaaatcctaggctccctgggtttgtttgatatcagcttatcttactaattttatcttcccctrctcacctttacccttygttttcatcaaaccaggttccttaagggcagagattgtgtcttattcatctttgtttctccatttgctcartatccaagatctgaggaaactgaaggcaaatgtatatttttagtgagcaaattaatgaatgagtgaattgaatgtattcatcttcacatgtgcatccattgaggcattcctcctcctcattgcttagtagtgatcttcacctccactaacttgacaaagcaccccatctctaccactgtacggtacttttaaatttctactttatgtttttttacgtgtcttracttctaatatataaattccttgagagaagcgatgttgctttattttctttatatttccccacagatcttatgggtacatggttccttaataaatgttggttgaaagactgagagaacatctcattatgtttccagacattctggggccttctgattcgttctattctctctctctctctttttttttttaatttttgagacgatggaatctcgctctgtagcccaggctggagtgcagtggtatgatcttggctcactgcaacctccatctcctgggttcaagcgattctcctgcctcagcctcccgcgtagctgggactacagttgtgtgccaccatgcctggttaatttttttgtatttttagtagagatggggtttcactatgttggccagggtggtctcaaactcctgacctcgtgatccgcctgcctcaacctcccaaagtggtgggattacaggtgtgagccactgtgcctggctgatttgttctattctctgttctccaaacatgttacatgttttctcgttcccatgaattgaagctatttatttctcctttgctttttatacatgcttcttacagtatttgcctgtttacctataaaaattctattcttccttcaagtccaagcttaaatgccatctttttcatraagcttttcccaatccaccctgttaaatcatcacctcttctgcaacacacgcctgttatacatttgtattattctgctttatgtagcataattttatgtggcttgtcttctctccttcttagagacaataagtgtattcagggcaaggctggttatgtcctcattgaatccagtaccttgctcaatgccctgcaatcaataaatatctgttggaatgaattaatttgaataggttaaataatataatcatgcttttgcatgcacatcaccttaactggtgcccctgacctatttttggtgcatgtccttgagtttcattttggtaatggaagaaatatcaagcagaagaaaagataaatasccagagctggtcaacatgatctactgtgtttgaacaggaatattggaacataacttctaagaatgccatttcaattatttgtaaaatatttaaatagtataatccaatttacattctatcatttctaacagctgtaaaatttactttacaccaaagttagctcaatcactttaattcagtctggaaaaacagtacaaatgaaagcttaatttgtatttaatctcctcttttgtttctacattattgccttcgaatcattccttttagtgattgagatttaaaccagagagaggaaaaaagcttgatgaaatatttgagaagaatataagccataatgaaaagtatgaagtcaatgttttaaaattccaactggctttgttctttggggtttcaattcatggcaatgtttttgtggtaaacctgaggtatgagatatgtgggttactttgtcagaatcacagggctataactctcaggtatttaaaactaggtgattcatttggagcaggttacatttatactctgtatatgaagattggcagggaatacaaaagtgcataattattatttagtgtgttgatcatactcgtatatttccaaatggctttrtgatcatttggttagtttttctctctaagctctggcagtcttccagctaatgtcatcagcggggaacagcagcaaggagaggtggcagaattgtgactacctatggctttcctgtcactgtatagtatcaggtctgatgtggggttgggtggaggaagattccaggtaagggtagaatggccaaatgatgtgctacttcttaggatgaaacagccttctcttatttctctgttttccaggtggtggcatttatagaagtgttccagaggyccacacctgtccttacctgagcccttcttcttcatccctatacttaccacatcccaccctcacccccagcaaacctctttgaactcaagaggtggtagattgaaagargcttcaatgaagggtacatatgccttagacttaattctgatcaataaatgtaagttaattaagtaaaagtcgggggaaagaaggggcttcaagctcatttatagccaagaagagttagagaagaccatagcattttacactttagaaagatgatttcagaagaagggatatgatgtgatgggccaagagtctaaaatgaaaaatagctaaagaggaattttcaacagtgccatcacattctcagaaaagaagaaaagggccaggcatctagacacctgtgtaactacatgggataaaattttaaaatggggcagaattgttacagaaatactgagttacacttaataagcrcatttctctttgttatatcagctattctttatagcagctctgtgattttggtccaacatggagtagtgaccctacttcgtgaatgaggaaactgaggcccaagrattttagggacttgcctaaagtcacagtgctaataaaaggcagaattaagtttcaagagacctaggtattatggctccatagtgtagtgatgtttctacaatactatgctgtaaactgttggcaacatttttaacagggctgtcagaagatcaaagccacccagtgagctgaggtttataaaatatatacatctcccaaatatataatagtatatactaatgacagaggataagtcacagaagatgaggtcctctgctccactcactggaatgaatggaaagaagcacaacaacttaagttacattttggcttccaccttttctatcaattcagttcagtgagcctaaggccatccaagtgccacatctgtgtgtgcacatgcagataggcagggaatataatcatgagcaattattcagtctcagggccacatcgtcctagaagctcttgcatgccaatatcaatcacttagccatccaccagcccctggataatggtaacatgcacagggtagctgccagtattccctttaccatggccagcagcttgtgtgttctagagagagatagaagagtggtggttaccctagccaggcagttaagcataatgcagtgacaggagttactacctcatctctgaactgcttcctgctaattttggtgagacttttcaaggtatagactatacagaagtgagactgttccctctgggagctgctggtttagtgaagaagacagaaaacacatcagcggtagaatcagtgactgaggagtttggagaaggatgagaggcttcttccttatggggaaagatgacaaggccatttggccatttctttccttttctgtttttctttttcttttttttttgagacgcagattcactcttgttgcccaggatggagtgcaatggcatgatcttggctcactgcaacctccgcctcccgggttcaagcgattctcctgcctcagcctccaagtagctgggattacaggcatgcgccaccatgcccagctaattttttgcatttagtagagacggggtttcactatgttggtcaggctggtctcgaactcctgacctcaggtgatccacctgcctcagccttccaaagtgctgggattacaggcgtgagccacggtgcccagccagccatttctttttaaagaaagagaaaggtctaattggatagtagtgattggaccatggtggtaagatatgaggcctgattggaaagcagtgattggactctgttgggaagacatgagacctgatttgacagcattgattggaccctggtggtaaaacatgaggcctgattggagagtagtattggaccctggtggtaggatatgaggcctgattggagagcggtgattggaccctggtggcaagacatgcggactgattggagagcagtgattggatcctggtggtaggacatgaggcctgattgtagatcagtgattggaccctggtgggaggatatgagacctgactggggaacactgattggaccctggtgggaggacatcaggcctgattggagggcagtgattggacctggtagcaggacacatggcatgaagagaagcaggtgcagctgaggctgcagtcagcytgaagagtgtcctggggagctggctaaggaattggaatccttcttggggaggcagtgaaagttgatttgcttattttaagcaggaagtgatatgcttagatttatattttagaaatgtcactygagggagtgatttagaacaatagactggaagggagaaaaggctggagaaggggacagtagtggaagccagtgtagaaattcagaagagagagacagaaagagaaggagagaggccctcgcgggagctatcttaaggtagatgcaggcataagaaaaaaatcgaaagaaaaatatcccaataacaaacacaaaaccccgacaaacacacagagtacctggtagacttctgcataagaggttacggagtcccaggtcctagtctagaactttctattcatgggcctgatatatagcccagggatctgcattttgataatctcccaggggcttctggtgcaggacgctagagctcttgaagttctcccttggttctgaccttcagcaaaagtaactcctcccttcatgtccttttctatgagactttcccagggggcctcatgacataacaagattcaataactacgattaagtgcttccttagtgtttggcattttgtgaagcactttaacaccagcccttttcatgagtgcctccgtgcttctcagactttaaagtgcatcatcagctgtgccccacccccaggatttctcattcaggaggtctggggcggagtgtgaaaatttgcttttctaacaagttcctacagagctgctgctggcccaccagccacattttagaacccctgctgtccaccactcataggaggggcagggattgttgtctgtatatggctcaggaaaccagagacttggctaggataagtaattttcccagagtggtagagttgcagctagaacctgtctgcctgaatctccagttcatattcttcaccacagtctcagcctttcatgatgcatgaccaggattggtggaacccattctctgctgggcttacgtcccctttccttaatgagctaaactgactttgttactgctttcttgaagtcttcctggaatcctctgccatgagttggcctcgtctgtgggcagtggaggtgtctgccttccagcagtgatttaagcatcctccaaagcatcttcccgaactgaaataccagagctgacatagtctctcaattcccaccaatacagttacccttttagttaaggctctgtctccaggttgtttcttagattgcgtgtgagctcctgggtggcatggatcacactgtatttgtgttagtagctccacacctaatgcagtgctggactcattctaaacgggcagtaaattgagtagaacatgagtgaatgaaatatgttacttgtagggtataatagttggacctattaacctagtctaacaggcaaactagcttagaggataataggatgggtacattttgaatacctggaggtagttagtataaaaatgtgccaccttccttagtaaaagcaaaactcagaaccttccacagatagtgagactctcttgaaggggaggggctgatgggactcctgtcccaattttcctgtgatcattgctaatcgcattggtaccagggataagctgttttctcactctatccttagcacaaatgaagcagactggaacctttctcggggatgacacagggatgtcaagatgaaatcggaggagttcccttatccccctcacagggcatgcaacaggggtgtggctcgcttctttgatgccctgctgctgaaaccccttggggaagcatgcagacgggcaggtcatgaagagtgtttttggactccgaccccacagcagggtctagggttgaatgtttacagctcttgaagccccagtggcgtatgttacagtgtattctttcagttttgctgtctgcaggtggcttgtgttaatcagctcaattagaccctctggcttatcccaaggacagagggctttttgcatcccgtgttcttgccctagggtactggaaaaatcagattacatgtgggattggaggattggtgcaagattttattgagtggtagaagtagctctcggtgaggtggatgggtgcaaagttttattgagtggtagaagtagctctcagtgaggtggatggggagccagaaggggggcatggagtgggaaggtggtcttcccctggggtagggccacccaacagctggactctcctcagaccgtcactgactgcccctgactgaattctgcgtcatcccgcctcaaaggccttgtggtgtctgctggtgtctgttggtgtgctcttctgctcctcttgatgtctagctgattgtgtctgtgcctgctagggtcttgggtttttatgagcacaggattgggggcatggtgggccagagtggtcttggaaaatgcaacatttgggtgtaaaaacaggagtgcctgttctcacttagatccatgggtacaagcccaagggtgaaaccctcaccagggaccccacccttctctacccagcacttccctgccccctcctgtatcaaagacggtaccaggagtgtagtctggctggcttccagggccccaggtgttctcctgctgacttgaccagccacctctcagagctctggagactgtcatctctgtctcaggtcatctgggcccttgcttagtggttcctgcttctatgcagtgggtgcgttccttaattcccagctccaggagcaccctcctagatacttggccccttccaaactcaggccaacggagacgtttctttcacttacctaggtctgctgtcttggacattgcttctcatccagagacacatctgttccccaggtgactctgacagacatagccttactcttcaaccgatctcacaatcccctgcccaccatcacaatatcctaatgcagtagcggtgtcagtcttataacttgagtgatgcagggtggtggcggcgtgaggagtgggctggcattttctcacaaggggcagcgaggcccagagtgtaaggaccacaggggtgaagcaggagaaggatcggacctcccgaacactcaattggctgctgcagaattttgcttccattagccctgcgtacctttgcccttagaaactctctcttcccaccaccaggttcctaccacacaattagagtagacactctttaatttccaaccgccttgagccctggaatctgcatcagcagtctggcattagccatggtcatttaccgcctcagattctaaataacatggtttgtgctgatggaaaatgccggccaggtccctatagatgtcactgcttgttgttgcgctgatgtatacatgcctatttctactggaatataaggtctgggggaagggaagagactgggatgaggctgagggcaagtgacctctcatcctttgttggtagttttcacaccaggatttggggtttgggttccttggggtcttatgaaaagccattgaggttgggaattttgcagggaggtgttttatttacctttcccctgcttggtgattctcagctctgaatgtacctttctgtatccacataccttgtggatttactttttccatttcttggaatgatgcaaaatgcctgggttatgacgaacatgggactgtattttctatatttcctttactgagtatcagaaagttatttgaactcacaacttgtttgccattcatgcttataatttcctggtatgattagcttcttctacacatgtgatccttaagaggaaaataaaatttccatgatgttagcaatattctcgtagatttatgcagtaggtataatatttaagctaattttataatgttttaaaaaaatcattgctgtttgtcagcctgattcctttgtttgcgtgtcatcagtgtccaatgagtagtatgtgtttcttccagtcattgttaaaacccaatatatggaaacagtgtttataccagcagctgttacaaatctggggctatggattaatgtcagtttctgaatgtagagtgctttagttaattccacccaaggacagatgatatcatctaggaagaaggaatatattagaaactgtcagccagaaggtagtaaaaggaggtgatatgttataaggagtactaaaaggtcattcaaagaagagatattgctaataactcaattaaaattttcacgctaacattttacaaatttctgtgtaagccctaaaacattttcaaagctagctaaattcataccatagattggaaaaacaggggtcaaataggattcacacaattcctttgtgagatgaacaaattgggataatctccttttccaggaagttctggcaagctaattcattgaaactcccttgatatctaggtgagagggtgggattttgtaagtacacactttcactggggattttctgttttctgtgttacactttggggcagggcaacccactcatttggtccttgactctcaggaaaccggtatttgctaagctggtgcatcactgcagttatgctctgtattttgctgcctggaaaacaaaaggatccatgttcttcctgcaagccaagaggcaaaacaaaaagtggagataaaggccgttagtggagcctgtacttggtgtaggagtacttccagactgtatgatgggataggaccaccatgctgcacagtcgggcagccaggacaggaaacgcaggaacagcaggttcatgagaggtcatctgaccatctgcctactctcctgtttgggaggaatgatactttcttgaagatgttcttacctggagtccacctggcttctcttagtagctctttctagtgttcagtcactgttaaggttcattcagttcttctcctgtccagtgaatataagcagatttctcttcttgctaatttttcccatagtcatggagaggaagtggtcagtatgtatggatacacatacatacatatttagcaatggctgtagctgcctccggtgtgctggtgctacagatttgatggtaaggaaaagtaaaggtggctgctgccctcctggagctcaccatctagcagaggtgaaggtcattaattataaaatcactcacataaacagatgtaaagtcacaatagggataatgaggcaggagaataagatctggaggcagggaacctaacgccgattcacgctgacttcctagaactgaatcaaaaggaaagccccaactttccacactaagtaacaaaaggacgagaggctactccctttgcaaatcyctcccccccactacccctacttttctgcatggcagatggaaaattgaaagtacctctgattgatggctttttgcaaccaatcagatgtttgcataggagtgtaactttgtaacttcactttagcctctgattcgttgctttccacaaccagtgagactgattgcaggccaccacttcatttgcatggggtgaacaccaagtggccaatgagaaacctctaggaggaatttggacccccaaaagattctgtaaccagggcccttgagcctctgctcatcccactcctaccctgtggagtgtactttcattttcaataaatttctgcttttgtttgcttcattctttccttaccttgctgcgcattttgtccaattctttgtccaaacttccaagaacctagacaacttgcagtcaagaccctctcctggtaacaacaggggmtaaggtttcagaaaaaggatatggtgttgtggtgggaccttgtttgacmgatggaggtctggattttcctgatgaagtgttggctcacctgggagctgaagggtgcagagttaactagaggaaaagaggagagggaagagcatcacaggcagagggcacagcaagtgcaaagcctcttgactggagggagtttggtgattatgaggaggaaccgaaaagaggcctgagtggttgttgaaggaagacgggcaaaactgaacctggggaggcgagcagggtcagttaatggaaggcctcacaggtggtggccaggaattttattttttttaaatgtgaaataattatggaggttgtattcactgcaagccaaactcaaacttcttcttctcactgtaatataatcatagttcctttcctcttcaattctggggacctatattggaactttcagctgaggatttcaaactgaatttctttgttttttgaaattccttctgcaaaggtgtttggcatagaaatgaggacagcagctatagagcacctaaaattttctacaggtatctcaagatggagtgtcttaagagtcagaaattgtgacatgcatgaaaagataaagatatatgtcttttctatgtagcatgtacacaggaggcacttaataaatgcttgctgatgaatcagaggtgacatccagctctcaggaatgcaaaacaatgttttctgttttccagctatctgaacgttgctaacagagggcctggggaggagggacgggcacgaccgcatctgctcctctgtcctgtgtgcgtgtttggccacctgatgccaactccatgatggcacatttgtcttattaagtgtaagccaattcctctcccccttccagggccctcctgatggtggctgtggaggacagggatatgctgtgaaagcccagttattatggtctgtaaagggaggtggtggctgctggggaatgatcaaatgaagacaaatgcattgttaagtttttatggaccaaggccgcactttcattaagcgtaatttacataacataactgatgctcaaggccaaacagtccttgtgccccagtgacagtccctgacaacccatggaccgaggcctcatgcacaatcccccaggtcaggaaacctcctccttctccttgctagctcagcacgctggttgctccagtgctctcattttgacctctcaagccaaatgctgatgacatcaragctacccattctactaccgattagcagtaaaaccatcgggcactctctgggcagagttcaggtgctatgttccttcctcttttcccacaggagttggcttcctggtctgaaccctccataagccctggctgggaattttcctcactgtgaccttgtgagcagtccctggttaccctcaaggattgtgccaagcaggctctgggttaacatcttggagagtacagagtaggctgataatcagcctatgctcaacagcacacccaagagttgaagatttctgatggcatccctggggtgctcagcagtggcctttgtctgcacccatcttcattacatgttaataccaccagagacactttgaggtcagccttttcaccttgcacggcaaagcaattatcatttcctttcattgcaggggtgggcgttggttatcacatgatggatttttgctggtaatcagaactttctgcccattggtcttcaagacatacttttgtgttgacatttacaaggtatgtgtcaggcagagccgaggtactgagtgagggaatgaaaggaggaggggggagaggatcattatattcaatttaatgacgacaatttccctacatttacaacttccagaagtaagagacaatagatgtgtgtcttctgcttgcatgtacaatgaaggagatgacatgaggagattctgttagtgggaatggtgatatattaccttaatgatttcattgcttgccaaataaaagaaaaattctcactgtagtgcaaagccctgtcctcatcaagctattcattgtgaggcgtttgttgttaaatcggaggcataaggaggggttttgaccttccataagctgcttttgaatttttatttttttcttggctaaattgatggtctgttttctttttttagtagacatacgtgaacatttgtatattgaatattgaagtttgttaatagatttgaagagctcttagatttttttggcaggtgggtgttgaattaatggaatgtttcacaatagagttcaatgaaagctcccctccactattatgctagtgtttggaagggcaggcgactttgtgtgtgtgtgtgtgtgtgtgtgtgtgtgtgtgtgtgtgtgtgtgtgtgtgtgtgtaggggaggggatgttttcatgtgagctgtggataaactgaacaaatttaattaaggtctaaactgaagtaggatcccatagtctaggtaggatccaagggactattttctcagggctgctggaggttggataatctgaattatagacaaggaggagtccaaagtcttagttcaaggatggcaccaagtgacaagtcctgtgatctagcagaagcagatggagaactaagaagaagatcagaaactaagatgacttggagccaactagaatgagatcatggatagacagccttgtaggctagacctagggacaggagaattagagtcttctggatttccttattacatgaacctgacagtggctgtttaaagaagcaatgcagggcctgacagtaactccttgcttggcttctgcttactctgtgtagtctgctttttctagtaggttatccagatttccaaagtggtggagtcaggtttgcatggtagagcttgggaactgaaggggaccattgtggtcatggaagtcatgagcatcattttccagtttagaagactgaggcctagggaggacagcagttgggcaggcccaacgaaaaatccagtttaggaggtccggggaggatagcagttcaggaggcctggggagaactccagtccaggaggcccggggaggacagcagttcaggaggcccagggagcactgcagttcaggaggcctggggagaactccagttcaggaggccgggggaggacagcagttcaggaggccagagaatgacagcagttcaggaggctgggggatgacagtagttcrggaggcctgggaaggacagcagttcaggaggccaggggaggacagcaggcatacccaaggcctctcaggcattgctgtgcttcctcaccctgcaatgctgccgccacatcctgttgctctctgtttgtttgattggagtggctctcctgaagctgggctgtttgcwtgcttggtaggcccccttcctgaatgtgccagccagctctggagccctactcagtaactgtttcggatgtgatcctcatcagatatatttctacctactagttgtgtgactttgggcaagcctcttcacttctccaggtctcagcttttcgtaagtaaaatgttgcaaggtctctgtggaccctttcagcttaagcatgacatgttctgtaactaaggaggcccagttatagaagctcctggtgtagctgacaatgtgaatacagtcaatctcaggaatctgtggaaatggaagtgatggcttatactttggctcttcacccacctgaaagatcacgtagaggagttctctaggctgcaagctccttgaggccaggggccatgtgtcattcatttttacacatccaaagccatcaggctgtgtggtgaattgtgatgtttagtaaattgggactgactgaatatgaagtattagagaatttcagatgataagacatacttaacatagacattgcataagcataacacatgtgcctaggacatgcctcctcaaaagtgctcgctgagctccattgcagcagggaccacacctgtcttatttaccactaggtctcaagttccttgagcatgactaggcacatagaagttgtttggtatgtttgytgaatagatgaatgaataaagatatgacatgaaagaagcgtagttgaactttccaaggttatttggattatttggtgagagaatataaacctggaaaagagaagaaagtaggaaacttggtggcaatacacctagttttgctttccttccacccctaagctgtggctgaaatctcttgtacataacagaaagtgacaaccagcagccccatcttctagttgacattggtctgcagatggtttctagtgtatgactaggtaagtatagaaacagagcatatacattaggaaacttttacagaaattggacactgcatgacacccaagcatgtgattgctggatttgtttggctgaacagtgtatggaccagtttgtatattgctaaagtcataaatgaattgcacatggtgtatactgcacaccagtcctgtatggtaggaccacaaataggtctatgacatatcagggaagaaattatcctgcaccacataactagaaagaaactaggtgaaatccttggttttgtagcctagcagtcatatttttattaaaatattgatgatcttgtttgtcatgtaaagctgtttctgactcatcataatcacatattttctatgttgttgatttgagaaggactgaactagctacaccccctcagtcaaccaagttgagttataatctgtgtgacagtgtttttctctatttaaaactagctagtcttgcatggctatttaactcactcctttggcctcattagtattatcctataatcarataagctaattaagctgtttcctatccactgatcagagaatattaaagctcggaaggtgactctagctatcctctgctccagctycttcatttttcagagccagttaaggctcagagaggttaagtaaagtgtctcaggtcacacggttatttataaaagaattgggactaaatcgtcagggccctttactcctaggttcttgtgcttttctactttatcctgaagtttaataaaattctttcagattttataacatccaaggtgtgtctctgttgtggtaagttctgggccgctatttgatagatgacctagaatggacagattttgcttgccaaataattatagatggttctacctttaagaaaacttggtatctgaaattatgaacacagggaacgaagaggtgattttatatataagtatatatacatttatacataaatgtaatatttatatataaatatatgattyatgtaaataataacaaaataatatatatgaatgaatttatagaaaaatactggctttggagagatgtggtgactgctattccttatagtctcaaaatgaggataaagctttacataaaattatgtattaatggaaaaataatggaaaaataggatacaaatatattrgtacacgcacatttttagaaatgtatctataggagaaaatgagactcttctatgaattaaactagggagtgttgacggaggcctgggtgggtgaatttgtttcccccgaacatcatctctgtcttagcaggcttcagtgtggtctaactgaggtgttggcaaactttgacttgtaagccaaatcctgttgctaccttttttttttgtaaataaagttttattggaacacagctgcacccatttatatactgtcatctgtgactgtctttgagctgcaacttcagatttgtgtcattgtgacatatgctttatggcctgcaaagtctaaatgtttactatctggccctttacagaaaaagcttggtgacctctggtctagatgcatatctggttcatatcactgattctactaccataaggcagggggtcttcatttggaatctcacctagctgagttctgatagggaaggaagaaaatgaactttaatcaccttgctcagaagcctgttttaaaatccagtcaccagctgccggtttttagtttacctatgacctcctggagatcctgagagaatgaaattaaccacctctggaacaaacatccgatctttttattttttccactttcttaagagagtaataaatatagtcaatgactctggattctattactatgtaagagctctttaaaaacatctaaccatctgcttaatggccagtaatacgtttctaatggtcactctcgataagacacttttagttcactcctgtaatcgttgtccaacagccaagaggctcctgaagaatatgaccaaaggccagccccagccccagccctgtagccacagaggcctggcaacagtactgaagaaaaaaagagagagttctgagagctgcatgtggaaactcttttctttctcttgacactctccgcgtatgatgagttcgtgatccacaatagtggatctgaaaacttcgattttttttggcatttacacgttcaggtacagttgcaactagaggtcagtttaattaatatctgtcctttcctctcagatgacatacactgaaccgttgtcactagaaactccacatscctgatctgggcccagcagctggtgacagcttggcaaattatgaatttcctagcttaaaacagcctaaattgcagacaaaacaagccatcagctgagtaaatactgtatctctgtttagcttctgtaagaagaaggagattagcacgaatgtttagtgttcataattactagtaggaagcaaatattaggctcgggctgactggagattatttcattatatccaattaacacccacttgattattcttaattacttctgcatgatgacagaggagtaaagatgtcrtacttcaaatgtacaaataacatctgggccatcaacgtacatgtatttgtaatataatatcctgctcattttgggatggctaatatggtcttagcagagggatggaaaatgaaatgacaagattctggtaattactaagcgggtcttagacaagatgccaaaagtaggtattaggataaaaatgggccttttgtagcaatctagtttagacatgttttctttaaaaatgccttattacctttctgtrtaagaatttctttcttcctctgcccattgactatagtacaaagatataaatggaaatagctaagtgcaaactttccagaaaagagtgagctatatgtgtgtgtgtgtatacatgtatgtcaagtggtatgaatgggaatccctgctycaagggtgtttgtggagttttgagaaactgagacaaaatcagcctgtgtgcgagattcttaatgacctgcctagtaaagaatatgaaatgttagcaagtgatgtaatctcccaagcatgtgcgaaggataaatacagtgagccagattttcaggttcaaacctgaaattagaaccacctttaggaacactagaaatcatctttcctttcacaaggaaaaatatgaacaggtcctttcccttcagctattgtcttgagttagaargaattgctggtagagcatagccttgctttttggagtagagattattagagtcttaggtttcccctccttgctttctyctggtgttaggggtattgcactgtcagtaacattgcaatggattattattttttttccaggatcaaactttggtattaaatcatgcttaaagatggaggtaactgtgagcagcaagaatggtgagattgggtgattgtgcaattgtgccagcacacrcctagaactggcaacttactaaagatcagagctgaacttggagaggtggcatgtgggtaccaaacaaatccggttgcagctcttgaagtcactcagcagttagttattgagaacttgcttgtgcagagcatcaaaccaggcacatgatgggggtggaatggcccaagccctccccagctggagagacaagaccattctatgatatggttatgtttaattaattgctaaattgcatggttcaaactaagggctatagaggtttggccaagagggctgggctgatcaaagaagaataagactctaagactgggacctgaagggtaggtggattttagctggttagaagatgttctggctattggtgctgtaaaggatggtggaagaaaagcctgttccatgtaagcagaaacatggcccccttatcctctgatgcaacccagctcaggcccaaggactggcgacctcagtagtcctcactgtaagcaaacgcaaagctcacatcttgagatggaagggacattgcaaaaggagagggccccaaggagatggtgttaatgaggattccctggtatctatttccattatgagggaagagacattggaaaatctgtcaaagtcaaaaattcataagtatatttaaagatttaagcctgaaatggaatatcttaggcagtcatttgaattctctctctatatatgtggtggctgatatttaaaaggcacacaaaacattaaaaaattactttgggaatagcatacccttccctgaataataaagaggtaatatcagggaatagagtagtgtcaggatgtaatcagttctcacctgacaaatgatggccagggccagggttattcatctttgctggtgatatatgaagccgatccagggttctcagagttggacagaaggggttgtttggcaggtggtgtgagggtcctgaagttggctggatcttggtagttgtgttcattttgtaggtgtgtatatgtgtgggggtcatgatgatagtgaagaggacctgtaccatgctttacaaaatgcaacaagattgacttggtacacagaggtagaagcttggatgccagctggccatggtatagagctactgtagtgttgtgtcatgtcatgttgcacatggcatgcttggcccacctgagaaaactgccaggaagctgttgaaagtttcttggcctatggctgggtgtggtggttcatgcctataattccagcactttgggaggctgaggtgggcagattacttgacatcaggagttcaagaccagcctagccaacatggtgaaacccatctctactaaaaatatgaaaattagttggccatggtggcatatgcctgtaatcccagctactcgggaggctgaggcaggagaattgccttgaactggggaggcagaggttgcagtgagccaagatcgcaccaccgcactccagcctgggcgacagagctagactcagtctcacaaaaaaaraaagaaagaaagaaagaaagtttcctggccatattgtgttgtgtagcgtagtggctggcccacctgagaaaactgccaggaagctgttgagaggtccctgcccttccctgtaggaagaaacaagaatggatttggcttaattactgcagacatgtgtcttatagccccttgctaccacaagtgtagtccatagacctgcagcattggcattttctaggggtttggtagaaattctgattgttgggtcccatcccagttgctgaatcagaatcagcattttcagaggagacctgagggaggggagcagaggagccatcttgatgtctgtggaggtaacagcacacacaaagccttgaggcagaagcttgctggtgactttgcaattgggtgagaaggtcattgtggtgagatggggaagcaaggtactacttcaaaggctgggtcatgggtgacctcaaaggctctggtcaggactttgggttttattgtatattagaggggaagccattgaaaggctttgacataatttgacttgattttagactcctactgatcactctggttggtggatcagagtgtgattgccatgggggtagtgggacatggtcacattctggatgttttagaagaaagagttgaaaggattggctgactggaaataccatgtaagagacagagatgaacaacaggaagagtggaggtgccatttactggcaaggaggggcagatttggggctgagaattaggttctggacatattaaactggagatgcttatcagccatccaaatggagatgtcaagaaggtaactgaattgagaggacccctgtggggaggggtcaggactggagctagaaacttgggagtttctgtcagtatgtaggtgatatttaaagtcatgaggctgaatgagatcacttcattccccaccagatacatgtagggaattagcgtgacagtgatgatcaatgggttttggtgatcatggtggtattgctggaacttaatcagctctaatgtcctctgattccatatagtgcrcttgctcgttatattccttgtctattctcattttgaatgtaattttaatattcatcaattgcagcaaaaggaagaaaatatgttattaactggacccttcagcttctgcctgtctatgccaactccagtgcacactagggaaacctggactccacactgactgggatgtccctgtcaccttgaattggctcagcccagggagctctgggtggcagggccctgaaatcctgccctattgcagcacaaagcaggatggatgagatattscaactcactacttacaggtgttctttaagggagcgcttaggaagttttactcagtttaacttaagacataagtaataccattcccaattcagggcaatggcttagaacctgactcaatgtcctttttactaagtaattatccagatttccttgctaaatgttattttatatattatgtttaatagcctctttcttttggctatggaaggatggtaatagcagccgataatgtatcacatactcatctcaaagttctgcctctggcacctgtggctggagtagagggaagcttgtggtcaggcctcagacaaattccatgtccctactcactggtcctgggttggttcacttctcaggggcctaaggaatcacagataactttttaacctttaaaacattcctcatttttaaagatttgggtaaacctatagagctcatctggccaaactgctcctttgcctcaattcagagcccccatgggacaactgtgggtaatagaaagccctagtagagaggaactgagcagcatagacttttgggcaatggttagatgtcataaatgcatgataaaaattaagccaccactgcatctcaagatagccaattccttttagtaccctgaggctggctttcagtaaaggttcactgggttggactcgtgtgataggaattaggttactgtgttgtttgtacagcgtgtgtttggtagcatgcacatgggcttcttagtgacgacctggtgatgcaaacagtcttccagtagctactggacacctactgtttgccagttgaccccctaaagagttactgagggctcagtgggtgctaggcatatagatgacaccaaaatatttgtcattgatctccatctgccctgaaattatgttctccagatagtcaaggctaaaacccacatcaaaaatatgtatgaaaacctaagagagcagggaatgacattggccattgtatttataaacaggttagacgtatttcctgccctcagagactttccagtctagaagggaagcagagtatatttgcatgaaatgccaaataacagaataatgcttagtattagtttgaaagcggaagtggcagagcttccaggaatcctgaggatgtgtgaaccttttggctacatctcagaatcacctggtgaactgttgaaaactgagatgcctgtgcccagccccagactcattgggcatctgtgtgttgaaaagttccctgggctgggcatagtggctcacacctgtaatcccagcactttgggaggccgaggcgggtggaccttgaggtcaggtgttcaagaccagcctggccacgatggggaaaccccatctctactaaaaatacaaaaattagctgggcgtggtggcatgtgcctgtaatcccagctactcaggaggctgaggcagagagttgcttgaacctaggaggtggaggtggcagtcagccgagatcacaccactgcactccagcctgggtgacagactgactccgtctcacaaaaaaaaaaaacaaaaaaaaaagaaagaaaagttctctgggtgattctttgtttttttctttttagaacctgataatacttgattttttaattttgttttttatttttccataagttattgggggtacaggtggtatttggttatatgagtcagttctttagtggtgatttgtgagattttggtgcacccatcacctgagcagtatacactgcatcctattgtagtcttttatccctcgtccccctcccactcttccccccaagtccccaaattccattgtatcattcttatgcctttgtgtcatcatagcttagctcccacatatcagtgagaacataygatgtctggttttcagttcctgagttgcttcactcagaataatagtctccaatctcatccaggtctctgcaaatgccgttaattccttcctttttatggctgattagtattccactgtatacatataccacagtttctttattcacttgttgattgttgggcatttaggttggttccatgattttgcaattgtgaattgtgctgctataaacatgtgtgtgcaagtatcattttcatataatgacttcttttcctctgggtagacacccaatagtgggagaaccaaaagtagatctacccccagtgattctgatacataatgaagctcaagaaccactgctttggaaggatagttggtgtgtgggtgcatgtatggagatgggcattgtagcctggcatgagaaagatgtgagaatgccataagatggggagcactgcaagactgcttggtaccatgcccctttgctgactacacaccagagacaaccagaagatctaagcgtttcagaggcaagaggcaatgaagaggagaaaaccacaattaaaagaaaaaacaacttttagatcatcagtaaacaactgagtgtgctaagtactagtctaagtgttttgtacttacataatcatcatcataaacccacaagttaggtaatactgttttccttactttcagatgagaaactggttaagtaaattaccccaaatcatgtggtttcctggcctggagggtaggatttgtttggatgaaaagtggaaatccagtgggaaagggacagctttcagaagaacttgaagtcctggagaagagattgaattttatcctgaaagccacagggaaatcctgtggttaccaccatcctttatgtgaccttactctcaatagtgagtgtttggactttattcattggatgatgggcagcttttgagccaacaaacaacatggggaaagtggtgttttaaggtgaatctgtcaggtgctgtgtagattcaagtggagggtacctagaaacagattagctaaaactaaaaccatttcctaaaacaccacaaacaacaaaagtgaatattgattgagccctcactatatgccatgtgctgtcctttacatctatcatcttcacaaaaaccctgtgaagtacatactcatcatgtacccattttacaggttaggaaaccaaggtacagagaagtaacttgctgaaggtcacacagctggctagtgtccaagtcaggattcaaattgtgttgcttgattccagaatctaggttactgtctactctgttataggctcttatatctcctaggactttggcagtgataagtggaagtggaaatagagatacatgacataaagagtaaatgtcaggtattacatgatgctggaatagtgtgagcatgcttaggaaatccccagcagggaagagttccttgcacaaagaaattgagtagggtttagaacagcacgtgaaggaaggcagaaggcctttctgaaataagcgggtttmtgtttagaacatgggagaagagatagcataggaaattgccattctgatggccctgcatgtactctgataaaaaccatggaagttgtatgagaaatgagtatggtgaagtgagtagatttgttggttttggaatcagacagatgtggttgtgggttccagtccttttcttactaacctgtgacctagggcagtttgcataatctctgcatttcagttttcccatgtgtatattgaggataatagaagcatcatccttattaagatatcatacagattgagttcatgtatggaaaggagatgaaaaatatgacatattccatcaataccagctattactgttatgcttctcgttattacagtcattcatgggtgttaaaacagaataatgagatctctattttggagagagtactttggtgttagtgggtgcaasacaaactcaagagcttctaggtttccagttctggctccacctgctagctrtatgatttggggtaattcacttaaccaatttctcatctgaaagcaaggaaaacagtattacctaacttgtgggttgatgatgatgattatgtaaatatgaaacacttagaatagcacttagcacactcagttgtttattgatgatccaaaagttgttgttttttcttttaattgtgattttctcctcttcattgcctcttgcctctgaaacatttagacctcttgttgtccctggtgtgtcacaggggcctgtggcctgtggcctgtggtgttgcccttgctgaatcctatttaactgttgagaatgtgtctgggtaagtagtcattgctgcctcaaaacatagattcatgagcaaagtgactatgaagatttgatgtgatatgtgggtgatgatcacacataaagggcacagcacataggttacaggaatttcgctgggctgtgaatttctgacatcagcctcctcgtttaatatttatccgcccctcttctctcttacttgggacctgtactgaggcatggaccttgttccacaagggactgagagataacagtgctaactctgagagtgtgcatttgtgtgtgtgtgtgtgtgtgtgtgtgtgtgtgtgtaagagaatattagtagcctaaagggagatctcatgctgctttgctttgtttcatttttttggttgtaaagttgaataaaaggcacttagtccaaaacttcaaaaaaattgctactgggcaaagtaattttgtgtcaggcttctgttcagrgcagatttacactggttataaatctctgaaattaaggtcttaccgtagaaaagctgaaatgtattcaacattagcagacacccagccctgttctgaaccagtggccattcttccgccatgtataatagcaatatctatctatgtgtttgggggcaataataagtttaaatatgcctcttagaatgggtaatggctctccaatgagtagcagaattttctatcaacaattcttttcctagaaccaaaggttaagttcaagagtttgatttaatgacaaagttaattaggcccttaacattacaggtttcttgcctttcattttctaatcaagatcatagtctaaggtcagcaaccttgcagaagtggggaacacaaggccagcacttgttcttctgatgtttggggagggtgactgtaggagatgaggagtgcttagcaatcactgagttgacaaagggcctggagaatgcctgctagacctgaagaatttcattcttacctctaccgaaccttagatataaaatatgcttgagctttaaggaaacttaaggattatctaatcagtcctttcattttacagccagggaaactgaggctaaagggactaagaaatttctcagtggttacatagttcacttgaggcagagtaatggatctcctaagattaaaccacctacttctaatcaaaatgatctatcctcaaatactcatattcaaggaaaagcaaaacctcttcttggcttataggatttatgttgtttatgagctagttttgctaaagcacttcttcctgcctttttttttttttttttttttttttgagacggagtctcacgttgttgcccaggctgtagtgcagtggcacaatctcggctcactgcaacctccgcctcccaggttcaagcagttctctgccccagtctcctgagtagctgggattacaggcacccaccaccacgcctggctaatttttttttgtatttttagtagagacggggtttcaccatgtgggccaggctggtcttgaactcctgacctcatgatccatctgccttggcctcccaaagtgctgggattacaggcgtgagccactgcgcctggccttcctactactttttaaagcaaatatattccatttgatcttggaccatgataaaccagtaaagactattggtttgaaacaaagaaattgmctgttgctacttagtccaagaatttaaaaaataataaaaaaagaaggaatccattagaagaaccttagggattctcataactggtcagagattgaaggacctggtaagggaaagggaaagatatcaaagcaggtccagaagttctagaaagaggacacaagacagatttctggaggcagaaacttccgtcccagcatttgacactgctgtatcataaatgaatcctcaccagctctctgtcttcatctcacttgttcctgatgcaaagtccaggtgaggaaatttaaagaattgagccaagggatttgccagtgctttgcctgccgggaaagcagggagaggagaggtatggatgctctagcttctactggaccctgggaacgggcactgcccactgaaaaaawaaacacacattttggggaatttctcaaaacaagaaaaaaaaagagtccaggttttagattgtcccaaactcaagaaatgtctaagataaaagactttatgggtcattctgaagcttgaccttgctgtatgggaaaatatagtccaaggtacagactaattcatagataactttgggattcaatttacttctgggctcggctattcatgttttaatcttaaataggagtctgctggttcagggccttaaactttaagtgaaagttttgtggtgggatttttggactataatataggtgaccagatttggaaatacccttgaaaatgacgacatttcagaaatagtaaaaccatccatgtgtgtatctttccacacaggtacatgctctatacctggccctatgctgtgcattggttaccaagaagcagacaaaatgttgtgcccttctgcagcctgggcattagtcaggttcatatatagggtgctttgacttctcgcttatagtaaaatattcaaatgcagagaagactattgaagaaggcaagatttttggttacacgccagtacttcaaaagctccaaccctctcaaaaattattagtgtttgcttttccagaagagctgtttctaccaaacttggttcagaatcttcagcaaacatttcttaccagatgcgatgctagaataagtctagccatgaagaaccttataatccagtagaggagacagacatggaaatgaatcatttctatgaaatgcgttaagttctgagacagagatgtgcccagtgtgctacgtaaagacaaagactcacattcttcagatgcgctagcataggaaagttttcctgtagtttgtcttaatcctaggggtacaatgtaaatgcatcttctctgttcacctgtgtggtcagtcatggacagttactgggtggctgttacatgcaaggccagaatgcggggcctgtgatctagcagctaagggcatccattcagctaaagatgtcttcctttctccctttcctttccaaaaatggccaactacaacctcttagatttggggctggagtaggtgggggactgatgaagcatccattcatggctttggtacaggattcgcctaaatctggacatatccccaaagtactagttctgcagggatgaggacagagcccaggagaactgtctttggtttcaccttcctctccaatgtgttcaactcccttgcaggaatgttcttgggggagcactctgcaaatccacatcaggcccagaagagaaatgtttctttgaagacctgtctctattaatttgcatagatatttgtgtatgattttatttacattggtgaggcagaacartagttctccagctttgatgtgtgtgagccttggagattagagctggggctcttcctttgagaaaacaaatacttttgtgttgatttctatgagatataaatcatacccaggaagtttacagttgagtaagaatggtataattactgattgtataccagaagcggacatatttatgaaaagacttgaaaaagcttgtaatcccttcccgtattttgaataactaattgctatgtcatcctggcatatttgcaccacaagagttaagtctgtcaaatgtttccctctgaaaaccttgttttaagggatttctaacttggtcgtaaaactgtgctccaagttggagctgacttgatgggagtctgtgcttggaaggcttgatttgaatggtgccagtcagagttaaattacaggctgggaaaaaggaaacaaawtttttaaaaaggaggtgtttatggttcccggttcccctaagtacttcttgaggatcaaaatagcctctttaaaataaattgcagaccattagtacatgatggaggaaacccctttgagactagattgggggaggggaaggcaagggcacaagaaaaaagagattgatttgggccactttcagcctgtgcagtgcattgccccccagcccccgcagcatgcccctggaggggttaatgcacacagatggcctttcatgtacccacagttgccatttctgtcagtctaagtggacctcactgcagatccactccaattctgaatcttgattggaatttgggtttcttggaatgtgttcttcctccatgcccacccccccacctttctttttctttttaaacaaatagaacactattgcctgccatcttatgcccttatggatcataaagtcttactgcataggaccttgagtatatcctgtctacgctgaactagagatagctgctggataatcatatttgcagagatttcttcatacttgatgccagacattcaagccaaaaaggtagtccttggctgggagtatttatttgatcccctacrtagagccagcttaggtatctctcccatccatcaacaacagacaattcaagataatgagaaagagagagagggagacagagagggaaagggagatgcaagaggaggaggagaggaggaagaagaggaagagagattgtttctatctctgtgtgagtcaccttgaactccagtggtctgggagtagcctctgtgctctagcacttaccatcaatggaagtgggacagatttatggcctggcatgttcaacctgaattcaaatctccttgtctttttaagatttcactcatgccttaatgacacctttttttttttttaagaaagctaattgcattggtttctccaagaggcatcactttgaacaatccatcctgactgtgaaaacaaatatatgcttgacttatttcatttattttctcccaaaacctaaatgaggataaagccattctggataagaagacatgtgtgtgtctttgtcacatcttttatcatcatgactgcttttccaaataatacaacttgtgacaaatgcgaacattaattacagttaacaaagaaatgtcatgtgaagtattcayggggggagaaaaaagaaccgagacaatcaatgagattacatcttgcaccaagcttcaagtcaaagtgcaaaagtcagaaatcaaataccatcagttatcaaattatgttaatgattctaatgaaagcttctggtattttgttcaagagtgtgttgctgtaatggtaactaatagaacaagagaagctgattgccgcgaattaattagaactgactgctggagtttcctttttatttatttatttaaatattgacaacctgttttagatctcgaggtttttcacgtggtctttttcttcgctccccaagtcatcaacctgccaaggagtgagaatgtaattgtgttttctcatactgtggatatctctcaccagcctcagggttttgacccagactgacagcagacaaattaaactgaagtacccctaacatttggggggttcagtatgagagtccagatgaggccccttgctcaatgctcccttctcttttccttcagccccacattccccccacaagaggcctttgcacacatccacatgggcacccagcttgcccatccaaggtcyacccaccaatggctgctctttggctaccccttggccttaggggtgcatgcccgtggcaccatgcactattgagagataggacccagggaagaggtcattgcaggcgctagaaatgcttagggttgtttgagaagtgaattttgggttccgggtaatcataacatggtctactaactggggagtaggctccaggttggaaatgcccttgttccctggacctctttatcccataggggtgggaggggatggaggagggccagagtgggccttctaaagtgcttggccttgggcagggggctctagttacttggatctaaaagcagtaccggacatgcatattctttgctttggggtatctagagctctctcactaaaatctattttattctttctgtttttgtttgtttattcattccttcatttattcaacactcacttggcactgactgtgccaagctctaggacacaggaaaataaggtctctcccttcagggatctcacgggcttttcaaatttgtaatgcattaataaatactagatagagatctgttcaaagttctttgccttccagatctgccttgtattctgtcctctgagtgctgttcttttcttctttatcatggcagcaggtgttacagatcctgtggcagtgaggagggccaacccagggcttagaagaggggactgactctggttcccccgacaaccccccgtgctgctcctttagggctccccaggggcccttcagagctcccaccctctggccagagaaatgtccccactgaatccagatcagaagcagataaatggagagtctggcagggggcatcagtcccacagagaatcttctacagctatagtgaaaacgcccagtctaggaggggccgttctgactgatgactccaggcagcctgaaccaggatccttttgtggagcttctgcctagaaagtgaattgtgttaaaatcaacgtatcttgctctcatattaaaatccctctctctatttaagtcattgagggaatttcctaaattttccaccatggagggaaggttttggttataataccaaatggatattgacagggccttgctcttagaaaactaatcatgacatctgggtaactgagcacaggtcagctctgaagccctccctcctgggtgtcgggaagcacatcagactgtgttgaatttccttcgctggctaaattggtacattagggcaaaaacgatgtccacatttgcatagttgatttcattactatygccattattgatgcctagctcctctgaaagaaaggagccataaaagcaaataaaatcacttcgcgattccattattggataaattaccacattactgcctgcgttttagggctaaagccattccccgcatttgcatagtttatttcattatcattattaataacaacaacaataataatgatgatgactaggatccttgaatgaaaggaactagaaaaatgccagagcctcgagaagtctttatggactcagtgcgatcactaggagtccctttatctgctgctgaaatgcagccactccgttgcattgcaccaaccaaaagcttttaacagagctcccgttaaagcagttcagaacatgtggggccgggtgcctggtttgagatagtgactagttacttgtgcctactaaagatttaggttgggagtccctgcttagcccctaactagttctgtctcttcagggatgttgcttaaattctccaaacttcagcttcttcgcaaatgaaatggggattatgacacttgctctgctgtgtgatgaaaagcaaaagaaatggtgaatgtgaacatgttctatagaccataaaactacccatagattcaagagactaatactaccgtattgaaccttggaatgacggctgtggctgggatgctgtacagtggaggcagtggctagactgtgtctctttggctgggagaattttctaaaaaactaccataggtttctaaggcatcatcctctatgataagtagggagagcatacctgtgtatatttaccaatcttggatatttacaaatagcttactttgatagccagcatttctgggatgagctggtggccctgatagtgttctttcttactcagcaacttctaattatgccttgcttttctccttggtcatagaggcaagaagtataaagtctttttgtctattaattctgaggtcctgtagtgaaagcaaggtccactggtggccgtctatggtttgctggagaattttccccctggttttgtttttattattttattttatttctgctgtaccaggggctccaaaaaaatgaatgtgtcagtaaaggatttgacagtatgttacgacagtcatcaatccactgagccctgtagccataaataagcttcattcgctgccacactaaagaggacagtttttcttctccaggacattgaaaatgtcacagcgagggaattgtttgtccctgtctccacggcaacgccaccagcacttatcattaactttcacaccaagattttaatcagcgctctttgcggcctgagaccaagtcaacatcagcccaaattttcaaagccgttattctaattatgacgagaaagctatagattgatgagccgagttttctgcaaggactggtggcagttaattctcgtgacctgtgtggctcggggagtctctcttagagatggagtcttgaaagttcgattattagtgacagcttgtaagtgagaggagccttatctctccagagagtgttgataacttgagacaaggtttaactaggaagtagtgagacagtggaaggaggggagagagggggagaaagggaaaaaaaagtgcacactctatctgcagcgtgcatccagtgtaatgagaaaatatggacaggcacaatttcacaagttgtaaattctggtagccttcagttgtaaattctggtggaggctgttttactcggctatctgataatgtgtgaaaatatttgtccctttgcttcacaggcatgggcaagcactattttccagaaaatgcattaaacttcccagctctctcctgcctctttttttttttttttttttaaatcatagaccctctaaaaacaaaatgagaatttgtgattgaaatgaaatggtaactgatttttttttaaaaagattctccctaaatcagacctagtgtttgacagaacagtagaatgactatagtttacagtaatctattgtatgttttgaaatagctaaaaaagaataattcaaatgcttctagcataaagaaaagataaatatttaaagtgatgaatatcccaattacatcaatttgatctttaaaaattatatgaatgtatgaaattatcacatgtataccaaaaaaaaaaagagtctgtcaaaatgttaaaaaagactcttccttctcatttccctcagctgcctcccacccccagccttttttgagtcagtctaatttctagagatttggggtttgcaatgaaggggagtagcatggtgctaaccactctgtcccttcctgtttctgttggtctctcgtgttctctgctttcgttaacctggctgatgtatgtccctatgttcttggccatgcatagacaatgttcatgctgttgccatcgtcatgccttcaaacttgctcttgggaagtgggacatttccctctctctgtctaaggcattcagccgagccattagtctgctggggaggaggtgggagtgatggtcactgagtccccctagccaaaggttttttttttcttttttttaaaaatgatctcattatttgttctctagtctcttcctaagggagggtgcagaaaggyagcatggtgaggtcagaagaacctcatcctagatgctcccagtcccagctctcaccccagctccacccctgccacagaggaagactctcccctgcctctgttttctcatctttcaaatggtgatcatagtatctgtccagcctccttcacttatcaaatgagaatataggaatgaaattgctcatacttcatgtgatcattgcattaaagattatggtgcatgtgtgagcactgttggttgtcagcttttttagtttatcttcttttccagaactagaaaaatgatgatgcagttacattttatagtgttttctttttcaaattattttcacatgtttaaaaccagcaccattatctccattagctttattttgcccctgagaacactgaggcacagaaaggtgaggtatcttgcttgtggtcacacagccaattagaggtctaaccaggtatagagctaactgtggcctccgattcccagcttgcacttccctagtctcatgctgcttaccatattaataggctgggattaacgaaaaaagcaaacccaattagtttctgttgcagctcttttacaatcctgtcttgtttccctgtgtgtttatatgtatgttttaatagcattccctgccttttatgctgaggttgctcgaggtatgtttataatggtggcgtaattataataataaaatacaaatccatccacggagtgcgctcattactggctggccaggtaaaacaaacaggcctggcattgatgccgaaacaaggcagtttatttctaatgtggtgcctctttgaaacacaagatgctttacttctctagcaaaggaggccctgtcctctgaacataagtggacttgggggtgcaaggttgaacaggtaattgagacaccggggctaggttgctttaacatggtctggccttttcaatctctctttttccaggggagagttgaaaaccaagaggggaaattgttccctctgattctctgtagctgtaagatctttcctggaatatacaagtaggccctttggcattcaaactcttggacgtaggagtttctaatgtatacgaaagggaaaattattgttgtgaaaagagtcataggagagagagaatgtgtgtgtttttttaaatgcctgtctgtccttgttaattagaagtgcacatattgggaaattaactatgaaatactaaaaatgataaattattccttatttgaaagtataaattaaaggtttagtgtatataaaatttgtcatgtttaattgcaagttcaattaaaattcagggtaatgatgatttatacaggtttctgtgtaatttgatattcattagcttagccagacacatgctgatattagctcgttaattatgtttccttttgttgaaggcagccttgtgaaagcaatctgctcaaagttttctaaactcattctgctaaatgaatatttggcagctgttcatgttattgagatggtcactgtggcttcatttcactcattggccgcatcaatcataccttctctgtgacaaacaagggtttctcattacaaacccatttatgaaggttatggctgacattaaagagtgatggcatggtacgctgctgttactttacagtagcgttagagtggagctgtcgttaatatccacacctcccatgtggtcaacctgtttaaaatacgtaggaagggagggcgaaatcatcacagtggccctggtgccatttccaacaccatcggctcaaacttgggaatcaaaacttgcgtctcagaaggaggactattaagggagcagtgtctcagctccccactgtaggcttcccagggcttgccatacccagttcataggagtagatgttgaggtccagaaaagttaagggattcactcacggtggcatggtggctctgagcatgactcttgggcaggtgaaggggaaagcccaggttgcctgatgaagacgctccctgaagcctgtcatccatggtggtgatgagttggaggaatcaccatctgcctggggaaacagctgtgtaacagtcctgtgccctgcatttttggaggattataaatatttttacagattttccatagcctttattgtagggtcctcatactttacttgggatattgtggaaaggaaggtgctgtctttccaaaaggaaagctttgacaagtaggaaagctgaggcgcagagaagttttttgatttgtccaaagtcactgatgcagatactgactggccagagccagggccctgggcttctctgcacatcatgtgctacagttgtcttccctccaccagcaccttcttgcaggatggaactagacacttggtaaatggtaaaaatgtctctaggctgacccatatattagcttctactcatttgtatagtaataaattggcagtctggtttgtgatggcaaaatgcaatggaaatttcttacaagaagttatcatgtagtatgtctatagttaaatttacatacttgtgcattttttgggaggaagggtttagggactcatatacacatttctttttttctttgagagctgagtcttatgcattgggtctcctttgtaggctgatgtttcttttgaggtcgttgtgaaagagatggctggctagctctccatcgatgtcatcctcttcttccacagtggagcgttgttgctgggactacatcttccacctcctatccccatcttgctccacgtgggatcatgcgatttttgtacccacaggctctacacgcgctctttccccatctgccagttagaggtgaaggactcagaggcataggcaatggcagagtcaaacaaaatagaaggagcctgggcccctgaatcactgtgtggaaagccatgtactgaacatcaagtactgaatatctgattggacttcttatgagcatgacataaacatctattatgtttaaagtccctaaaatttcaggatttatctatcacagcatctagtattaccttaactagtaactaactccttcattcattctacaaatatttgttaaatattttgctctgggccaaatcttgggctaagggttgaggacataaggataaaaaagataaaaagatgctatttctgaccttggggaatgcaatcacatagtaagggagctatacaagtgaaaatattttaccctagtatagtaagtgctgtaaaatgtgtttaagggaggagaacccaaagaagtaatttttttgaaatatctagtgaaatagcagatttaaacttttatatttcagtaggaccttttatttggaatgaaatcatatgtgggatccttcagttcatacaacagaaaaaatctgaagggcctttagtagaaacaggagcctctaggctcatggaacctctctctgcatcctcttggcctgctctgatgtccctgcagccctggatgctgtggcgtatcctctgaaaacccacagagacagattcaagcccaaagatagactgttcttgcactgatgtatttttttttttattctgtaagttgtggtacatggtagctctgttttatagaatgcttatctctaataggtggaagttgagctggtggtaggtgaatagtttattccagaacttttatttggacacattatctatttgacctcgggtaggcttttaaactttttgcctcaatttcttcatatgtaaaacagcgataataatagtgcctatatcctagaatgattatgagaattaaacaagttaatatacataaaggactgtcataagcatgtcatttagtgaatggtcaacagtgttgggtctctgaaacccatgtgttacaaacatatcacatcatatttgtgagtacttctaaattttgatggagtaagcaaaagaatgctggaaacgacttcaatgtgtagggaatgatatcttagtaacaagattctgaaacctccggtagctaatctgtgatttccttttgcttctatgcaccactcaagttcttcttatggttttctgaaacttaggagggactggaatttttcttcatcgtgtttatagagaaatgtatcataggagaaacttgagttgggttttatttctttgacattgatgtttttcatttcacctccactcctttggagacctagacaatgtaacttagaactttttattttctaatttcgccactttatgtcttattaatgcattttgtcagtgtggaaagccctctggtggtcaaagtaattcctatgtggctcttttagatgagttggaataacatcaagttgatgttcaagagctgggttcaaattctatttttctcctttgctcatttctttttctagttaaactataaagtaaattttctattaaacaggtcttctgcagcattttagttctaaaaatgtctagggaaaaatagtggtaggacagttagctttactcaggttaaaatttattagtgatagtattaacattttggagggtttaaatgctgtgcygtccagtattttgctgtcactctaggaatgaaatgtaacatacactctgggttgaagatccttaggactctatgtaatgtaaaggctggaagtgggggacttagaatttatcgtctcatcttctagaaagagaaattggagcaagtgatttgctcaagatgtcagctgggagcaaagccatgcatagaaggcaggtcttctgtgtgtgattcctgtgctcttttagccatgttgcttgaggaatatcatagccaggccaagttcatcaatccctggtctctctaccagataccgaggtggccaggtctcatcaaactcagccataggatacttctgtccaggcaaaattcaactcatatgctttccatgggttctctgtctcttgtttggtgcgagacagggtgcaggattttctttttgtggtttagtgttgggagttgattggttgcgtcaatggagtaatctggcatgaacaatcaccctcagcatatcctcactattaaacagcattttttttttggagaggatgtgcattattctttactgtgtgctggccactgcaactcatcataaagatgaatgactgacaggtgacctatgtctggtgtcctaggagagtagataccttggagatgaagaaacatctgttccactctgacattggcaagaaaagctggcttgtccctccctttcctggtgctattgcatgggcttatattattattattattatttgagtctttggctatgtctaatgtaggctgggccccgaggctatttcttggtgcaccctgtgtgacatggtacaatcacaagaaagctgggaggtggcatggggggagcacagaagatcccctaatgtattctcaatcccagttcctgggcacagacagtgctacctgagagactgaggagctaggggctccagaaaggtagaaattcaggttaattacccagaatcttgtagtgttcctgggtcgttctctggatgtaggtacattttctcaagagactgtttaactctttacatctttgttactgtcctcattgctaaacttcacaagagcaggtaatgctggcgtttatgaaagagtgaacagctaataagataggaattcaattcacatggcttggtctgattcaggagttggggtagtaagttaaatcactcactgttcttcagtgagcatgtatgatttgagtccttatgctgtggctatctactgtgtcagatagaaaataaaatgtagcccctgccttcaaagagcttaaaagtgatttcattttgtgagcacttcctgagtgcctgccacatgcccaggatcctgctgggtgcttgaggctgaataagtccatgctgtcttcagcagaagttgtcggtgaccacctatgccctgtcagtattaccctttctgtgtacattgcccagccagcagcacctgcagctttgccttagagttttctctggtgactgaaccacttttgcttgggacagggaaggtgataaggccagagaagcaggagttggtggattaaaaactctgttatttttcatgggggtgactttgaggcacagtcttttctgtctcccagagctccccagctgcatgaactccagctggacacagtgggaacttgctcaacaatacaccatgcaccattactcatttcccccccttccctttctcatgtccccactctcccactcctagggtcacctccccaaaaatgctttcacctaaatccttcttccatcatctgtttctgaagaaaccagactataatatcttccatgctcttcacatgcctttgattgaagtaaatttctgatgaatgttgcagaggacatgcaaagtgctgaggtaaagaagagaatgggtgacagaatccaaatagaaggatcttggaagccctcttggaagaggttgcatctgaattagaattgtaggggttgggttgggctttgttaggaagttatggaaaggaagggcattccaggctgagagaacagcttctgcaaagacctggaggtgggaggaatatgaggcatatttgcaaaatggtaaatgtctgatatgtctgtagttcagggtacattagggtgggataggggaggtgaggatgagggaatgtaggaagaagaatgtaaggactgtaggtagagttctacttattgatggtttgaatgtgaggctgagacatgtagccttgcctttgtgggcagtggtgggctctcaaggtatcttagcaatggggtagtatgtgtcttttaggatgaagaagcaggaataatatatacacaaaatagaaacatgtcaagtgtgaggctattgcttatcctctaattgctggggaatttcaaactgaggagagacaagtgtgagtattcagagcagccagggagggatcaagtgagaggtagaagttgagtctagtgaatgaatagacggtagttaagagaaggttgaagccaggcatccaggacagaatgtgcaaaggctcagggacaggaataatctagctttagagatgcatcatgactttcatagacgctaggtacatgggcctttctgggtcccttcccacctaaaaaactgctagtagttttttttcttaatgattagattgataaagacaaacatgtataataatattatatattaaaacattttctggctgggtacagtggctcaggcctgtaatcccagcactttgggaggccaaggctggtggatcatgaggtcaggagttggagactagcctggccaatatggtgaaaccccgtctctactaaaaagacaaaaattagtcatgcatggtggcgcgagcctgtagtcccagctacccggggggctgaggcaggagaatcgcttgaaccaagaggcagaggttgcagtgagccaagatcgcgccactgcactccagcctggacgacacagcgagactccgtcttggggggaaaaaaaattcttctgcctgaagttaatttttcttttgactttaaacgaaatgaaaacatttttgtagtctctaaagtctcataggtcatgcgccccgtgtgcctgatagagaagtgagccctgccttttgggagccggatgaatcttcatacctccttgaggctaggctgaggtttccctcacctcttttcgtagagctgcagctttggcattaggagggagccttgggctcacctgccaggccctgagtgagaagctcgagggcacaatgtggggtggccttttaggtatacctggtggccggcatcagggtgcccctggagaggagcaaggggacaggagaacgtcctggagcccctgaaattgggtccggctttctatctgtctaggccacctgagcaggctcccrtttgcttattttcccgtatgaatcccttgtgagcttatcctccaaaaggcttgccccgccgtgggggtaagtgaaagcttctctgcctgctgcagcatcaccctccttgagcgtttccactgtcagtgttgctagagaagcaccctcctgtccttctgtgtttcctcggaaatgcttacaaagaagcagaggtttacgaaatgaagtgatatcatccgaaaaaagcctgcgaaaagcaaccatggtgagaagactgcgcaaggatttttttttcctccttcttctcaaaaatagtcaaaacacatgcaacgcatacttgtaaaaggatcaaaaaaggagagaaaattgtagctggcagttgttttccccactgttatttggttgctccttagcttccagctgttgaaatggctagtttatgttaatgggtattttgcctctcctattcgtgttactttactccaaatttaaaaatgaacctgtgactttatttatcccatgtgctgggaaaacagagatgcagccttttctgtctatatgatttgcattgtaaggatgcacttacactgccatataagtacataaaattttcatttttgtgagcagggacatattttgagcctctttttttccagttctttctccaaagttaagaagcataattcaataagtgaatgctgtctcccaatatcagagacccattttctgctgtgatagaagatctattggttcccttttatggatctgaaattgtgattggcatgtcatggtcaagatatcacctagagtacacatccctcagttaactaacctctctcttatccttcttctcaaatgatctttcttgtaaactgggttgaatcatgtgtatttggtttcttaattatagacaaatttctcactggatgaaaagtctgctaattagtgattttaaatgtcatccagatatattagtagacaggtgttattttagaaatacagggcaacatgacctcttgtgttgtarcctatacaaaggtaaaagtctatatggtgttatttaatgacaaaagaaaaataaaatcctcaaaatacacctccttcccctcatatgcactcactggcccattgaagaaccaggttgttatcttgttatctgactggattaagttactatgtcatgactgactacaaatactatagctttatattataatgtcagagaagtttaaagctgaagaggccttagaaattctcatgtctaaccttctttttttttttttttttttttttttttttgagacagagtattgccctgtcacccaggctgaagtgcagtggcatgatcgtgatctcagcactgcaacctctgtctcccaggttcaagcaattctcctgcctcagcctcctgagtagctgggattataggcacctgccatcatgcccagctaatttttgtatttttagtagacatgaggtttcaccatgttggccaggcttgtcttgaactgctgacctcaggtgatctgcctgtctcggcctcccaaagtgctaggattataggcgtgagccactgtacctggccctaacttttatttatttattaattaaattatttatagagacaaggcctcctgcctcagcctcctagagtgctgggatgataggtatgagccagcaagtctggcctcgtgtctaacctttttaatttaacagttgagagaactgaggttcagagaggttaagtgacttatccagatcacagyttgtaggacgacctaggcttgactccatgtcttcatttcccaagttttgggccctttctaagctctgaactaggctactttatttagattcagggggcagttaccaggtgactgggctaggcagtgtgggtattctggagttgagtgagacatggtccacctaagaggctgtctattcagctagctctgcagggggatagggtcagaatataagtagctagaatamcaggccagtgagttggtgtcataaaattggccaccgttcctgtggactgaatacttaatgagggagtggtcctacctcatggtatcagggaaggcaccttagaagagacaatgacatctgaagtgggtttggatgtacagattgggcttttataggtgctagagtaggtcttattgggcccattggtattaattgtgtccaggaagacagagacttgtctagaggttggaagtacctgatgattctcatagtcctgctttgtcaccatcttggctttcagctctggggctgtcaggaatgggcatggccattgccaggcctatgtgtgtgtgtgtgtgtgtgtgtgtgtgtgtgggtgggtgtgcatgtgtgtataccgaccaccatagcccgtgagccttccctgaaggatgctgctcctgcaagcaccaagtaccaaggaggctaagcagtgggtgcaggcaggacatgcagtgcctggcagcagagactgccaggcacacatggctattgctggctgggctcctcagagctctgggcctggcaagagagaggcagcaggggtgaggcagcccctacctggatgggatggctatttcccagcgcctcattccccaggaggtcacctcgtttctagaggtgctgcctcttgccttgcaaacagagtcagacctgccataaggccacaggggacttagaaaaaccgtccccaccccaccagggctgcctggcacataccctctgctctgccatgcttttctgaatctttaaaataagtttttcattaattttagcatacagtgaagggaagtaacctgtggcttataaataatggcaacagctttatggaaacacctaaaaatcaccaggggcacataacaagaaagttctccatctccaggtgcgaaaacacgctggtgattacttgttgagcaagaccctgtcagcttttttattacaatacattattgggtaatagttttaaaattatttatagaaagaaatcgagctgtgccgagaattccatcatttaatatgttgtctgtgaatctcattagcctttttagcctaggggttaggaaggaaaacagagcgttggctgtattttgaagattgagcactatatacactttttgtcgggggcttgttgaccttatgttaagttgcttctttgcgagtctttctgtgttacagctctggtttccatggtatttacataaacctagcaacagtttgctgtgtagaggcagtggcagggcccaccatctcctctgccaagaaggaggagcagcttaggatgcctgctgtgcaggccatcaatgggcaagtctctttcaggtaagttacagaataggtaagaattggggtgagatgggatgtcagctgctccccagtgtatgtgtggcctctcctctgtctccaggtgacagaggcagctccagtattctgtttttgaaacccatccggtgagttctcccatctagccccaggccaagcagcatgggtctcggcagaagctcatcctgggagtgggctgctctagagaacacgactccatgctgtccccaggcctgtgttctccactgaccccacagctgcatggccagtaggccttaggctaagttcaggaaggacccatctgaaatactcctcctaaatgaagagccgttctctggtataagagggatgttagtgtggtcagaacaaggctaaatccggaatcgggagagtgtgacaaatatcaacgaatggattattttcaaatgtgatctctctaatcagctgtgcagggtgataagaaagagcaaggggcttggacactggccccagaatggtgcaatgagttctttatacctcacaacatggcaggaacatttaaaaaacaargtaaaaggaagtcactgggagcaaacagaagaagtgaagagctgacttagagcacagtgaccttgggcaaataaacttctataagtctcggtttctttctccataaattcagaataatggtacgtaccccgccttggtacttggtgcttgcaggagcagcatcctgcagggaaggctcacaggctgtggtggtcggtgcacacacatgcacacccacacatgcacatgtgcgcacacacacacacacacacacacaggcctggcactggccatgcccattcctgacacccccagagctgaaagccaagatggtgacaaagcaggactatgagaatcatcaggtacttccaagctctagacaacctctgatttctgtgagaacttgatgagatcatggaaattaagcattcagagcagtgtcacggctcactggggtcgagcaagtagaaaatctgggattcaaacccagacagtctagccgtagaacagtggcctttaccactaccctattgtattatgccattctttcattggtataaagaactatttgagactgggtaatttatttttttaaaaagagccttagttggctcacagttctacaggctgtayaggaagcatagcagcatctgcttctggggaggcctcagggagtttccaatcacggtggaaggcaaagagggagcgggcacatcacgtggggaaagcaggagcgagcgagagagaggagcaggaggtgccacaccctttcaaataaccagatctcrcaggaactcactaggacagcaccaaggggatggtgctaaatcattcataagaaatccacccccatgatccaatcacctcccaccagaccccacctttaatattagggattacgatccaacatgagatttagaagggacacatatccaaactatatcaactatgatgcctccaacaccttcagaagcagatgtcttgaactgagccataagcaatgtggagaatcaagccaggtggagaagaggggctttgactttggagcatagagagcatagagtaggtaagtatgaatgtgaggccttcatgggaacctgccccattcttgcctttattcacctgtttagtttaaagacgttgattgggcaccagttatatttcaacccaggcactstgtgtgaagaaaaaaaaagatggagcagacagttcctcccacaaatagttgggagttaggagagttgtcctgcagagtaaaaagagaaaataacagctttatgagtagttaccatgtgtcaggcgtgattttgtgggctttacgtatcttaaatcattggatcctcacaagggccgtaggaagtaggtgccgttattaatgtctattttagacaggaggacctgaggttctaaagaggcttagtgaattgactgaagtcatagaactgaccggggacaaagccgggatgcgaagctgggcagcctggcctctgattcctggctctgaaatttctctctatggcctgtatgatgctaatcatgggcagctccaaagctgtcggggatgtttagtctaggggttgactaagaaacaggagaatagtgaaggctcaagattcatttactcagctggtctgcaaatttttattcttggcatcatttggaatgtgtttcagcagtgtagatgattttatcttacaggttttattcagctcagtgccatgcaggtgcaattggagcatacagatcctgtgcaccgccactcgttgagctgtgtgtggccaaacacaggtacaggaaagctcagcacctgggcctttagggttttgcctactcagtgttctaagatgtagagatatttctgtaggagggagtgatagtaggtttttggatccaaggaatctcagttagggaggtccttggagctcatctcatgaaaactcaatggcttaccccccgaaaaaggctttctgaaatctttaggcattctgtaaagttgtatctaaggttaagagaattgaaactgcagcttttatggagatgtctgcctggattagatatgtttcctctttctccctgggatgtgccacctggagaaggtccagggagcagccctgtggcttttgagaaatggttcagtttgctctggggccttctgatgcttctctgacacrtccgagtaggcagcatttttttttaaacccttgattttcagaaacgcattgtccctgagttattaataattatctctctctcctctctactctttctttctctcactctgaaaatcaacatcaacttgactaaatcccttgagttgagcttagtccagtttttcagttttcttctgcagctgaacactcaatgcttgattctcctgggggttgggtttagggccctccctatgttcccagtctctaggcctagtaagtacattgttttggaaagcctcttccctttcagtgctggctccctagagaccttcaaaacatcttgggtcagaaagtgcaatccaagcaagcctagatggtacaccacccccacccaaaagatccggatttgagattacccccaggacttttcctgttgatggcacatttgacttacagtatagtaatgtgtagtgctttttctctatgagcacttcataagcatccttcggtgatcatgacttagaaatgattggagaacctgcttgttcagaaggccagatgtttcacaagaaaatgaaggacagaggtctcccagtcagcaatattagtagtcttgggataatagcattggcaggagtctaaaagtttgtctgataccaactccttgctataacttatccaatccagccctctctatgcgctttacagataaggaagccaaagtatatagaggaaaattcccaaggatagtcacatagctgattgttatggcagagctgcgttatccttagcattgtaccacattcctccttcttctctggctctcagattttctagcacaaagagcaaaaacaaaaacaaccccaaagactagaaaatgaaacacagctcagcctgggttttataatgccagtcataggaggtgctcaataaatgcttatgacttgctgcacccccaggaagtactgcctcttctttatgtgcatagcttcgygcagttgcaggcatgattccagcctctggagatgtctgatagggtgtgcggatgggccatgttgttccactagagtaatttcctagagagaggagagaagggagctctcattttgtatgtggtctgtctaatgcctctcacatccaataactttaaaaccaatcaaattaataatgtagggagaaacaaatggattcactctttagatatttaaacagggatatttctgccactgacatgtaaatctttaataggatatgagatttggcaataagaaaaaatgccaagttgctggagacctggttcttttgtactattttaggtccaatcattacctcctgacattaccttcctcaaataggtttatttgttgaggccctactttgtattgggtagtgtgtatttaatactgggatgtaaagtagtggaatatatggtacttaccctcacaggacttccactctgctgatgacagacatatatgtgtagaaagatgaatacaaatacagatcagtaagtgcagaatgtcagcctagttctgtatgtaatcactgctgcagatattcatgggaggaatggatgatgtgtagggctaattagccttcaaatagggaagctcatgctgtgaaatattttcacctggtcaaaggatgaggggctgaatcttgactcccataggagacaaaggatctggagagattttcagatagtcactgaagatttccagttgaagtagaaaaaagctttgtgtttgtgtctgtgtgcatgcatgtgtgcatgtgggcatatgtgcatgcaagcttatctacatggttgtatagacatttctgtcttttagattccaaagtgacttcctggagtgatagtgaggctcctcaaaacttggtttaaaaccaacctgaagcattctttattttcaagatctaaaatttctagaagctcttgttgtgaggaagttttcataaaaccatatttacatatccccttcctccttctgatccttcctggcatttaatattgataaacttcctattcccttgcccacctctattttctgtcatctggacttattaatgtgtcttaacagtaaactcttgcatcctccaattgttctcctcttccttccccccaacattggcctccttttactttttatctctttcgttttcttccactatagtgagttagaagaaccaaatgtaaacttgtagcaagtctttcttctgggttgatatctgtttcctgcccatcctggtggccagacttcccaacaatgggggaaagtcatggcgtctgtttcattccttccatgctccatcaagaagaccgctttttaggatcaatttcctccctttctggaaaattgctcactatttagaaagaagaagtgttcctactctgaagctttcaattgttgccaccttaatggtctctctcattattcccaggcatgacagcatgagttttggtttggtttgccttccttgacatatcagaatggttgagatgaccttgcttgatggaccatgggcataaaggaactggttggttgagtgtcaagaccaggaaaaagtatggatctgtccttgttgggagccctcttgtctacttgcttggttcttattagccagtttggaggttgccttctgccatcttcctttcatctgtgtggttcatcatgaatcctggcctagcttctcctccttaccttatgcttaccctttgatgcagagttccaacattaatgtctgcctttccaacttccacatattacactgccctctacttcccactgtgggcataactcactgactgcaggactgtttctccagaatgtggatgagacctcagaatccttctcagcaatgtcctgagggtagacaccagctgatcagttttatcatgaaaattgaaacctatcttctctccctggatcttaccaaagtactcattttcatcttcagcctagatgtcttgctagacttttttcttccctattctttccatctatttcctatactttgttcttcatctattattggtggtgatggtgatatccatatttatcacactcttacagtgtgccagaatataaaggctacaggtatcatctcatttagactttaaagtcactctaagggatactgatactattttacaaatgggggcccagagaggttaagtgactttcctaaggtcacataattcatcagtgtctgagctgaacctgaaacacactctgcccttttctccctgcctctgcactaccttttacttccttagtacctcattacatcttccatagtcactgaattttattctttgtcattgcggcttatttaaatactgactgtattggaaaaattaaaattatggtatccttaataaaataacattgaagagggtatagatgtctgcactgggaatattctttgtgtgtgaaacaaaaattcaacttgttatagtcaatgaagtcaatggttcagttaataatgcctctaatggcataattctgctcagtgccggtgatgggtaccctcaaaatcagagactagatttaatgacaggacatgtagaaatcagcgctgtcataaaaacagccgggagaggaackccataggagaggaaaacccctagaaatggcttgacgttattggttccagtctcataaatctcagtctccgatccttcccgtrattccccctttccatccagctgcacctaagtgttccccctttgcagtgaatgcttgcatttcccagtgagtttcctgtgcttagagatttgtttttagatcaatgccattttttatgtgttgctcatgcatggaagagctctrctttctctgcttgttctaaataggagaaaataattttaaagactccttttaaggtgtcttaagactcctctgtgtgtgacacccttcagaggaaygrccttccattttagggaytcccttttttgcacccctcccttacccccttgcattggagtaagtctcttgagactcactacggcctaggaccaggatgtaggccaagtggaaacacaccaaagtgatttaatagaaaaggtaattcctattcaaacgggatagtcccttattcatttcctcggattatcatcaaatttatgtcaccagcaaaggagctttattgagtttcacagagatattccttttgctctcattgtcgttagttggcacgctgacattttcatatgtgtctcagctaatgcctcaaaattactccatctacaaatgtaacaattgaacagataattttaataagattcagcttgacttcagactgcactccttcctttctttatagaatgcaaattgtaacctgtttttaaagccgtgcaatgcagtgaactttaatgggatttgacaacatcatattaagcacaacaactacgcataatgtaccgaaaaattggacgtgaaattggaaacatagctgagaacaaagtaaatttacatggtttggtagcttgaatgtctgatatcatattctctcatgcaagccccataaaaaagcaaaggatttaacaatggatatcagcagaaagtgcttttaaagttaaaactgatggatggcttgtcaaaaaaaataattgcattggttggaaagtcgggatgcgtgctgagggggagagaacaggatatacagagaggatgatgggaagtgacagtggtctgtcaggaaggactggctgcccagaggagtgtgaagccagagctataaggtggcagagtagaacaggctgtcagagcgggaaagtggctttaataccctgaaaagcaaaggaatccgcctgtcagctttgctcagccgtgctgaaagaggaagagaacatggcataaagttagagacattaaacaagggggtgggggcgcagagagcagcgcggagagcacaggcagggagtgggaaggaggtgggggaggcttcgtatgtgggtttctggatatgttctttcctattatattttcccccttttctcaagggccaacaaattaaatttgaggggctggggtttctctgcttttgaagaaacgggtgatttaagagagtcacatgctcgtcccagtggctgccactctagttgaatgggtggctttcttacaagtgcacctcgggttgccttggccgatttctggcttttcagatctacagcctcctctgctgacctttctcctcatcggagtatgcagtccattctcccagagatgacaccaataccaagtcgtcctgggactggcttattgtctgacaaagtgctgtgaggatgtgacactttagctatgtaagaggattgtgagtaaaacacaataatctgatttttttttgtaaattttttttgccctctcagcattaggttttgaataatttattattccttcttcatatactcctggcggtgaggttaatttggtcatcttgcaggggcctggctggtaatgaacatttttatatcaggcctcggagtactttctccgtaagacataccacatgtttaccacttaattgcccaagttgcttgagagtgttagcgtctgggggggttggaatatggcagtttattgtacagaaatattttgtgtatttgatcttaaaaaatatattctgagagacatccaaattcttgaactgcatatggccccaatataattttacatttggtttagtagtttggagggggggagcttctttccaaagagataattatgtcattgtggaggaagaaggtgatggtggcagtggtggtggtaatggtggcagcagcagacacttacataagcattttctttttcttttttttttttggagacagagtctcgctggagtgcagtgacacagtctcggttcactgcagcctctgcctcctgggttcaggtgattctcctgtctcagtctcccaagtagctgggattacgggtgcctgccagcatgcttggctagtttttgtattttttgtagagacaggttttcaccatgttggccaggctggtctcgaactacgaactactgacctcgtataatctggctgcctcatttattacataccaggcagtattcatttagctcccataacaactctagggataggttctattaatattgcctctgtgcagagaaggaaactgagccccagagaggttaagtaacttgcagtcattgaattagaattcaaattcaggtagtctggtagcagagtccattcttttaatccatgtgctaggtacacataggcatgtggggaaccctgaaatgccaggtggagtcctgttgtgcctctattattcttgtgtgtctaaggctttctgggaaggattttattagaactgggcatcaactgcctggaaagcaggttgagccacctagcagggagcaagaccacagagctatcttctctgtgttagccgagtaaaaagtggagcaggggagagaaaagatgaaacagtggcaggaggatctttcctggtcacaaaagttaaccaacttccaagttagattcaaaacacttgtctgaaatttttcatctagtgctctgcagagacatgtatgtttacactctgcattcagttctaggttatagtaagccggtttccagaagatggagacctgcactcctggttttcctagaacctagctggagaagccgggtggcagcccgcccacctttttatcttgattttatgcagtatactatgaaattgctcactaaagagattaattagtggggtcttcacctgggtgtttatgggcatgtttggcagtttgggattgctcccgtgttcttcaagcctgcagggcacgtcttgtggattgcagtggtgtgctaccacactctagcacccactcatgctgctgttattttggtttcctgggcctgtaactttgctgtaaacaagcaaaattgctttctactcagtgggctgtttcctgacacagcaggagaccttgttgtttttctcctggaaatctctgggcttctcctatcctatctgatacttagaaggaacccttgcagacttacatattacagtaaggcgcacacttgtcacggatctgggttgacttcagtgtgtctttaggaagcctcccctagtgctccacgctgcsctctggctgcagcaaacctaaaagctggagagcaatactgccagtctcaagttgcaccatcagggacaccactgagatttcaactcttgaatcaaagaatttaggattggaatggatagagcttaactagccttttcagtgcctcagctcaggggtctccagcgatagggaattcattatacccagaagcagcacaagccaacttatctgagacaagtagggtttgttcttaagatgagccaaatgtgtttctctagaatttccatccattggtccttttcctaactccctggggctacaaagatcccaggtgttaaatttgtgcatcccataaaccactgtaaaactgtataagtcttcagcctgtagagatctgcctgttttctccttcacttgttcgttccatcatgttcaatggagatattaatagctagagagagcttctatcaagactcttccctcttcctcttctcctcacttcttccttccagcccactcttcccaaccttgctctgcactttttatggctcacctactctttcaacagaatccaattccttgctttaatttcaggtagccctgagtccagaatttaggtgttcgaggaaggacctcctgaattgaggtaagggaataagacacattccccaaaatgagactgtaatcaagtggtgctatttccactttgcaaatgaggtaactgaagtttagaaaggttaagttacttgcccaaggacacacagctagtaaacagtaaagtagatttggactcaggtctgccgacaayaaagcctcagctatttacaaagcaggtctaatgtactggttataattatggattctggagcccakcaggcctgggttcaagtctccatatactaattggtgaccttgggaaagttatttagcctctctgtatctcagtgtcctcattggtggaacagtaataataatgctacctgcctcacagggttgttgtgaaaattaaatgagaaaaagcatgtaaagcagttggcacagcacctgtatgtgataaccactcagtaagttttagtttaacatcatcatcatcatcatcatcatcatcatcatcatcatctatttttaaaattatgatagagaatgtcagagctttgcacggttggctatggagcctgaaatgtggccacctaactcttggggtggggggtgaattcacgcggcagggagctgcaaataaccctttggtggatgctttacaatggaggctgggtggggtctgggaagagtggcagtggctatgattattattttttagttttgggttttttttttttacactttgagaagattgctacagttatctggaaatctattgctcgggcaaaagcaggattgcgtgatacaatttaaaaggccggcagctgcatttcatccttttcacaagaaaataaccccttactccagtgaagctaaaaataaaaatggcagtacatttggcaaccacgcttcttcctttattacctcagcagtatctgaataaaatgtcttattaagcaagatataagggcaatgaaagggagagtaagtcaaattagttgacatctaaagcatggtgcatcatataccgcgagggtagttactgtttagtaaaatggatttaatgcttaatataaatgctgatatttagatggctatattttggcaactcaggaggaagagaggtggtttttgagctggtataactaggttttaggtcctttcctgacacaaaccactcatgtggcactgggtggcatgctccataaccttgggccccacttcctccatgtgctaaaggaagggtgttttctggcacccagtggctctgtggcaggatctcagggtaatctgggaagagtggcaaaaacagggctctgaatacccaccccactcagacaggtgcaacactgcctgtatctgctttacatattgggacaactgggtgagattttctttggggaaaggattacacgaataaaacataggttgtcaaaccaccagatttgattatttctaaggaaccctacaattctcacctttgaaagttccaccatgccaagtttgaactggctctgaaagcactctgggtcctgtttcagctctaccacctacagtgcccagaaaggacctcggggtccaggagacagggcagtgcactagatacagcacaaggtagggtgtgaccagggaagaaaagtggtggcaaatcccattataaacatggatggatgcaggcttgtgtgcctgtatacatgtgtaagtgcatatacaagcatttaaatgcatgatctatgtgtgtgtgtgtgtgtgtaaatgaatgcgtttgtgcatatgttggtagaattcatgtacaaatcggtttcttacatttgtgcatagagaagatgtatgcacagccataccatcgttggccaactgttgtctcatttatgccagccatcaccttggtgggttaaccttcattttcgtggttgaagtgaggaaactgagtcttacagaagctaagtaacctccccaagttacatggctaacagtttgcagagtagagggatcatactgtattaggtatttgttttatatatgcctgggatagtgccttactattagggccctggtccacatagccctcaaatttctgtgtgatgaggagagtctcatatatgacagggaccactgtgggttagtcttttagaattttggttttgtttgatttcttgtttcattacttttgggatcctgtagttgagggttacaatgacatagcatgaccagggcttatcccaaccactcttttcccaaaaatgactaaataatgtcgtcaggagtttgttcaggatttccttctttgagagcttccttccaaaacttcttttgtgacagagttgggagcctattgaaaaatgaggctgatcagtcacaagtcctattatgcaaagtcattcttaggtactattggcaagtaactgaatgcaatcctagcaaagaccttaggaaatcttgtttccttttattcataccatgaagcacattgaagactgtcagtcatcctgcttccttggaatcatatgctgagaggcttttattctgaagaaaatcatgaaacctgcgaatagatttatgctctgcttctaatggttcatgaagcctaagtatatctaataatagttctttcacctgatttgcctaagactaagatcttgtataaacaactctcaccagaaccatcaatcactgtttaggaatttaaattttaccaactaaaatgagaatggaggaagggcaagctgttttctgtgttgagcttaggccttttatagatacaacactttggggaatttctcggtgtcttagttggagatgaggagaagctggagcctttgcacactgcaggtgagagcatagattggtgcagccatttggaggaatctggacgtactagctaaataaaatatatgtaatgtatgacagaggtcaactcctagatctataactcagcaaagttttatggtaagcagacattcgatgatggtgatgatcatgtctttgttgctggtttcagtgattgtgactgttagactgaaggctatttgagttgtagtttattgacaagtggtcaagacccttttcagggtatattctcaataagccatttgtcaaagttgctgagagagccttcatctatctccactcctatgcttcatacctgctatatattctttgagtgcaatgttcatttagttgatgttgctggaatgtttttgtgagtgttaattgtgattcttagaaaagaagtaatcttggacattaaaaacatagaatccccaagttgagatttgagattatttaattcaactaataagcctaataagaattccagctatagttattcttataggtgatctgcttagattctcccagtactgggacatttgccacatccagagttattagaacattctaccagggacagatagactacaaagtattggtacyattaggcaaagttgcaggattttgccaactgaaaccccaaggcattttctaaggaacagacaagrgacaattatgccatcctatctagttcccgctactgcatcaatttgcttgggagctaaaactgctttttactctaaaaacaagttgaaaaacctgagtatctctccagggtggaatcagctgcatatacccagggagataaaacggtctgaagatgtcatgggcattgtgaatagggacagcagaggttacatccagtgtcagaagtcagtcaactcataggcattcttgctgaagaaaagaggcaggaaggtcactgccaaatgtgaccttgcctgaacatataaataactgttcatgtgtctaaattgtcatcattaattaagtagtgtttcatattaaaggctctcagtccagaatctccgttactttatagatgtctgtagcctcatgaagacccagatttctaggatatcagcgggggaatcatctcaaatgatgatagtaatagacatcttggtccctcaatagaagatgggattgccaaaatacttctggaagtcattactgatgttataagtcaaggatctgaatggaaggaaaatgcaaaaccagaatctgtattatttccttcctctaagcttctgctcaaggaagtccacccaagaatgctggtgcatcagtgagactctttagcagagagaagagattccaggcctactgatgcttggaacagccactctcatcagcaatactgagctacctgcttctcttgctggggaagtcctgtccatggagccggctttaccagctgtgcagtcatactcagggtgtgcaatgttactgatttaggagcccatgttcacacattaggatcaacccaaaccatcatatcctattgtatgtcttcttcccctcaccatgtcaaagctatgttaggtcacgaaatccctgacagctcagtcacacacagagtgcccagctcaacaacagaaccagaggttcatgaagtcagttttgctgttattgtgagaaaagacaaattgcaaattatctcaataaaaagctgttatcatttatatcaataacaagttttttgggttctcatttcaagcttgattatattagtacatttatagtgtcttttgttttttccctgtggctgtactttcttaagaagctggaagactaataaacactgatgctcttttgccacagatttcatctatgattttgatttaaagctttctgatcagtatagctgactgatcaagccacatggctgcaaattacttatcttgggttctccttccaattgggtataatagaggggatggctgtagagaaactcattaaagaactcaactatttgggaagctgaggcaggaggacagcctgaggccaggagttcaagaccagcctggcaacatggggagacttctggtctacaaaaataaaaataaattatctgggtgtggtagtatgcacctgtggtctctgttacttgggaggctgaggtgggagatcacttgagtccaagaattcaaggctgcagtgagctatgattgtgtttctgcactctagcctgggcaatagagtgagactctatctcaaacaaaacaaaccaaaacaacagaaaaaaaaaccaatgaaaaagaaactcgactaatctaagcaaccagcctgagtaaattatctgcccccttccatgaaaccttgaaaacataaaatcatgttgtttattccaaaggctagtagttatcactttatcttggctattctaaagtgcagtacttttgtgaattttgctcattaagtaacttactgaagttttatttaggagtctagaatggatgataatgttgaagattgttagggataatgtcaagctacttgacataatcaaccaaaaatgctgtatatgaaaggtgttttgtaaaccattaaattacttaaccaaagccttagtcaagaatcagtattaattcttcagaatcattcaggcgtagattccttttgaaagtgacttaagatgctcacagatactctagttctagccctttctgaaatagtcacaggtgctttcaacacatggctggccagatgctatcatttctgacagtgggtctgaatttaaggaagttgtggacaggaaccttatctgagctgtcaccatcctgactcatcaccttcaagcaaataatcaggctaaaaggataggctactgggacatcctaggaggatgctagaggagattggccaacgagattcactggactcttagtctctcaacctgtcactccacgctcatccatggaaattggctctgattcattactaatggagaaatagttcaagacttgctttgcatccctacacctatgtttggatgaggacttcaagagtgagaatacatttcagatacagttatggctaaattgtagtctttgcatgaaaaagaaatgacctggtccttgttaagagcagtggattcagcccaaggtggtttcctgatatagcagttgaagttgcagaagattcagagtgcaatgtatgtccctgcaagatactgtagggccagtaatgtttgtagcagtaattcctgtctggtcatgcatctgctagaatgtcgtatctagtactctgcacccactaccacctcgtagaaatagcttcacaagttatatggaggattggtgagacaggtgggagggtattcgctccaaggaggagaatgctgtgagatagccattttttctgcctttatattcttgttggggatatgttttttaggtgcctgtagctgtctcctgctgaatgggctttgttcagagatgcatttgcctgtataagggttgtggttttagaagactgcttatctccctcctagttgctcactcttacataggacagccatgtccagctgtaaaggtaatatactgcacagctgtaaacagcatccctaagaacaagtacatcaggaaatgtcttggggttcctagtagcagttagtgatgagaggaccaagcagctccagccttcttggttagctctgtggccttaggtaagctattcaacaatagtagtccttcatttctgagtctgcaaaatgtgcatgggtcctgggtaaggagaaggcatcacctgctgacctaaggaaagtgaaatatgagtgaatgcctttatgctttctttatggcataaacatgttaattacactcattacacacctcagagtgtccagtgccagcctttcccctgagccatttcctttgctatggacctttcggttttctgggacactttggtaaaaggatggagacagcaattaaatatgccttagaattattgtcattccatgttttatttttgccttgggtgtctttatgggagagaggaaaggccaggagaggtatgggccagtagacccctggctacccttggaggtgtcctttctctgaaccttgagttgaaagcatttatagggaaggaaaaagcttagatttcttctgtttaaatacttttcttccaatagaagacagagtgtgtgccagtgccagagacctgggtaacagtgagaaccttgaagaggcagtgagggcataaagggtgtgctcctggctagtggggaagagagacaagtttggtgcaggggtctaggtaccactcggccagcaggatgggcactctcggtcagtgcctgcaaatggtgttgatgtcagtttcctgttcatctgggaatgtcctggcaacacatgctggtttgtttcaggctaagccactacctggaggcagtgtgaatgcgaagaaattgggttgctccctttttcttttagaacagttttcctcttaaatagttctgtacaacagttggagccaatctatttataactgagttttattgaacctgatggggcttcactctcattgagtccatcagcggagatttccctcttgggcttttttcatggcaggagggtttcctggcttaatgggtgctctgtcactagtgctcctggtccctggtccagcttctctcttggtttgctctcagtttctcatcccaaagggaactcactacagccactcccaaagaaacaagaatcctttttctttcccgtctccatccttcccttactcctgccactgcattctgctactctctccccacaaattccctcaaagccttgaggatcccaagaaagagaagggcaagggtgaaaaatttaaaactgcccaagatggatagtgaaaacaccatgcataaataaatttcagcaaatcccccggatgaacaatgattgtgtggttgaagacctggctgaataagtgtgtcaggtactgattggaagcatgataaatgcaatgacctaacaaaggattgacttctcctgcagacaggccccttttaatggatggaaagggaggaagcttcatttagaagggaaaggctgtttgctgtgcagatatgacaarggggaagtagacaaccattgatttacgtttgggaatgacagttgaaaaattcagcaataatcatgacaaatgagaagagatgcagtcagaggaaaaaatgtcaatacgttaagcctgcaaagaaatgccaaggtcacagagaaaggttcccaaacttctggttttgacaaccttaatggaaataataggaaagatgagggttcaggttaaaagggatggcagggcatgaagggctgcaggtgtgggtaattagtggtgagtttggagagggagtggcaggaagtccttctcccaccactgggaagccgtctgtccacatgcaactgaggtgcttcctgctgctggcaggcctgccctcctcccagaggtttggaaaatcaggcaagttattttaatgtcagtagtgacagcagaaagagagaatgtgggctgggtgtgcttgtgatgcttgacggggcacatcaaatcagaggtttagctctgatctcaggactgcagtgtgtctgccccctcatttttatttttattttattttattttattttgtttaaaagactgattataagtgagaggcagtgagctctaggttatctgcctggttgagtttggtaagatgtctccttgttttatatttatcattgttgtaaagcacccggtacattgagtcctacatttctgcactctaataagagaggcacaatccaggatgttctgtctgtgggcgtgagaagtgggtttaaaaatgtgcatatgtggatagggagggaggtgacctgggaaggtgtggaggaatcctcagacctgggtcattgtttactactaactctgtatgtaaatgtggacaatttgctttacttctccagagtctgacgagctcatctttaaaatggagaaattctggagggaaaaggtttctgacattctcttcctggtatataattccaggattcaatattatatctagacatggtgtgtggttttaggcctatttgcatatctatttgtatatacaaatacatatctcacatatttacccgcacatatctttttgcttcactgtgttggtctgtttgggctgctgtaacaaattaccacagattgggttggttataaacagcagatacttatttctcagcgttctggagactgggagatccaagctcaaggcagcagtaggttaggtgtctggtgaggtcttactttatggttcatagacagcgacgtcatattgtgtcttcacataggggcaaacaaaatctctctgaggtctcttttataagggcactaatcccattcaggggggctccactcttatgacctcaccacctcccaaagatcctacaccctaacaccatcaccttgtgggttaggctttcaatatatggcttttgggacacaaacattcagatcatagcattcagccatgcatgtatttcagtattttagtctgcagttaacactgtcttctcatctttattttggtttattctcatctaaatattgtttatggacttaaccctcaatattataaaatcatccttctgtttactgggtaaaaatgatgactcatatagtttttacttttgggggaagaagccctaacacccctaaaatacgtatattgtgaaaccagttaccagttccaagaatgacaagatactctctgtgggaattcttcagcttcagacaacgtttgaactatgactacatttttgctaaatttgttgaacagagataaatatttttaaaatcttattttatttatgtgaaatcatgtgccaggaaaagctccaccctaaatgaaaaatgattttattttaagccaagcaactccttttagataagccttgaagagaagttatctcatttaaaagaatgagccattttggagctgctgttgtatcacaattcctcttgtcagccgagtagcttgggggcctggccctcacagggttatccccaagccttgtgtcaccactggcacgtggctgttttcatttgaattgtttgagcatgtgaaagttcaaagtaaagcaggtgctgtgtttgaaagcaacactgccccccgtaactcaagcatgtgcaccatcgagttgccaaaagctctccaatttccatcagttaagacaccctttaaaccatagaaatgaaggggggcaggactgggttataaatgagtgggatctggtatttgagataatcttgaatctataatggtttcttacgacttcacttccacctggggctgcggagcgggcgtgtaaggaaagaagcctcttagattaaacattttctaatcagctttatcactcatatctgaatttatcttatttgaggaaaatgccaatatattagcaggcatgtatgatacacaaggtgaccctaccaacttaatgacataatacattatccttaatgaagtcaatatcttgtcttttagctgtctgtctattggggcgattaattgcagtgtcattaaagttagctctcttttcatttgagcttgacaagtcgcataaaactaatgttcttagttatcagctactggaataggatggaggatggaggaaattgtaggacaaataaggggtactgctacagctaacttgaaggactttttccagtgactgtttctttaggtctctcctttcccaggctctcttgttaggtgaaatttaaggcaaaggtagatggctctgatttagccaagggttcaagaaggagagaagaagatgctactgagaattacacccaatttgggagattttgagccatttagtaacaggagcttgattactgtcagggtttctccactaaataaatttgccacgttacctcctagaccaagctgctagcctagcctgagagaggagccgataaagaacacttgcaaccatgttttcatttagctttgaagtttttctaatttaacaggctttttggaagaagggaggactgaggatgggagaagggatttgtgcccgaaccatgctttgcaaatggttccaataaacaccagctcatcatgggcaatgtgggagctatagcgcctggtccggcactaattgtgaagccaaagcatcactccctgccttccccctacctctggaactacgagacaggatggctgtaatttacagtgtgttatctttgtctatagcggcaagatgatatgaagtaaatcaaggtacgagtaatgaaagactgagaatttattccttggagcacactttaaagtgtagtatctgttatagtggcactgcctgaagaccctgaaatgagacttggatgaagggcaataaagcagcatagaggctcatgttaatattgtttgtctgaggttagtaattgggttctactgatgagttgtgtgaagacaaagtgagaatcccagctagtattgtaaatcttacattgttggaacaagaagcaatcctaacaaatattgatcctctccgtgcccagaggcgaggagggaagcagcgaactgcagagcactggcctgtttcaatagcaccaattaccttagtgaaaccagcgctcggcatgaaatcccagggtggccgcaaacgrtgaattagccatgattaggctttttagatggatccccccaaaatcatgccagcttaacattctgtctcaattatccttgtggtcctaaaaacatattttgtgtgaagtgataccttccagtggtgaggggccctggacctgtgtgggaaccagatgcaaatatatggccagctgctgccttcaacacagaggggctggagtatgtgcacttgagagtgaccactggacagatgcagctttccactctgaattcactgaacaccccatatttggggacacataccccacaagcatttgactttgttgttgtttttggttgtgttgtgttctgttttccctatttgtcgtgaattatgtcctaaagatccttggagagatgttctccaggggagaaaaggcatatctgctctgtgattttggggggctggcttcctgttcatttttaatgtgaagatctgctaaaggtctgtgctcatcttgtttggatacacagtctccttcctgggaatcttccctgagttctcactgggttgcattttggacccatgggaaagagagagtgttgataaaacctagagaggtcacattccactttgttacttcctaggagttcgcagcttttctctcctccattacctttggctgtgagtgtgcagtcagtactctcagaggtcattcctcaggccagatccggactttgggctggggtgaactaggtaggtatttggctctcaggcttcctagtccccatcctctgtacagcatcaaccttgtgcacactgcccagccaaatggctttggctgggagaagagccttccctgggggacttcaaagcatgtatttggtctttgatatgacactgtgacatgtttgtaccaacacacgtgcctttagcagaagaaagataacatcagaccccccaaatctggcagagggtgagcaagagtttggatgaagagaactatgcaccttctgggactaaaatgggagagggcacattttcaggattccacgacccagtcattaattaggtgatgaattcaacagatatttattgagtacctaacttaattctggatacacagttgagtaagatggagtttacattctagtagtgggaggtagcgatggtgatggaatataaacaaaataggggcaatttctgatgtaaactgaaaaatacagaaggcattattggggcagtaagcggctgggggtgggaagggcgtgttgataaccaggtggactgaaaggcctttgttctcctcatactacacacctggcatctggagccacctgtcccctcatgcatctgtgcccagtcttctttctggtggttgctctcacactgttctgaggacagctgaagtgccctggaccccatgtgtctgttcattttccaaggctcaggtaaaaagccgtgccttycacgaagccattctggtttccaccaactaaaagtgagagtttgcaccctgagttcctgtgtaacctcctatctctgttccacattggcacttggcactttctgtcttgtgttagagtagctttgcgtcccatctcatcgccactccttgcctgtgagttccttaagtacaggaactatgtacctataatatcttatccctgatatactcagcagtgtcttgtgcttagtaggtgcttcataaatattcattaaataaaataattacagagaaaagctagggaaatttatggggtgtgtgtgtgtgtgcgcgcgcgtgtgtgtgtgttgagggggtgtttgaaatagtctggggtttgatctaatacatagaaatgcttccatgaaatagaaatgccttacagttgtgtgtagctatttcactgagtgggtttgttatatctgaatggactagtgatgtctgcctgcctctctgggtaacaaacacattttggagggattgttaacttgaaggttgtaataaaatctttaccactctgaacagctagcattggtgtctgctaagggggaacaaaggcaaaacgtagttctgttggtgaaaatagtttgactgtgtttaaaaactaatcattctgcaaatatcaacaagctcakcagatgcaagctagccaccttatagtttaaatggagcccttcacgctgtattggaaatgccgccgcctccagcccaccctatactccacaggccagctcctgctcttctggccaaggaaaggcgagtaagcaagtctattgcccgttggcctcctgagacacctctgaggattaaataactaatgactgtaaagtgctctgtgaaaagagagtgctctataaagtgttattgttggggctgttaaaaatggaaaacgacttttaatttagaaagagaacactcagcataaggaggggtggctataaagcttttatcaccactttgctttcggaggcttcttagctgttggtgttggcgccatggtttgcttgcccaggggttctgtcaccgttcatggggtttaggaaagatgccagcatctcactggcatggtgccatcctgatccccttcctgcattgtaacctcgtgggcagatctgcgacttgattggcttgggttgcctaacattgattagaatttcctaagagcgagccacctggaatgtagagtatcctgtgatctggtagcttcaggaagcccccaaagcagccatgcagaccacaaaccacttgtaaagattggggactgatgacaatcatgccatgtggacagtatccaggccctccttccatctcttgaggaataggactcagctcctctttctgttcaatgaggatattgagtttttatcctaaattcagaatttcaccaactccttctaggctccttgttcatgtcctactctctccatgtcacatttatgtggttgggaggtttaaaatatagtgttatacctctgcagtctgtattattattttacatattatacattttgtgtggatttgtaatcacagcgtgtagggtttrcttgggcaggttctcatttctaacatgtcatcctgccagtgggatggaggctctctggtcttcttcttctttggctcctctgactccaaacacttcaacacctacccttcctcagcgacgtgcagccccttcaagaagagagcccataaactcagtgtttatcatacaaatgtggtgatgtgtttgcatttttatgacccagctaagtggtgagtattcatttgtgccacctcaccccagatgcccatccagaggctgagctgtttatcatgctcatctctttcccaaagcctgaacaaggagcttgggaccactataaacatgttccctttcaataaagaggaaattattatcatatattttggtaataaccaataacatttcaaattacttacatttatggcttataatcaagcttatgcttaacctctaatcctcatgaagctggtgatgatgggctcggtagttaaccacttgcgggaagttaagggcaggtagaaatccacctgaccagtaattaaccagagaagcaacccatttctgcagttgagattataaacactgtgcttggtttatgtttaattggcaacaagtgaggtgaaccccattagttttgcagtgatgccctggaggatttggcctggtcaacttctcatcaattaatgtgctgatgagggatgctggttgctgcacactgggtctttgggttcctggtctttgtttctttagctgagcatttgaggagattgcttggaacatagttcatggctggcaattgaaggatcacagagacattgctctctctgtaactatgtgttctgattgcggttttcagtagtcttttgtttgaagtcctatcatccatgagtctggatttgtgtgggatatgaactactgtgatgctacaagtcatgtacttagattggcttttgagttgaccattcatttggagaggcttatataaagaaatgggccactttgtggtcaggccatttttgtctccgagtaggttaggaacagggatccaagggagtctggttccaggatggatgtttcttaactgttagatgaagttaaagggttctaaattggatggcttagcaaaagcacccactgatgttttcagcaaaaaaaaaaaaaaaaggactatgagatagaatcttccagagtccactcttgtttcactgctttgaggattatacctttaagcacattttaacttctaaatcatcccaccaggaatctcctatgacactcatggaggagctttataaacaacttagtcatcccaacaacctgtgatgaaagtactattctcccaccattttacagatgagaaaacagaagctcagagagcttcagtgatttgtcctaggcaaaacatctaaaaggtacacagccagaaataattagttttgtctaatatcaaaactcatgctcttaactgctgtactttattcttacttttatgtcattagaaagaaaaatgtcccaagcaagtggaattatcatggatttcctctctgttatagaaccaagaatgtgaattgatctcctgtgatatgttagctgctgtatttgggactcagtggcatattgggagatattgacatattaatccaaatcaaacagttcatttttggatgataaactattagagattatttgctcagtttattagcaccagtggattagagattggccatggttgcttagcttcatgaaatagtagggctgaaaggagctttgggtagttatctagctcaattcaacacttattcaacaattatttattgaggacctgctatatgctcatgctgcatgtggttgtatgctctgctctgctgtctcacatacacttataatcatgtactacaatgttaacattttgcttaaatcgctatatatctttgaaagaaattgaaagaagtgagctttacatgttaccccatatttgtcttttccactgatcttcattcctttttgtagaagagaaatttcatctggtaatatttctttccagcctgaataatttctttgaatattttttcttttatcagctttctggcaacaaattctgtttttgtccatccaaagttgtctttatgttgccttcattttcgaagaatattttcattggatataaaattctgacttgatttttgttgttttagcagtttacagaggccattccatcatctctggcctccattgtttcttatgggaagtcaattgtcactatttaatcattgttcccacatgaagtatcatttttctttgcttttaatattttctccttatctttgattttcagaattcagaggttaatattcataggtatgattttctttgattttgtgctatggatttctgtaagtttcttctatctgcgtgtttaagctttttgtttttaccaaatttgtgggggttttttgccattgatcttcatatatatttttttctgctccattctatttttttctcctactgagactctaattgcatgtatgttagaccatttaaaatactctcataggtcacagtgtctctgtttactgtttctaaaatcctttttttctgtatccttctggttagataatttctattaatctaccttcaaggtcactgaacttttcccatttctgttctcctgttaaggtcaaatcatgtgtgtgtctgtgtatatacacatatatatctatatgtatatatatataaaataaaatatatatgtatattttattataaatattgtgctttttagtttccacattttctttggttccttttaaaattctagttctctaatgagaattcccttctatccatctgttcattcattataatcatcttttcccttaagaccttgttcatgcttattacagctactttaaagcatttgagtcttaattacaaaatctgggttatctcaatgttaatatctactggcttttaaaaaaaactcttgactatgggtcacattgccctgtttcctattcttatgttgtctagtaatttattgttgtgtcctggacattgtagacaatacattgtatagacactgatagattgcaatttctggtattacctttccctcctccccactttttaaaaagcatgctgagattttgttctagcaggcagctaacttggctggactcaaattactaattgagtctctcatgtggaaagtagcccctgaaatctgtggtcagttctttcagacttccagttgttacttttcactctgtcttgtaatcttcccagcatatgtgcagtttagggtcatctcaggatttagttgtaggattttgcagactttgtagccttaccctttgttgttctcttctttctgggatcactcccttcactttccaactgttctgccagtggcaaaattcatccttaaccacccaagaagaagcagaaaggtgacttcctgcttgcattttagccactccatcttgcagacttctgttaagggccagcttccatctagcttctgtctgcttttggtttctttccggtacccacatgtagtagtttttagaatattttgtccaaattttataattttcatcaatgggagggtttgtttaatataagctactctatcattactggaagttgaactttagatcttctcattgtttaagagaagacggaaatatatagatttttctgtgaaatctcttgattatttactctgggcagctacattgatatttaaaacaccttgtgtagggaaaaaaatcatgcctatgggctaaatatggcccctagaccctcagtttgcaaaatttgatctagttcagcttgccattttagagatggggaaataagttcagagaggggatgtgacttctctgaggccatctggtatatcattgcagattttcaactagaactaaggtttctgactttcagctatatatctcttttgttaggccaagttattgtccctttctctgtctgctagaataggcaactgctcagatgcactggctaggattcccatgggagacatcagagaataacccctgcaaagagtgggaaagcagtaagaccagctggagaaggagcaccatcgtgggccattactggactgcttttttctcttccacttggcccacttgatatttggggcactgtgaggacaggcagacagctgcctggtggactgactcagtcctcctgaatctagctctcttccagtcattcttatgtttaaggttaccaattctccgctgtgcccatgtgagctatttgatgttctcatccaaagcactgtcacgctagataacttttttcctgaactctgtcctgtcaccaaatgtcactgtgcccctgtgcagggagacatggagcatctgactgcacatgggccttgggatgcttctctcataaatggcagatttaggaccagacaaggaattggtgcaccagccataaatcctgagaagaataatgccagattcatctggctgctggcgtttgatttgtgggtgtgtgaaaggtcgcacaacctcttagaggagtatggtggggaaaatatggttcggattgcccatcctagctccttcttgggctttggatgctctacaagtaggcaaatggaaacagtaaatatttgggattccagatctggtcctttcccattttataacattagtaactttgtccttaaaccttagtttccctttctgggctcctttcatcttctatggtagttacatcccgcctgctacagactcctctcgtgttctcggccactcaccttaggcaggggtccactcttaggagaagatcttatgtcagccacaaacccccagtgcaacaacactgcagaactctaagaaacctttcaagacttctggttgaacaccttcacgtcacrtaggaggaactggggctgaaaggaacaggaagccactggaagcctgtagctggttaggggcagagacacatctggaactcagttttctaggccctgccccacccatccagtgcttttcttcacctcactggaaccattttgctttggcgtgaaattgtctaaaccattttatctggggtaaaaatcctctcggcctaagggtggacaatttgccccaccttctcttgcccttaatcctagtgtggtactagttttaactgtatgaaattgccaatatctgaccagtcttgacctacaaaaatgtcagttttgtgcggttcaacctaattctggcctttttctttgggtgagtgttgatttgggggatgagttggctcargtgaccggaacatggtgctgatgagctgagatcacaggtcagaggactgtgtagctttccaagcttgtctgtttccccatgctagttcgcaagcctcacttcaggcagccatcctgacagcagtgctcccattgctgggctccggatattcatgtaggcaggtgcccagagtgcgaggaggcccatgtccattccatgccactgcagtagaagggaaggggagggacccttgggtactgatgagcctgactttgagtcctgggtctaccccttttagctgggtgaccttgggcaagttcttaagttctctggtttttagttttctccttttaaaatgagaataaaaagattttcttcatgatttgtgaaagttaagtggcacgatatgcaaaagtacttggtcagtgcttggcacatagtaggggctctataaacagttatttccgaaaacacacacatacttcacggtaccagagtgctgagcctttgactttgggcagcactttgcaccaattcatagatctctcccctttctgcctgtctcttctgaatcttagagctcgttgtttcaatgttcttgctcgattattggattctgtagataaagttcgtcctcacagggagactgtatttttgttgagggcagtgatattatttgggacccccactattacttcttcagccttaggtccatagaagggccttgaatgaaataaattgttgaataaaacaagcttctttgcagacactcacatgcccactgtataatccagtagagacctccccagcagtgtttgcataatgttatacgttccagccccacatttaatggttggtgattgtgagggttaaaggtggcttttctcaaattgtagactggctcttagagtctgacaccagcactctatgtcctttgaggggagaattctccttccacccatagattatcagagaatcccagccaagttccaattgccctgtgataatgcagtactttgttcccgagcaggttaggaactgatatccccattatgtggcatatcatgaaatgaatgttattgttaagtgtaaggacagggcatattagtggtatcttttattacgcagtcttcattataaaagaacagctattgctaaagtagtccccatttgataggtagtgggacattgttcttgtgttgttggtgctgattaaggctgggataatgcactgttcctgcctgttacgtccatcaggaaacaaggccgaccaaggtaaaatagatgagcgtatgttggcgacagattaaaaagactagtgtaaagtccattaataattctcatatttaggatttggtttctactgtacttactgaatctgcaacatttaatctcttctatgtgagaccagctgagagaaccttttctcccccttctgagtgataggcctggattttccgagacagtgcatttgtctgtcaggacccatggctgctgtggtgatttacttgccatcagatgatgttggtgtccggttggtgatatagccttgctggatatggggaaatttgttacctttagctttgacaggaagataattgctgatggttaacagaactgagccaaatccattggtttttcagtaacacaagcataagactggctttgagaaccctgcttttccctgcatacacttcaattctaagcttttgtgtgtgtgtgtaaaatgtgtgtgtgtgcatgtgtgtgtttgtatcttgagggaaatgcaccagactccagattattctccttcttttaaaaaaaattgctgcagcgtactagcatgaggcctgaagaagtgtttgttcactctacaaagaaaagaccttaggtgagttggaagtgggtgtttaggaggggtgtcctggaataccagaagcagctggccacttgcaaaaaaggtttgtcgttagtagggcattgttttgttaggcatctctcctgagaatacataaatctgggcctccatcatgtagcttgtcaatttgtcttcacactgtgcaatcaagtgattggttcaacaatgccttgtaatgtttgagccttgagggcttctcagtaaaagtcttaaaatgttggaaagaaacttagaaagtctcaggggatagccatgtgcttcaaagagcagcgtgcaggttctggacctgggatgatgatgggctcacgtggttttcctaggcacaagggttgggggaaggccatggggtataattggaggagtcttaggaagaaatttagagaaggaatagaactatcctctagcccttcctctctcatcctttggccattacaatgaagggtccctgggaagccccaatattatgcttctctccttgggcaccctcgatttggagcttgtgatgatctacctcagtggcacaacaggctttgaaaacacccatatttacccatagggaagcttgctttttgaggaagccagagatgcaaccttctatctgcaggtactgtgtaccaagagcaccagttctcacctcccttttcttctgccccaaggaaaatttccattttgccccaagatgttgcgaagagggcatgaagtgtggatactaccaaggctgccatgtgctagtgtcatgacgttttcttggtgacaggaatactctttctgaagcccagagaactctaggtccttccagttttgcaggagagggtctctggaatcaccttggttccccaaagcagaaaatctagaagagtccttgccaagacggcaaaatgtgtgaggggaaccagatgttgccctccctgttcagccctgaatgtgggtggctgtggcctttggaggctggggtcaccccccttcctcattgctcacatctgtccagtgaccaggtactcataatcttttattaagagactcatcagctctgcccttctttccctctctgtagccactgcccagggccaatggcactcatcacttcctccctcaatgtttgcaatggcacctcagctagtttgtgccttcagcttccctgtccttgaatatatgctactcattgacttgaagcttacccttctaagaccctgagctgaccagagagctctgacagcagtttgctgtgtctctattgcttcctaccttatgtcatagacagctctgttcacacatgccccctctttccttccagactgcaccctgtttgagggccgactcagcattttgtgtttgttctgagatgttcattcctttcattcctgcttgtttagttctcttatcattcaaggcccaacatcagagccatcactcctgggagatgttttctctttctgctaattgaagtcctcttcggggacttgttatattattaatgacaatactttttgtgcacacctactagctggtaagtcccttgaagtccagggccctatggtgccctattcttcctccctatcacctggcattgccctctgcacacagtgatcactcaggaacctttaatgagtgaatgaatgaagctagagtgtgatgatctccttatggctcctggattgtttcttgctagtgcctggtaaatgacttagttttctatgttgatgtttcattgagaacctactgcgcacacatcagtggttagtcctggaaagcagggtaagatccatgtgccaccacttcctgattccatgcccaaggcagacatcactggtggccacagtgttcactctcagtgaggcccaatatcgcctgtgaacttggctccacgtgtcattcctggcagctgctacccatcattagttagtatttgaagtgtaactgtcctgccatccctggttcagctatgatgagaggtcctgagaaagctgacattgtcctttcccaagggaatttacagttcactaaggagattaagtaaatattttaaaagtacttagtatgtggaagatttaagtagtcacacaaggcactaagtggttcagagctaagcgagtggtggtgggcggtagcaggcagtaataatctggggagcttggaaagtgaggaatgctgagccactgcagtcagagccgacttcctggaggaggtggctttaacacctagaggaattgggagaacagtctgtggcaggaggagaaacagcccaagcagctcctcagaggaggcaggccaaagagggaagagctttagattcttttcttatggtcagggcaacctctagcaatggaaagcccagatgtctcaaagacctggacggcactgccatggcattctccttgatttgcgagctggtgcatagtcctgaagagtcccttttaaaattcttcactctgaggaatcacttaaaacaaatcatgattcttgaaatctgcctctaacccccaaatagttttttttccacggtgaagaactggaatatttctgtgtgtttgctttgctctccatgggtaacctctcttcctgcatgataaatacacatttgaaaatattgatttgctgctacccctttgaaaagcttaagaaggctgacctctgcctcagcgttctctgacttgaatttttcagactgaccaattgacccctggaaaggctgagaaacgttacctgcggtcctggagggactttctgggggacggaggccacggtggtggcggccacttggcaaatgcctgaaaggagggccttttaataaaatgcagtatgtccatggctcaaatctaatgacttttaaatagctcctgggaagaggaaagcctccatggtggagcccaggagtcaccccgggggaagtgccattttccagactcatctcagaaaccctggggtcccctcagccccaagtacatggggctgtgttgggcctcaaagtttgcttcttctcaacctcccaccccgaccccgccgattgctcctcgttttattttctttccttggttttaccacggtatgacctcgtgttgtattttttctgaatgacaatgaaagtaattgaaaatattgattggcagtacagttaagttgtcaacacaaccatttaatttgtcaggaggacttgttaaattgtcaaaaatcatataaaaaaactccttcagtcactgatgatatacattagagatgttcatgaatcaaatgggccattttggagataagtgttgaagaaaaattctgaaatgggtttcttcagatacgtttgtgttctctcccactctctctctctctgatcacacattacaaagaatattggaacgattttggcaaggcaaggtgagtgagggatacttttttgagtagaggcctcactaagggtatcatggcagaaataagatcatttatagcaattaaattagaagattctaatgcggatgccatcaagttatttattaggacaaacgggttgggaagttcctttcctccttatatgtaggatttaaaatatgtgtcttggaatatttttttcttacggaaattctttttttcttttttgagacagagtcttactctgtcacccaggctggagtgcagtggtgctctcggctcactgcaacctccgcctcccgggttcaagcaattctcatgcctcagtctcccaagtagctgggattacaggtgcacaccaccatgcccagctaccttttgtatttttagtagagatggggtttcaccatgttggccaggctggtcttgaactccagatctcaggttatccgcctgcctcagtctcccaaagttctgggattataggtgtgaaccactgcacccagcaggaaattgtctttttaaaaattatttaattttttaagagacagggtctcgttctgttgttcaggcttgagtgcaggggtgtgatcatggctcactgcagccttgacctcctgggctcaagccattctcccacctcagcctcctgagtagctgggaccacaggcacacaccaccatgcccagctaatcggtttttaaaattttttatagagatagcggtctcactatatagcccaggctggtcttgaactcctggcctcaagcgatccttctgcctcagcctcccaaattgctggaatttacaggtgtgagccaccatgcctagcaggaaattgtcttttaggggctcttggctgctgactctgccagccctgtgtgaggctgagtgggtaataccagcttcctgttcagataygtggggccctgttgaaaccctcctgcattttcactgctgctagtaatttagttcctgaagggtctatgtgcccaaatgaaattggaagtagctttatttattttagattaatttaagaatagtgctatctgctaccccttggtcaaaatgagtcaagtcattcttgacattgttagtttttagctctatttaataaaataatgtattagggctcagaaatccaacttgattcagcttgagggaataaaggattttattggaaagctactcaggtcactcctatagttcacaggagggctggtgtggtaggcagaatactaagaatggcccccgcagtattccttgtcccctagtgcccagcctctgtaatgtgatgagatatcactgccctgattctgttgtgttacatggagtggtggatcttaaaaagggggattatccaggtgggccgaatctaatcacacaggatctgaaagcgcagaactttcttcacctggttgaagcagagaaagtcctagatattcaaagagagagagggatttgacatgctcttgctggcgtgacaatggaggggctcacgagaaggatcgggcagctcctagaagcagaaagtggatcacagccagcagccagcaaggagtcagagacatcagctgtacagctgcaaggaactgaattctgcctgccacctgaatgagctcagaaggcgatcttttcccccagcgtatctggttgagagcacagacatgtggggactaacaccttgattttggccttgtgataccctgagcatagaacccagctgaggggtggagcagttgtgtgcagtcctaggattggggttatgcacctgaccaaggtctatcccgatgataggcagccccccaccgtaagctcatatgcagccccaaaagaagggaatgcagttctgggaagataatataataaatgcttgctaaaagtcatactgcatctcatgttgctaaaatgcatgtttttcacattttatgactctgaaatgggggtgcatctttccaaagcatggtgacttctgaaagaaagctgctggccagggtctgccatgtttgtctctgcctatgcttgggcagccttggcagctgttcctggtggctcctctcaactgtaacccctagggtttcagtcagcaaaccactgaacggccatttgaggaaagattctaagtctagttattgtctgaaaaccttctgttgacatttcctggtaagattgagaaagtgctagtatcaaaacttgcagaacgcttgttggcggctgcagcagctatgctcttgagtgacagagaagatgatattttgtgtgagaaacacaaacatcgataaactctgagttgaaaattgattctgaaaagtcaggcagtgagtgggagaagttttgggaatgctttattccatgtatttcacctatgtatatttttatgaatgcacacaagtgataaaagtctgtgtctacattaatccaaaagagctattttaataagtataaaataaaaatgccaagtgattggaaagcattgtgtggcagtttaattgctttgtttttctcagtgttacataaaatcatgctgtattaaaatcaacggcacattagattcatataattttaaataaaacattttagtatattacacattggttatcttgtaagatagggatattttacttggaaaagtggagactggggttttggcattgtgatgggctgcaaaaattggtgtcttttaaaattcagaattgctgaggtgtctgttgattagactgtaagagaaaggactgaatgcttgatgcaggttgaaattgtgccaatcatgtgtcccagcctccatgctccacaaacatttactgccactctctgccacctgagatgcctctgggctctcacctggaatctgtgattaaacatgagttggttgggaggtgaggcattgagaccatgagtggttggggtaggtgtccttggaatttataacatggctttgctttgtttctggcccaaggtggtattctgctgtcacagaaagaacacaccagaccacattttcatggcatctttaccattacctagctgtgagactttgatctcaatatttacctgctttggcagtctctatttctgcattaatgtaacaaaagagctaaactatagtgcctcaaattttgtttctagcactaatattttgttttcaaaaaatgtgctcagtgtctcccttgttgcatttctttgacttctcatttctggtatacatttgttcgtatttttggagttcctgtggcttgctgagccctatgctgagttatgcatgggagaaaagctgaagatggtatccttatcctcagggagctcttccatggcatttcagagagaggatagatatctgaaaatgggagtatgtctttatttttaatatagcatgaaaaaagaaagtttattagttatctattgcaatgtaatacattactacaaaacctagtagcttaaaccaatttatatttattatctcctaatttctatgggcaagggatttagtagcaacttagataagtggttctagctcagggtctctaaagaaattgtagtcaagatatattgtcaggactgcagtcacctgaaggcttgactggagctagaggatatgcttccaaaatggctgacttgcacaaatgtttgcaggaactctcacttccttttgaaaatgggagtatttcaaagaccatgtgagtaagtagatagcagaatgaactgtgtggattattaggaaatacagtcttctggagagggttttgttttgtttagcagagaacaagctggaggatgagggttaaatggtctgtgaacttaaataaatcagcagcgcttattgtgtttgtctattggggtctctgaattgcctctcatttgtcctcattctgggcattcaaatggggctggtgtcagctacaaaacacataaggacctgtaggcaccgttttttgctctgggcttaaacacctctgaaactcaaaatgggaattggatgtctgagccccctttattctaccaccatcactgtacaagtgtggtccctgccatagctagttcagggtcctctaatgcccgtagtctttctctgtcctgaggtcatcatggggcccaggctgcttctacctggttgctctgtcgttctttaactggtcattcttgtctttgtggccaaagctggcttaccagcacagcatttgtgctgtatttcatgggaagaagggaggcagcatgaagcacagccagcttcctttttaaggatatgacatcaacttgcacacagcacttcactgatattccattagcttgatcttagtcacatggcttcacccagctgcaagggtagctgggagatgtagtctctaactgggctaccgtggacttttccccatgaagaagtgtgcaaggaggcagttacttgtctgccacaactgctaccactgaaatctttgctttgtttgccttcttttacactaagcaatgagttccttgcaactagcatttatacttttttaatggtcacagtgtttataatagaacttagttcatggtagatacttaagaagtgtttgctaaatgagggaaacaatccatgaatgagcgaagaaatgcactgatgatggcacacactatttggggcccttctttcttgtatcctaagaaatagtctttgtatttgagtacatttagctgaaccgttagtgggctatgctgagttcaacctgtaagaggatgcttggcttcatctgccatgtggtctttgaacccaggactggggagatgaaggaatatttcattaatccttgcaccatttagtctccttatcraatggcccaggcctattctttgttacagacaacaatgaagggtgcctttaagaaatctccagtgagtaccgaggcattgcagattaggtcagtagaactgctgctaggttgagcatgatggatgagcaggagaatgagtttctgctgcacggtattgtgaaatcttttcattgtcaccaacgggcctatgaggaactgatgaatgagggagcaagtgtcagaaacgcccttccttgccccagtacagttttaatatctccctgagctacaggatgagtattgataaaagtaaagtttaaaaatagccacggagtgatgggtagccatgatttaaggagaacagcaatggggttagagagggttcattttcttgaaagtgcatgagcgggagagagtgagaggaggagagaagcaggagagctggactgtgaggggaaagagcaggaggcttttataagaagctaatgtgatgaggatgacgagggctttgatggatgagttagctccatctggtcgcagtatatgtaataaatagctgtgctcgggtttgacctctcccttaccagacacatctttctctttggggatatccaggagggagcttccattagagtaaagaacccgtcatgagccagagctgaggatgtttatgggcttgtgcagagggcaaaaaggagatggtatccaagttacaggtttataaactgaaaactgtagcctgtgcgccttgctgacgatggtgctggtgacagaaatgcatttccagggttacactgctacttatgtgaggaggagaaggatgggaggaggagggtggctgaggggtggccagcagccccaagggctgcttcaggtacatcctggtttcttgcttattgcataaacagggcgcctttgtcacaccttccctttgctgtgagcaaatgttaaattaagctggaattgaataggtctgtaactaggtatataattcttaactgggatggtttgggaatgcggtattccggtcaattcaattttccggttaccttgttagaaacattataaaatgtgtttgctcatattcctgccttagaaaattcacaagagtgaattgatcattgcaggcatttgtgttggttttggcatatcattttacacatcagtgattgttgccttcccctgaagatataaaatgtgtcctggcctggagcatcccctaagagttcaggttgaaaaaaaacctgcccactttctctaataagtgtagagttttgatttttaataattttttggataattgatgttttatggatttctattcaagaaatgaaggaaaagggaatagaatttgctactgggttgtatagctgagagtaagtttggagagtgtattagtccgttttcacattgctgataaagacatacccgagactcggtaatttataaagaaaaagaggtttaatggactcacagttccacatggctggggaggcctcacaatcgtggcagaaggtggaaggctgaaggtgaaaggcacatcgtacatggtggcagatgagagaaatgagaaccaagtgaaaggggtttccccatatacaaccatcagatctcgtgagacttactaccgcgagaacagtatgggagaagctgccctcatgatttaattatctcccaccgggtctctcccacaacacatggtaattatggaagctacaattcaagatgagatttgggtggagacacagccaaaccatatcagagagcaaatggatccgccttaagagtaagtggcagatctgagaaatcagcttgtttgtttctttgggatcaaaaggctcttagagaaaacctagttagaaggtcctcccgccccatttccccagtcttcatggaggagctgcttggatgccaggaccaggtccctggtgcagcaagcctgctgcaacattgccaagtgtgggagagggaccgggttttgggcagcaccaccttggccttcctccttcttgtgtgagaagctagggatgaatgtgtgaaagcttggagcctagcataccacatgtataagtcagagccatcagtccctactgtggtgactcatccccttcaagaatcagatcaaagctgtggactcttcatactggaagcaaagcacacatatgcacatgtgcgcgcacgtgcatgcacacacacacacacacacacatacttctgtatataataacttcaaggggggtttgctgccaccctttgaattccttacaatattgagaactcagctaagtagtttagaaggcctctacgatatatatgtgtttgtgtgtgtttatatacacatatgtgtatgcattactgtacctatatgcacacacctacatatatatcacatatatgtatatatttgcttatctatgtgaatgactaatatcatccaactggcatccaactggttgatgctcagtattcagtatcaaaggaatcccaagaccctgtgtgcttatgagcatttcatttgttacatgtgcaatttaaaaacatttggtgcttctgtctagtttgaatgttacttataagctgtggcagaaattctccttttgcaaaaaatataagtggattaaggctactcaagtgggaccatccagtagaattctaacacaggtttagtttgtctttgctacattctgtcatcttcttccttctttcctaccctctgctactctggttcctaaatgcccccctcctggccagtgccctctctccacatcgtgtccacatgttgcttcatcttctctttagaactccagtttctgtttcataatcttagctatgtgagtggctattagctggatattgggaggaaatcagagctctagagctaattcatactaaagtgtgaataactgattacttcaaattccccatggataggcatatttagaagaggatatgtcttaacccaaatcaatctcaatctactgaatttgatcattgcggcaaaggaagaattttaagcagcaatgtttaaaaacaacaacaaaaaacccacaaatggctgcaggaaagaagagcttaggagacaaaggatgataaatgtgagtattgttcttcatgagagaatcacttggaaaggtttgaaggcagaaaccaacctcaggcactagggacagaaaagggagaaaactttatatgcagaatttcaccatccttctaactggaggtttccatgattgggaagaaattgattttaatcctttaatccttttttgttgattttttaaatttttatttatttattttagagatagagtctcactctgttgcccaggctggagtacagtggcatgatctcggctcactgcaacctctgtctccagggttcaagtgattcttctgcctcagcctcctgagtagctggaacttcaggcatgtgccaccacgcctggctaattttttttgtatttttagtagagactgggtttcaccgtgttagccaggatggtgtggatctcctgacctcgtgatccacctgcctcagcctcccgaagtgctgggataacaggtgtgagccaccacacccggcctggttttaatccaattttaagagataaacctagtctctaacctgaaaaggcccatctttctatcctagggacagatttgtcaaatctttgatagattttaggtgtttctgttgtgtaagaggatacctgatgggaaggaatactggagctcatatgaacaaagaaaagttgtaaatctctggaactctctctcccatatcttttctcttatgaaaataataaatgcttttccaagagaaagcagagagaagaaaaatatttctaatactcttgccagcctgcaaattaaaacactcttaatattttgatgtatttccttccagtattctactttttacatatagggtattttatatgctgcctcttgattttatagcacctgcattttccatataattacatattcctaatgaaaagtactttaatgactacctaatattctcgtagcaaggtgtygttttgttttactattattcaattcacaggtacatgtgttcccccacgggggttttggtttctttagtctaaagctctagaagtagaaataccaggttagagtatgaacatgtttgttgaagggtctctgagacctattgccacatcactttggcaagaggttattgcagtttactctgctattggagtgaagcctgaagcatcgactttgaaagacatcagagctcctacttctcagtcgaggggtatagtaagtcatccttgaaagtggaaaagagaaaaagatggggaaacggggactggggctgcttcataacagcccatcaggtgagtgctgactttaacactaatgctttcctctaaagttgcattaatttgctgggaaaccataacaaagtactgcacgttggatagcttgaacaacagaaatttactatcttacagttcaggaggctagaagcccgaattcaagatgtcagtcgggttacttccttctaggctgtgaaggagagtctgttccaggtctctctcctggcttctggtggtggctggcaatctttggcattccttggcttggagaatcatcaccctgatctctgcctccatcttcacctggcatctccccgtgtgcatgtctgtatccaaatctccccttggtgtaaggacatcagtcatattggattagaggcctgccctactccattatcatttcatcgtattacatctgcaatggccctaatttcaaataaggttacattctgaggtaccaggggttaggacttcaatacatgaatttcagggagacatgattccactcataacaaaagagacccactaggcactagggagtgagctactgcagagtggccccacaagcaagtcacttgtttctctgggcctggctttctgcctctcaaaaatgagggtgttggactagagcagtggcttgcaaagtggggtccccagcccagcagcatcagcatcacctgggaatgtgttagaaatgcacattctcaggccttaacttagcattactggatcacaaactctttggtgggggctcagcagttttgtgttttatcaagccctccaggtggttctggtgctgactgaagtttgagacctactggaccagatgaccctctgggtaagaattctgaaatgtcaacatctgaaacatgtgtgcacaggagttcactgccccatgcacatggcctgccatgagggatgcaagcctagtaaatgatcgcagccaattttttaaacgtaaatgataatctagtttttgtcctaggtgagtggctatgtgacaaactccaaagtttttacaagtccctactgttctttcagtgtgcaacctgtacctccagaaaaatacattcactcaaagtaatgtttattgatcaatgaactgtaccagaccctggacgctattccttttgcataagtgtgacttgtttttgctaagctttaacttgtcccctgtttatttctctttcctaaggcataagtcaaggccagcgagatggcttggcccacggacctagatttagaaacatcctgttattgatgtatggattatacatgaaggcctaatggagactgctgtggggttcagggaagaccaattagggaattaattcattagagcccagcatacatgttgctatatctatttacttatttaggttaatgtcttttgctgatcttcttacagccataagtccctgtcaatagttgataatgtacttgaatttccttcagactattaaaattttacatattggacatttatgacaggaaccaaagtttactttttgctttgacatcctgatatctagggtcttctgtatagtaataaagtaatccaagaatctgagccacacactggccaatcagttttctctgcatctgagatcaccaaatacacttcttttctagccattttacctgtatgaatgtgttggtaaccttgttataggacaaagctgtacatagaatattgcttatctcattcccgtatcatcaactgcaggataacatctgctttgtttctttccttcgttccctggtaagacaccttatttgcctctcattcttcatgattgtgttttgtcccttaatttttgatacaataaccaggggtccttgttgtcatgatgcccatgcagtctatgcaaaagaaagattattttagtgggaagatcatagatgtgggtggcagggagcttgggttccaacctccacttgttgactaacttggtgaatctgggaaggttacatcttcctctcttctttcaatctgagttgtgaggtggaatgagacctgttgtacctgcttttgagtgagggcaaaagagatgcaaaaatgaaattgtggagatggcagtgctttgaacaatacaaagtggtgcactgatgccaggaattctatgcatatccacacacatttgaaatttttgtccagttcagattaaagacaactttattattaccattaaatctgcttacagagcaaatatgcaaatatgtgtgtgcttaatggtggcaggcttgctttaatccttcttgctttggggttctgcattttattttctggtgatgcagacctggtaatgatcactactgatatttaccacattttattaatgtgatttttatgatcctgcaggagataattaggattgggtttgtttttttcacgttcatattatgaaatttcgagctacatagtgacatggtggggaggagggaaatagcacagagaaggaatgcgttacaaataaactcaacccagaaaccatgtttaacatggattaaaatgaatgtagccctgtgttcattatttatagctattatgcagaaaatatgttactggactctcaagaattggatgttaagaaatgtttggttcctccctttggaaagcatccaattaacacaccatccagaggagacagattggggggtcaaggtagacaggaaacattttctttgatttacttattttaaaacctttatttaatttctaccatttaataaaatcagacattagatgaattgaactaataaactgtctttatatcaatatgagagtgaatttgaggccaggctctgttggcatagccttatgttttgtttccttttaaaatctgttcttagactagtaggtttaagcaaagttttatacataagatgatcaaactggtggaattaggaggacagttctatgaccataaagcagatctctgcagaaggcgttacccccgtacatgcacagagaaggttctcagtaaactctcatgtatagaggctagataggatcttggttaagagtgcctgatccggagccagaagacatgcgtttgaagcctagtggttttgtttgtttgtttgtttttgttgttgttgttttgagatggggtctcactctgtcacccaggccggaatgcagtggtacaatctcggctcactgcaacctccaactctcaggttcaaacaattctacctcagcctcccaagtagctgggattacaggtgtgtgccaccacacctggctaatttttgtattttttggtggagatggggtttcgccatgttggcgaggctggtcttgaactcctgatctcaagtgatccrctcaactcggcctcccaaagtgctgggattacaggtgtgagccactacacccagcctgaagcctagttttaacatgaactatttggcacccttaagcaagttactttagcctctttaagcctcagtttcctcatctgtaaaatggagaaaacaatagcacctaactctaagggctatagaaagaagtgaggcactgcagcatctgaagtatttggcacctggtacctaacaagctgtcaaatattaattattgttgcttatattactatactgttacaataattattagtaatcttactgagtaacaaacattacctgttgcataaactaggtaggggcagtgtggcagggaataagacaagtaaagagtttggattcataaccatttgaaatcaattctaaattatgagaatgtatctttagaaatatattttatgtttatggagcatgactagtttagaactgacatttaggacttctaaactttgtaaatgaggtatgcttagatgaatggcatcccaattccatgagtgggctctttacttctccgcactccactagtgaatttgaaggccactgtgaaaagaaaaaaaaaccaaaactctacttgttgggctctgtggtgctgttatggcttggcccggctcagtttcctttctcttcttttctggacaatttcaggaccatggcatcttgacttctctaaaaatatttatttagtaagtctttaggtaacttcaaactctagtcttgggcttagtgaaacagaaatccagaatcctagatttctccaaagtgagggtttgtggctgttgtacctgagctatggtgcccaatcatctgtcatccctggctccttgacactgggtttatacacattatagggaggcaatggagtgaagctcagtgaagcccaaacatcagccattcatgtagcaaccttttctgcttttgctgtattgcttcataccacctgtacccttatctccttaatatcttctgcaattctaatctagcatatcattgcttattaccttgtcttggcctaagaaataagatctggaaaatcccagggtgcaatgctagtttcatgtcttcctatcatccactaaagtagctacataattgtgaaaatttaaatgtttatctgtgtatcagcaaaagagcccttgtgtcccactgatgggatatatatattccatgttttgggagatgtgggtggacgagagcctgggtgtgaatcccagcatttctgctctctcccgctcactagctttgtgaccttaggcaggtttcttcatgactctgaatgtagtttcttcatctgtaaaatgagggtgaaaatacctcctactttatggtgtgattttgaggattcaacgaacccatacgcggaaagcacctagcaccgtgcttaggaaatggtcatttctgggtggtgggaacagcatgcagcaagtctgctccttggtcctctatcttgctgtcctacccagtacattgttcattccatgaaggcaggggtccttgttattcatcatttgggtaactacacagtgtctggaacctagaaggccctccaaaagttagctaacaaatgagtgaatccattaaattacagttgtcccttggtcacctggcatgggcaacagtgctttaggagcagtggacaaatacttgtggggctgaggggaatgtaggaaagagcagatccttagaagttagagattcttgagttcaaatcatggctctgctatttattggttttgtgaccttgggcaaattaccctgcctttcaggctatgcttaccttgtttatataatggagataatgccctgcgaggctattatgagatcaaacaagatagggaaggtacctccttagcacctggcacccagtagatatacacccaactaatagtatcccttagcatttgcaccccataggaggcaaggctgttgccttcacacagtgtgtgacaaagccagtgagttgttcagatcaggcatatggtagggactttgtaggaggctgagctccctttagactggggtagtcagtacaagtttccttgaggtgttggggtttgccctcgacttgcaggaggagtttcaggttttgtgcggtagagctgagctctccaatccctcgtccctcctttgtggcacttctagattttccagcctcaggcattttcaggtatgtctaattcacttggtctattgctgaactcccaattaaattactgtattctttaattacatagcatcttaaactgtagctttgaatttaattgaactttttcatgctccttgctccctagccaaacaatttgtacaaaaaaaaattgaattaacaatctgacttttttttgcattgattattataacattaagagagtcccaggagtttccaggctgtaaaaacctaaattgtataacattactcacaataacgcatatgttataatcgcaaagaacttacttaaaattcaatccactttggcatcattatcatgtatcaacataataaatgagtccttcagagcatggtaattataatttgataaatcatcagcagaaaattaactggatgtcaaaacattcattggagagggtgatgaatcggggatgattgtggtgatgaattgtgttaatctgcacagtatgaagccagcgaaatggctaagcagcccaagatggatggggcacagaaccggcaaggtcaggacacagagctgggagaggagggaggcggcgggcaggggtgggggaggagctgaggaggggaagaagaaaggaccagcagcttccctgggaggcccacgagttaaccctttccccacatcagtggagacagggccccgtgaagagcctgttcttgagggaggtcaggaggaacctgtaatgtgtcccgttccatttgagacccccttccactccctactactgcctcctgctaactctgtgggtattccttagattaaaggcgaagtgctgagtgaatgatgagaagcctagtaggcctgacagttttgcattaacctaaaaattttctgatggtggtgagggagggggcttgttggctctgcagtgggagtgctcgcagcatctctccacctggtctgtggtcttggtggacagggtcaagcaggctcaaaaggayaggcctgtgaatcatgttagtggggagctcttgtgagccccactagagctgtaaggacagagggacccttccggaggagtggctgctcatagaagttgtggggctgatctgtgccccagcagcatggaaaagggaggcatttctcttcctctcaaaaatccacacaagcagctacagttccttggccgggagaccagcccatctttcaccaaggaagttttgcaagggctgtaccatggcaggcttctctctaaagcttcagtcatgagaggaggttctactaagctcttaagttccagagtgatagagggaaggctgcacattctagaatgttccctgtggccttgcatgctcaagtgcctctgtagcattaggggcttgccggatactttctaaaaaacagcattgccagagaatgtgggcaaaatacttatccaattaaactaggagccaccataatgtgcagggataagtcagcttaagggctaaaatctggggaaataagggccaaattgatgaagtggctatcattaaaaactgttgtttttcctctcattcctgtcccactagagattcatacccttaggtatcttttggagggtgaattagagcatggaatatgaaaaaagtgcagcaagtgagtggaaaaattgtttgaacatgaaaacaaacctagaaccttgagggtactatagctgtttatgtggctattgagtttggtaaatttgtaattaggtgagtatgggttttgtttctgttttatactgattgcttttagccctcagcccctcattaaaaataaccattaaacaattaaaaaaaacccttcaacttgggtaatataataaagcccaggcctttaaagaccaatggctttcctaagccacactgacagccactgttggctgttgcaagaaaggacttgtactctctggcttttctctttgcctcttgggtgaatctggtgcttccctagatggttgtctatgttgccttaatatctttaggggaaaatcccacaaagacacttggaggtttgtcctgtggtcatctggctctcagctgcttcttttctttgagtctaaagtctgttttccttgcttgttgctcgattgagcaactacttatgttgtcggtccagtaataataaccttaccaataatgagaatccctttgacatgtatttggcattactgttctcaaagaattttcacatgtgtttaatcatgttaacagccatttttgggttctctttcctcctaagcaaggagacagtttcagtcaaaaattctcccccactggcatgtacacctgatgtgatgggcatactgaggttcagcacagtggagctgagctggtaaagcttctggcttacatcaatttatgttcacaagctcacgcttattatgataattttgccatgtttccttttttcttcttggtacctttcatcagttttgacacctttagaagcatcagcccaatgctttaattttctctttctgaaagaaggatgatgcctttagtagcatcttaaactatgtgtcaaataggcttccctggackttttttaggaaactcaccaccatcagtgacattatttcttgaggaaattgagctctgagtcctcagacccaatatttaaatataatgtcttccaaaagttagcttgtacattgggatggtgatggactggggtgaaactttgctccaatgctgatatcatagacagtatttgggatatctactgtgtttatcaagggctctgtacaaatggaattgtctgagatagacctcaaagattgtgcatgctaccatgagattcaggttgaaagataaaatcaaccttgatcatgtggctggtttgacctttgccacttgatgaccccaagacacatctactttttttgaggtgtccaataggtagctctctggatacttgtatccacttctctctaatcaaacactgatcttccccctagtttcacctttaggggtagtgtgatttgtggaaaaggagtgggctggagactattagattgagctctggcctgaccaacagctagctttggggccttgggcccatctcttctcctgtgtgggccttagtctcctcacccataaaagaaagagatgaaacattcatgggatttcagacctttccatggtgccaccacacaggtgagctgtgatggggactctgagccctttacctccccttaagccccagcacttctacctttatctacttgtatctgcattctgcaaaggatttcatttgggggaaaagttctgctgctcaaacattcttgaaagccaccttcattttctctcccatctagttggtactttaattgcttgggtcccactgtgcatcatggtgctttctagcttgtgcattttatgaggccagcttatgggattgtattctagttgcccaaccctccttctctctcaggtacccctggggaccaaaagttaggagaaagctgggaaacttgttgaagagcttaggaagggttgaagatgggcaggcccagtgtgggcttggaagaggatgggcacagaggaccacatcctttttactgtgtcttcttattcctatccatcctaatctcagctccgtgtgagctgacttgcacaagaagctcttgagtcctaacttccataacatctaaagaagtagtggtaccttctatttgttcagtgtttaaaaatcttgaaaatactttcacagccattgttatattgggtattctaaataacctgagaaggtagaaagggcagtagttgttgccctgggtctagagctggggatgtgaaggcctggaggaggtgaccaatgagccctcctcagtgacagtaaatgtgaaaaccaggacccaggcttttcaatcctggtccaatactattccctttgctcttccatagtgagtggtttctcagcacccctgagtcagtactgccatgtagagatattggtgaaaaggagaagaaattcacattggtctgttttctccttcctttggacatttccttcttccctttctctccccatcaagaaaaatgtcttttgttcttggggtagctatagacagcctccccgtctgctgttttcccttctctcctctcgcagcaggaaaacagggtgattatggggccttctcttagcggaggtgttaagggtttatgtagtgcttgtcaatgaatggctaatggactcagttgggttgtttcaatgacagtttcccacaatctgatactaaagtggaagccttgagtgaagcttttatcactctttcaccaggctcatcaagaacttccttttcctctctggaaattgtatttcatgtggtatatttctaatccaagtgttacatcaatcagcaattcagtgtaggcttgtggttctcctggagcattttacaagcaaggatggggtttcttattctggccctcttggactcttggaaaaacactccaactgcaatttccttccatctattatgatctgtttttttagttgctattagaattattgggtatttcaagacattatcttaataaaggcattcctttctgggctgtgcttgacctgtgggtgagattgggaatctgtttcttctcatggttatagtgaagttagggttctcagaaaacccaacaaaatgggagcctttgaaacatgatctttttggccaacgacttctgtgtggttaaagggttgctggatgtcgtcagcctgtggatttccatctggagagtggtttgtttttaagaaaaccctccaaatgatcagtctttcatatttcagatgtcaaagaaagaaacaagacatttaaaataactaacactagaggaaatattggctggcaagaaagggggagtgagatctggctcttggatgtatcgcttcagctgttttctgaatgtttgacaaacacatggcttcgatgtgctagaatcatagcagcccagggatgatgactaatatggcattagttggttataagtccacttaagaattagcatctgaattcatgagctggtttcagtgaaaggaaagaaggagactttggagtctggattttggagtttgggattttttttttttaatgaatattttttaaagagcgagaaaacctctccttaaccccagggaagactatctagctgacattttcctctatggtgtcccaaggaaaaaacttgtccccaaatcctatcctattcatataaaagactgagattaaaatttgggttattttccccttctcattttaaaaattcatctgaagcgtttttgaaaaacaatacaaaaaacctctctctgcaactgtgacaggatatagcagctgtctgagaattttctctttttttttactgttatcttttctctctttaagaaaagagtcgtttcagaggcagccgtgacagctctgtcatttcactcacacctctaaatttctctttctgttgtcagtcagcagacagcaatctctggattctgatgggcctgagggatgtccaaatacatgagagatcggagagaggcctgcagcagtgtgcgtcagaagccgtcatcttctgcctttattcttagaggaattgtcaggagtttataaagttctcctgtgctgggatctccaagtctcctctgccaccatctacagcccacacaaataggcatgtgaggggctggggctggggctggggcttcctggaatgtcacttctgcaagttccagttaagaggttgtgttgagttcctctaccctgtgtgctacactggggaaattaagactatattgggagtaagtcctttcaggacaaaaccactttaacaacagcagcagcagcagcagcagcagcagcagcagcagcagcagcagcagcagvtactcctgtttacgtgttcttatgttctaggcactgtgccaagtgtttcacatccactctccactcattttccagtagtcttgcagtaggtactatttttcatcccattttagtgatgaggcatctgaggctcagattcattaaataactcaagtaacttgcctaaggccatgcagcaagtaagtgacagagctgggattcaaactcaggactatgtgacactgttgcctcaaggccttaagccatgtgcagttctcatatgccatcattgtctttttttccactgtgtaaggagacacagaaatcataatgacctgctggacaggtgaggcctgtgcccttgtccttttttttttttttttgggacggagttttgctcttgtggctcaagctggagtgcaatggcatgatctccactcactgcaacctccacctcctgggttcaagcgattctcctgcctcagcctcccaagtagctgggattacaggcacctgccaccacgcctggctaattttttgtatttttaatagaaacagggtttcaccatgttagccaggctggtctcgaattcctgacctcaggtgatccaccygccttggcctcccaaagtgctgggattacaggtgtgagccatcatgcctggcggccctcatcctttatgcagtattatggcagctgaattaagatgaataatgacagcaccgtgacttgggggcggtggggtagtgggggtcasaagtaccccaggaggtggaggagaaaggccacctgaactcaaagggaaaagttctatagttgaaagcaacctggatttagagtgaatctctacaaaaggggccccaaaatgcctgaccatgtgagcttgatataggtcttttgtggagccaaacttacctattggtctgagctctcctgtcagggcttggcacatagtttgaacaaccccagtagtcgtcttatagatgttggcaaaactacaaacaacacatttttcacttttaaaggggccagttttgcatcttctatctgtggtattccattgtccccagttttcttcttctttcttctgttaatttcccctgcagatatagcatctctgccatccacaaatgtgtcttggttccacctaactgttccctggggcaacatggaggggaggcaaacacaccttgctgagcctgactttgaccatgactcatggtgttcaggcccaaagcattcaggggatgagctacacagcaaagtgggatgctcaacattgctacctccaaaatatcattgttagtcatttcctttctggagttagactgcttgagtgcaaatcctgattctacctcttagtaaacctgtggccatttgggtggttattgaacttctctgtacctttgtttctttgtctgtaaaatgaggatagcagcacctaactcatagggttgctgttattgataatcatgattattgcttttatagccttacactaagggccaggcctattctaagagtttcacattcatgaactcattcaatcctcccagcagctcaatgaggtaagtattgctttttcctcattttgccaatgaggaaactgagttgtagaaaggttaagttatttgccaaaagtcagacaggtagtgagcaatggaacagagattcaaaaggaaggattctatgctcctaactgccatcctgtcccctaaaatttcatacctacaacatgcttggcataatacctggcacatagtgagagtttactaaatatataccatagataataattgcagtattattaacatgatgaggattaatgcaaggcactgtattagctgctgataataatgatgcacaatccccaaaaagttcacttgtgtatttaaaaaccaatgaggaagatggatgctttaatgagcgatgaccaccaagtatgtacaagctatgacagatgatctacagatgctatggaaggaccagcatttctttaaataaaaactactggtaactttcatcttaggtcaggcattgtactaagtcctttgggacggagttattttactgaatcctgcatggtagatgctgtaccataattatcccattctgtagacactgaggactggagaagtaacttgtctaggtcacgcagctctagggggctgaaggccctgggctctaagccactgtcctactgcccaacttgcctgagtgcctctacactgatggttgtttcccaggacttcctgatttttttctgaaggatggaaacaaagacgacccaataggagtgaggtcattacctccctcccattctcccttcagcaccagatctccaggagatggttcagtaaaacagcagtgaattggatagaggaatcgtctctgtggagtgactttccttgtttctttggggtggaccattctgggctttcctcctttacacatgtgctcatgtgacactctttgtggagtgccagggactgtgtccttcgaggacagattgggtaccctgttttctgtggccttccatgaaaactgcccatggcatgctctcctttctttgggccttgaactctgaacgatgcacagaggcacttctgtcacatcttcctttgattctatgttgtgtgtattaggctgctgtgactatctctaaagttcttttagaatagaaatcatgtctgctcaatattctacagcatctgtctcaggctgatgagcatcccaggcctctccaaaatcagagtcattttttctttctttctttccttcaccaccgtttccaattcatcacagagtcctgtcagctctaattctaaaatgtttcctgaatctcttccaccaccaccctgggccaagccaccattacatatttctgggacaacagtagtagcttccaaactgctctcttccttttcttcttttcttcctacaatctatttgccacatggcagccagagtgggcgttcaaattgtcaatcagctcctgtcactctcttgctgaattccctccagcagttacctgttgcacttggtgtaaaatccaaagtccttccatggcctacaaggcctggtctggtctggtcctatcaacgtctcccacttcatccctgcagaactctctctactctgtacatgccaggccccttggccttgtgtggtcactcaaaaagaacaaacctattcattcgttcattcatcttagaatctttaacaagctattccttttgtatacaacattcttggttaagttggtcccttcttatcttttargtctcaactcaaatattgccttctcgaacactcatataacccacttataactggcagtctctctctattctgttgcttttttgttttcttcagatcacgtattattatcttcacaagtgctgtttattcatttgcctaaatgtgtattgtctgtctacccccagtagagtataaactccatgagccagggccttcacctaccttgttctttcaatcctatgccccctgcacctggcagaggggctgaaccataatgccagctaataactaataagcagttaatatttgtcaaagtattactatttgccaggcattgtcccaagcccttcacatatattaagccatttagtgtttacaatgaccacaggatgtggatattattattattcccattttactgatgaggaaactgaggtatggagggtttatgaatgcagtagctcaagggcatacagctagtaagtggcagagtctggattcaaggctccagagcatgtgttcctaatcgccacattacaatgcctctctrgtagatactgaataaacccttgttgggtgaattaatgaatagaagatgctcagtagagctttgttgggtaaacacaatcatggattattgtggaaatgtcttaggcctgaacattgtcaacctccaagagcagagggcatggcactgtctacgtgggtatgaaatgccccataacygtaaatggggtctgctcacaccacatttgctatttatactttatactagatagagccctctagctcgatggttcttttcttcccttttttttttttttccttttttaaagagaagagaattgtgggaaatattttgttttccctgggagccagactatgtatttacttcaagttttattaaatgagttataaattttcccagcaatttactcatagctcaagaggtttaayttgcatgtgttgccttttacaatatgcttttcgtaatgttgcagatgcttcttccccagcttcagtaaacaacaggcactccgccaggtttttgactgaacatgtgccaggcctgggaaatatgagttaactccatggtgactgttgggggccacacgtccccctctgtccagggcatctggggagctgagtcgaattcctgaggggcaggagcaaagattttctgaatcttctttttggacatctttttaatatttttttccacacgcaaaataaatmaataaacagacatttctgcctaagtatcaggtttgcactggtcctaattagaaagtagtgttaataggatgacagaaagcatttgctagggcccccagggtgatctctagagaggctaaagtcactttagcctttggggagctgcccacggcctatgatggtgaagccctttgagcttcgaagaagccagtccctctgagggtccaggtctgatgcctgtttcatttcaggtagagagcctcagggttgagaactcatcttctggtgtcacactgtcgggttgagttctggctctgccacttattagtcgtgtgaccttggacaaggtacttaacctctctgtgcctcagtttccgcatctgtggagataatggtcataatggtccctgtcttgtaagtttgttgggggaattaaatggaatactgcatataaagcgtttggaggagagtggtttataaatggacacataaatggcatgctgattgtcccagggctattcagttcattggctacaacttaggggacagatcctctcagtgagttattcctggttggagatggagggcactggagcaagggatggatggtgtgttcattagaatgaggcttagctgcatgtagcagaagagctcaagttaacagtgacttagcattgtagagatttatttctctcacataaaaggagtatggaagtattgcagggctggtgtgataatttcatggtgtcatgaggaaccctggttccctctctttgtagctctgacattcttagcatattttctcatgattcaagatggcagcttgtgctcttgtcattctgtgcgcattcctccctcaagaagcagggaggaggaaggaacaaacaggagtctcattacctcttaaggaaacttccagcaagtcccacgtaagacattctttgacatctcattggccagagtttagtcacagagccacagctagctgaaaggaaaatggaatcgtttagcttggcagccacatgccaaataaaaatccaggttctgttacaaagcaggaggtggagaatgggtgtggacgcagtgaactatcaatgagtttccagtattgtcctgtggttttgtgacttgaggttgaaggaattcccaggtacataaagcagtattaaattttgtttcctagatgattttaggtggcacaaatacattttttatttgaataatcttataattttttgtatgcaaccatattataattacatatcaaacccaggatttcacagatctcctacagtgtgatacaatgttataatgtttttctttaagtctaaatttaactgcatcaatgtttaaaaaattaagtaaatgccggcatatagagatgagccaggcaatctgtgcagtggctaaatgtgggtcctggggcctgagtttgaatctgtaacctgccacttattggccaaatgaccttggactttccatgcatcactttgcttatctgtaaaatggcattaataatagtacccatctcacagagttgtgataaggaccaaatgggttagtacttataaagctctaagaatagtgccaggcatgtgatgagtagcccgtgaacattagtcattgttcttattgttattatttctgttgttattgttattattatggcttatattactgctattattaataataatgattacaatagatgacatttgaatagagcagaaattacaagggtggtacatgcgtgactgaaattagggaaacactggcttagaggagtgagattggcagttaatcaggagagtcttagacacagctataaataatgactttattaacaattaaaactagtgctttatgtttaaagtggctccatatatgataataacattgattagagtttattgaacatggtgccaggtaccatggggtatgctttaaatatattacttttaatttttccagtgctgtaagctaagtgttctttttattctatagatggagaaacttagtctaggatagggttaagtaattttcccaacatcccgtggggaccagcatcaaggtccctgctgataaacgcatcttgtttatgtcctttttggtgccctttcttcccttttccccttctctgtttggatgtcaaggaccccttcattccactcaggaccctctgatttcccctcctccccatgtttcttcccacaccccaattaccagctagtccatatgtgccagctgtttcycaggtcccttcccactctcagaactgccctgtccatcatctgtgttcctgcaggacacaacaggcaaaagctagtctaatgaactaatctatgaaaatggacattaatagactaatatgtagccctctctgggtcatttattttagaatgggcttgttgacaaggttttgtttttttcttctgaataatttacttttctctctctttcttcttttaatagactttattttttagagtacttatagttcacagcaaaaattgaacagaaggtacagcaacttcccagatacccactgtcctcacactggcatgtcctctctcactctcaacatggacttgaggtcttcactcaaagggataattcgtgatggagattaaaggcagcaaacagttcagtagccttgtgggtctgtcctagaatgtctcctaggttattctttaaggttttttaattgctgtatcataggatcctgacaaaaatgggacactgagatgatgaccaaagggatcaagcacactggtgagtgatcagtcaagggccctgctcccccttctccagcacccagccctgtgtctggcagatggagagcacgcagtcaatactgttgaatacatgaatcgcctaccaggggcccttcggatatgcagggaatggaaggtcctttaaggaatgggacagtgacttacagtgggtaaggtttggttgggcctcgtgaacttgatagatttttttggcaggggggctataatgttctgtcatgcaggtcagcttgctgtcatcctggacccgtgcgtgtctggctaagtgtgaactgaacatgagcagcatgatgcagggattaggggacattcatcttccactctttctctttggagctggaggctcaatgtgttactctcatgatgtcacaaagcaactgatgtcttactacatcctgaaagaattatttcctcttttactcttcttacaaattgtacctcatgatccattgaatttcactttcctatttttccaacatttctcattttctgccctttttatcctctctctcagaccattgggggaaggaagaaatgttgcttagcaaccagaatgaaactagtcaatactgcttctaatattaaccctttggtaacgtgtgtgcgtcccaatccatgtgttatagaactctcccctagcatgttttaaactagaacttcatctaaagttggcagctcaactttatgtcaaatcacaaacatcaaggatatatttgtgggttgttataaatgttagcaagttccagtgttataagttatacacattgtctgcttattaaagtggttcacttttacattcttaacttttgaaatttgctgtgactatttcacatgttactttcactttttgaacaaaatagtttctttgctggcttggtgtgtgtctgtgtgtctgctggtttgctttttagacatttaagtccatttgtctgacaattggaagatatgttttctgggttgtatcattcattcatctaatgtttattgggctctactctctgccaggtgccatgcagggcaccgtggagtattgctgacttgggcaaacactgcagaggttgagcagacttggtttctgtatgcatcttttcatcagcaaagactctttttcccttttcatcttcatctattgaaataacatataacagggtgggttttcagatgcaatagttactcttctactggaatggtttctttggctttgattggacaatattatccatacattttaagctctttgagagtgagtgggccgggcacggtggctcatgcctgtaatcccagcactttgggaggctgaggcgggcagatcacgaggtcaagagatcgagaccatcctggccaacttggtgaaaccccagctctactaaaaatacgaacattagctgggmatggtggtgggcatctgtaatcccaggtactgaggaggctgaggcaggagaatcactcgaacgtgggaagtggaggttgcagtgagccgagaccacaccactgcactccggcctggcgacagagcaagactccatctcaaaaaaaaaaaaaaaaagtgagtgagtgataggatggaacaaaaagataaatattggccagctcctctttcatacaccaggtacagctggtgcacacacacagttaaagtttgggagtgttgatttgcccgacataaaatcatgttggtgaagttggcctccagtgtttctcttcttacatatgtgcccccctttttgctacaggtgacctgtcaaatctcccctgatatccagcactctcatgccagtgaatgccaccctcaactgggggaaacagtgaactgatctcttcttttccttagggcattttttactttattgaagactctctacaaacacagtgcctttgggggtgaaccagaatttactgtggtactctacacagacagtaggctgagtgaaagctgaactgattggggttttcagattgcctctgtcttctctcacttggaaaggggcgattcccccttacattccctctcacttctggggtgcctagtgggtgatatggttgaccatccttggaccccgcattgccttgcagggtaatgccagttgggttactcacattctctgggtccccagagttcccatacacgagaccattgtggagttgtgggggttgtgtggattccccctgttagcttgagtggccagtattccacaatgcttgggcttggtctctgtgaattggttgggtggcaaaaagtatctacaatgactagattctgtaaagcaagctaaaggtgaagctggccttaatgattttagcttatttgttatctaaaagatagtggtgacctaggactcatcaaggtgtggctttgaactggagtttggtagatgtcttcaaaaaggcatccaaaacacctgagattattattacatggtacttgggttcttgccttactttattcagaacagaaaaggagagagaacttagagacacaggaccgggcatgagcttaattctagcagcttctattgttgagcacccactatgtggcaggcattgttctagacaggtctattgcatacgttatcttccagcctttccagcagcctcgcaaggagcacattcatatccctgttttgtgggtgaaaaaactgggattcaagagagggtaaatatcttgctcaaggtcacatagcccacatggaccaggcagggatgtaaatgtagatagggtctgactctgcatcctgtgcattctctgcaggaccacattgcctcctttgcaagtcaacctccacttgaaggcaggggggagctcgggttgtagtaaacaatcctagatgtgagtaatgtgggcatccagccatcgaagcctgccaggacagtttttaccatgtgaaagcacttagttgttcagtaggtcccattgatcagctaaaaccatagcaggaacaaggaaagggctacaggagccaaataaaaatttcacattcactaacttggaaagtctttcttcatttctcatttactgcattgctgtatatctttccatctcttctctcgaaacatgatcccagtttactttgaagtggctgagtgtggcgggggttctgtgagggagaggtgattctgacgatgatgatggtcttacctgtcattgaatccttcacatatatgtgtgtatatatgtatacacatgcatacgtaatatccccaagtcattttcatttttccttcattagctctcacttacaagttatacattttcaaatataatatgcgtctatgtatgtgaataggtatgtgtatatgtgtgcatatacatatgcgtacatgtacgtctccaatgcttttcttttctttttgatacagagtcttgctctgtcgcccaggctggagtgcagtggcacaatcttggctaactgcaacctctgcttccccagttctagcgattctcatgtctcagcctcctcagtaggtgggattacaggcatccaccaccatgcctggttaatttttgtatttttagtagagatggggtttcacgatgttggtcaggttggtctcaaactcctgacctcaagtggtccacctgccttggcctcccaaactgctgggattacaggtgtgagttaccatgcccggcccccagtgtgtttttatttgtcctgagtttcctttcctcctcacaatgctgctccccatgcagggagccggccaggcagctctagggcagggggagtgaacagggaaggaactagccgtgcaccacaaggtcgtgtgagaatgtcagtgtctgggcatatcacatggcaagtctttccttcaacgacatcatgatttacctgggttcttgctgagctaatctccctgcagcaagaggacactaagtactggccgtatggctggagaaagctgccctgggtcctgcaaggccaggctgcctggaattcttggggatctgtgccctgcggggaggatatccaaaccagcaggtggaggaggagaaagagacaagagctcaggcctacgcagagcttccctgctggggcctggtctgctgagtgggaaggaacagtcaaggccatggagccgtcaacttctctgccctgtgtcctcctggaagggaaagggaaggcctgccagggcctgcagagacaagcagccatgtggctggtcacggtccaagggaacgtgtcccactcacagggcctaaagcgggaagaacacctccttcatgctgcatgagcaggagcagatagtgtttacctcttttgtccgtggccctgtgtgggggaccaagggaccgcatcatcctacataagatcagcgcatgtcacagccaggcagagggctcacgtggcatgccaaccaaattgccctttcattggcaatgctgaaagtgaaggccatgattctcaattcctggggatgcgttttgcattttgaaactcagatttcaggaggagctgctgcatttttctgttcaaacccccagtctgagagaagtgggctcaagaacgtaagctgttggactcttcctcaccctctgctcaaaaggcattcttaaygagcctcaattcagaaaatgaagtgtccaagtccaaggcctgaaaacctgatgcattatagtaggatgaatattttgtctaattatttgtattaatacaacagcagcctaggtacataggctttatatgaacttatctgtggctgaactccttgtctcccagatgaggagagcctagatagtggtcttttgtgagaaatggcttgttggagggagcgggtgtgagcagttagcagaacttctcatatttatttttttctgactttgagggagaattctgagaaacgatggaaatgggaaaggaagtgagtaggaaaagtaaagggaaatgtataaaaatgaaggagagaaagtaaataagaggaagtattagagataccaaccatggcatccagcgttttccatgttctgttaatcagaatctcagcttaaattagcataagcaaaaaggaaatttattagttcacatgtctgagaaactgaggagtggataagactccaggcctgactagagccacaggctcaaataacacagttgctgccatctctctcctgccacctcacagctctacttccctgctgctgacacccaggtaaacttcccctaagggaggcaacgtggctgtgaactccacaaggctttcatattctcttctcatcaacctcagtcaaaaaagagagatttcctctyaccagcagttccacaagatcccagactgggtcttccagtccctgattgggccacatacccaccaacctcagcagtctgtgagagatgacaccctggttggccagtcagtttctgtgcctgcctggagcctaggtggagttggctccacagaactcagagatggagggaggtgggaggagtttccctggggcacatcagggtacttgtacaggaggatgtgaatgcacactgggcaggaaaagacccgccaaaggaagatgygatgaagcraaaaggggtcctggagaagagctgttgatgtgatggttcaatgaagatggagaaacaaggaaaatcaaacctgtgcattgctttgggtggccagactggatgayaaagccaacatggtagaaaggctcttgtatcaacaggagttggtcaagatgttttctagacagcattttaaattcagagcatcccttttattstaggctttagaatgaaggaatgtggttgtttgggcctatggatcttaaccattgctagaacctattattttggagagctctgagagttagtgaggagagagtcatgagctggaataaacatgttttgagtacctactatttaacagacaccagtggtttaaagatcaataagatatggtttctgccttctggcggaggtatgggtaatataacaactacaatctcgtgaaactctcatattctctgatgaaaaggaaatattttcttcctccaggactaagttactcaggctgtgcttcctggaataccaggattgacttaggtgtttcgtgggaaaacaaaaacagaaacaacaatttgtgtcttgacagattaaaagatgttgtaccttctttccactgggggagggaggattggcatttgcaatgctcgttgtcatatgaatggctccaagaagtttggcartaatgaaagcttttagatgttgtttaacctggcattacaactagcttatgtgatgatggtgtacttctttcatgacactagtatagtattgaacatggttcataaaacagagcccacagaattagccacatcttcatggatttgcacatgcagagccatctggaaagacctgttacccagtctagtcttggatgttgtaagggacctattgagtgtttccccaggcctaggccacgcttctcaccacacccagcttcctgagaggtttataacgcagatcagataacaccagcttctcctgtcttttgcctctttgggttttctcctcaagaactagtcacagtaattctgttctttggagtctgggaagactgactgagattcactttactggyatcatcatctactggtggtacccaagatgattttggaggtgcatagctacatcattaattgtgtgaagaaatgctttttccctctcagttctcctttctgtccttttggccacaatgaggagaaagtcttagtttggagctgctgtgtctttaatgtttctattacgtgtggatttttttttttaagagagcagccctcaggctcaaagccttcagtaggtcactatgtctgaactacatttttaaattattttgttttcactgtacatatttctctgaatactttttacttatgactgtaggcaccttctgcttatgacagatgatcctggtctttatgatagttgtataaaattccctttaaaaataaatataaggaggagtgggtcaacttagatcaaggtttcttaatcttggcactaatgatattttgaaccagataattctttgttgtggagagttatcctgagcactgcaggttacttatcagtgtccctggcttctacccagcagaagctgcccccaccaaagttgtgacaacacagaacatttccagacataagtatccctatagcatgaatgccccaagtagtgtaaaccaccagtttaaagcagagtgatatagaagtgtagcaatagttgtgaaggtcgtgtggatgaccagatttgaatcctgtattatggttagtgggctggactgccactggctgccataagagctgggcaccttcaccccaccccatcaccctctccacttcgaagtctttccagatggctctgtgtgggcaaatcagtgaaaatctgtggtctctgtgggttgttggtaagagaatgagctttggaccctgttgcatttggggctgtccattcttttgcagaagcagcagaagtccagggagggagcactgggcagcccagccccatgacaaatgccaagtcaccagaaatcaaaagaggaatgctgagtcataatttccttcattcaggaattagcatgtgcttttgagattttgaactacagtgcaatgcagagctggtgaatgagcaaggtttaaatattcatttggcattagcatctgtgaggatggccagatactttcattaattggattcaggttatatgtgtttcgtttaaaagcagctgcgatcactaatggaatgacctctgtgtcrctttccattctgaagcaggaggcacgatagctcctcttaggatgttgtgtttgccacttgcgctgacaccaaatgctggtaaaatatggttgctccccgctttaaaaacaaaattttgttttcatttttaataaagagacagatcccaggcttgaaaggcatgggacactgggcagctatactgatggctgcaaaggtgtgggatttgggagaagtcagttttctctttcctatccaccacccttcttcctccctccagcctccaccaccttgaaggccgtgagtccgaacaggggacccagagacaggtctgggtgtccaggtggttccccattctacattcagcatggggctcacctgccacccactcttgcctccatgtcccacccccaacatgcacacatgcctctctaggcttaattttgagcatttagaaaaacataagaccacccccacccccagctctcttttcatttctccctttcccaccaagattcacgcagaccggaacagagtctttcaatgacaatatactattatgttagtataataataatacatttgtttgctcttattcctagcagagcagccacggagtgctctgttaaaatgttagatgagaccctgttactcctctgctaagaaatctcctgaaggcccaagtgctcccaaggcccaggagaccttgccctccccttggcccctgacctctgccctcaagcctcctccctggccctggctccctccatgccagtgggtgcggcctgtccttgcagctcctcggacctattggatgtctttttccttgatgttccttctatttctatttcagtatctctttcttcctttgcatctttgcttaaaagatgtgtcctttgcacagtcttccctgttgagaatgaccccttctcccaccccagctacctctgcttcttgctttctctctacagcctcagagtcctccacgacactctgcagccctcatttcccatgcaggttgcrtgccttccattgcgggaatccaactccacaagggctggggtcccatccgttgtagtcattggggtatccctggcatctgacacacagggatgctcaataaatgttggtgagtaaatgactgactgttactatgactgtattagtccatgctaattgcattgctataaagaaatgcctgagattgggtaatttataaagaggattaatggttctgcaggctgcacaggaagtgtactggcttctgcttctggggagacctcaggaagcttttactcatggccgaaggcaaagagggcgctggcacttcatgtggctggaggaggagggagagaagggggaggtgccacacatgtttaaacaaccagatctcacaagaattaattatcaaccacagctccaaaggggatggtgttaaaccatgagaaaccacccccatgatccagtcacctcccaccaggcccatctccaatgttggggatcacaatttgacacgagattttgtggggacacagatccaaactgtatcaatgactgatagtaacagcagcagagggtgtcatgggttacagagtgcctctgtgtgcattttcttgctttcctcaccacaaccccatgaggtaggctaggaaggttttattatcccactttgcagatgagaaaggtgaagcccaaagatagccaggggtctgttcaagttcaaacagctagcaacagtgaacttgaacttatttcttctgtcccctgggctgtttatctttgatatctgacatggctgattcaggcttctagaattctagggcagctgcaggtgaccccagtaggctgaagttaggagacctaggtaaacgagtgtcatggtgaaatccccccygctcctgagaccccacaggctcctcccagacaggccggcctccttaggccttgggtataattagcctagaggtctccggccttgatacaataactggtaagaagctatccattctgccgttcattaagacaggtgacacaagatgaaatattttaggtaaatcatctggcctaatttagaaaggctctgtagggctagagcctttgatttatcggggagaggtatctgttatcagagcgtctcacacacggacttatttattatccagaatctgtttttaatttcagagattgtttacctaaactgctgcgtgtcagattccaggatggatttctgcttagcatttaattttagatacttgccatggtggacagaaaaaaatgggcctccagaatttgtagtttcattatgaatcttacccttggcagcccctaccagtagtttgtctttgaaatctccttggtacttgttaaccctgctctgctgtgaaagagatatggtttatttattggactttgcccatttatgaaaaagtacagaaattattaatggtttagtagctattaatgcattacttgggtggaattcaaattctaatatttatggtaaacccctttataatgaaacgggcagagaatcagctctcttgctccttaaatttggaaggctctggatgccattggaatggctccctgtgaaatatgagcccttctggcattatatttacacccataaataaaaaataagtactttgggttggaggagaaataattaagaatatttgtgtagataataaagaggaaatggtccagtttggttaagtgtgtgtttaggaaatgccaggggctgctgggactcgaatgagggatgggaaagatcagggctggaggactgtgggtgtggaggacttctggggacttgcaggaagggaagccttgtggaggccatcgtgggaccatagtaagatgtgtggatctgggaggcttgtttggattccaagtcttccctaagttagtacagctctttgatagcagttgaacttccctggacctcagcctcctcctccataaagtgaaggtgatatctcacaaaattgtcaagatggtaaacagtgtagacttagaattgtaataaataatctacagatctctgtatatgaggcctaaagagagaactcgggtatggcaagcatctcagagcaggattggaaaawacatatacatatgtatgtacatatacacacatatagagatacatgtatttttggtgtgtgtgcataattgctggctgtcgagtggaagatagggaatatagaatgggtatgaaatgaccttaatatggacattttaaaaaatacggtctcagaatacaataaaatgcattgagtacctcttacccaccagggctcttctgcccgtggaatctgttattgggttaatgttccctgatctttttctagtccaactgagcttctttctgacctcttcctgttagaagctaaagggtttggttgaatctctacatctgtaagcatctggtaatcagctgtaaaatcaacatgtcataacaggaaggaatctcaaggagcatcttgtttagggatggcaaatacattttattgcatatgaaagctatatagtggtggcttctagaagtgctgaattgagaaaaattctgacccatagccgtgtttagcaggaaagatgcgtgactgatgagtggtacctactagagttgatgagtgggaagtagtgatgttgtgtctcacatcctctcatagtttttgtttgtttgtttgttttaagaaggaaactaaaacctagcacagtcaactggccaagctcacagagttaaatctctggcttccaattcaagtgatactgaggccacaccacactggtgtggttactacagacctcctaggaggacagcagtcagctgcccctgacttaacagagtaccacttcaagtggacatagtgtttgacatctccttgacgtgtctgatggccttcacagagagccaagaagccaaggcccaagagactatttggatcgatgatgattgtgttaatgataacccatttatttagtatttctatgtccctggtcctataccatgcctttgatgcttgttttctcatttaattacaacaatcttatcagtgggtgacaatctcttcattatgcacatgaggaaaaaggggtccagataggttaaactctgcagagtcacaagctagcaagtctcaaagtctcacagactccagagcatgtgtttttaatcactggacatctcctttgtgcttgtgaatggtgccatccctagaggtagcatagatgcatcctccgagtaccatgargaaagatgtacatgtaaagtagcaaaggaagctggggtcagtgggtggtcgatgctcctgacagacaacatttaggcgtcggggaagaatgtccttgccatctcatacagagtttccctatttctgtgtgtgctgccgtgactccagcaagagttggatggaattggggagatcaagtctccagttctttatttctgctccctgtagctaattgcataatgactcataaaagttaaatttctggtgagcatgtctgccatgctgttttgctaacgggcatggacgtttcctgacttcagaagaaaatgagccctgatgctggagaaagggacaacctttccccctaacaaattttgcctctcttgtccctaagttatgaggagcctgagtagacagtctcattctgggagctctgggctcctccccatggtgctccaggggctggtggctggcttgcattgagcctgtttactgtgtggtgaaggcagaagacctggtcattgtattcctaattttacctgagttaactatagccagataacacaggtcttggactcaggtccaaattcattcatccaccaggcttatcctttgtctgcctattggcttttaaatattcaggttacagggtataatcttaacatttaggttaactgtcaaataaaaataaaaataaaaataaaaatgaaaattaataaggtggaaaaaaagaagagagtgtctttatttacaacttttattggagctggtggaagggctccctctcagcccttgtgattcctgtctagaaaatgggctcttctctgcatggtgcagtcagcaaactactggtctcctcctgggctgggtgtgggttgctgcmctgcctgggtcacatagaaggaagctcaggaaattctttgatccaaagctacttttctgtcctaggaaaggggtcccagaaggatttcacttctccccaagatagcaatgagaattgctctcattgctgctgatgatgatggaggaggaggaggaggatactatgttagcatttgagtagaatcatcataacctggcaggcattgttctaagtaattaacataattcttcaatagacttgaagttgctgttattgttatccccattttgcagttaaacaatagcttggcccgcttggtggctcacatctgtaatcccagcactttgggaggctgaggctggcagatcacttgaggtcagcagttcaagaccagcctggccaatgtggcaaaactccatctctactaaaaatacaaaacttagccaggcgtgatggtgggtgcctgtaatcccagctacttgrgaggctgaggcaggagagtctcttgaacccaggaggcagaggttccagcaagctgagatcatgccactgcactccagcctgggtgacagagcgagacttcatctcaaaaaaaaaaaaagaaaccatgactcatttattccctcagggtcatattattggtacgtggtggagctggcctgagaatagagtctgtgcttggtgactggaagagtgtcttaggagaggaacacttccctttccctgtcagtctccagatgcttactctcctcttcttggagattgttttctttttgatcaaaattaaatccagaagagagagggaaaatcctgatggagcatctttgcaggccccttttatcagggcttttctctggcttcatctacctgcctgctccacaggccccaatccctcacctaaacccctaaggcctatctattctttgtctgtcatgaacagttctccaaatctttattcaccctaagttatagatgaatgacagaagatgaatgtgtttcttgtcccagcaatatttgtattttcattgtagtcgaagaagtgaagatggaawttcaggtgcaactgaccaggtgctgcttcccactctatggtctttatatatccaagctaacctgagatgcaaagctaggaattcacttaaactgtctgccattccatctgtttggacttgtctacaagccaatcaggaagacatatgaaaggtgaacagaggcagcattttagctccttctgcaccctaggattgtacagtgccacagtctccagtagcatgctctgaacatgatcactgtatcrctcttccagatggaaggtgatcctgcaatcagtgggctttgcttagcacagtgtaggctacagtcagaaacctgactctgcgagaacattccttaggtgccgggagcaggagagggaggctggacactccatgttgcctgaggccaccaccctttggactaagagacagaaagaaaatcgcgctcacctctggaaagaccaagtcgttgatgtcctgcttcccytcttcagggctgttctacctataaggccatctcctgaagtcacygtgttttttatataacattttgtccttttagaaattatcctgaygcatgtcaagagctttcacaccgaaaaaatrtgtcacattagcttccaagtttctgattgtctaaataacgcagcaactcaacatacagctgtctggcattttgacagtacaataacccataattcttcctgccactcaacacttyaaggttagcattttgtagtttgctctcaaggagtagtcatttaaattttcaagagcaaagaaatgaatgtggctgcttcatacctctcttttgatctttctttatctgggtggtttttccatttatattttccattatatattttggaatgcttatatttgggtgtaaacttttcttggagagttagaatgttgtatcccattctccagatagatgggaataaaaatgagacatatctgctgagcttcagagggcagctgccctgtgagcagttcccaagcatttgcagtggagtaaagcaagaaggaactagtaggcgtatggagtagtttatgactctttcctgcctcctttcagaaggcaggtgaagtacttgcagctgcattctgaggaaggtggagtttccagtttctaccttctcttgagagaaccccacttgcttggtccaacctccatccttgagtctcaaggatgagtcttggaaacccaattaacatctttgacttagctgctggtttctgaattgtcctaactggcttggttgcaactggtcatctttgtaggcacattactacccctaggtgggaaactgggttataaatctggctttcattaattacctctgtaaacttgaccaagtcaacagttttcctctttgaacttctttccttatttctaaaatgaaattactagctcttgccatacctgccactctaggcttatatagctgggataagaagaaacaataaggataaatgtgccttgaattattgagagccatgctatctcaatattagacattattgtgaagtttttctttcaacccactgccagtttttatcccggatctaccttcctgcctgcagtaatttagtggcttattgtgatgtgtgggtcactttctgagacaaagagagtcaatataatgccttctgccatgaacaggctttatttagtggcctttcttggactgtgttcaagagtaaactcttggatcttaggcaccctgaggatatctcagggtttaaaattcctgagataaaataattaagttttagatccataactgactgacagactcaatgaatgtgctttgcctgggaaaagcctaacctctccaaactcaccaacccatgtttaagcccatgaagttaagcacaatttaaaagcctgaatgtgtgtgtaaaaagaatcactgtgtttataggcaatctgtttacactttgaaagccattagagtgatagtgataaaaatttaccagtttgggtcctaaaatctctaaaacataatttgtttgttgaggcctattggaattgatgaagaagagaattaactcttcttcggcatccctgggactcactctgacaagtctgagaggggctggaaattatagaagatttgaatctaggttcatggggagttttgaacgtgtggaatttctttggttcgttgcttttggtgaggaggaatccaggtcaattttcccctatttattaaaggttttatgacccctcttcttcagaattggcaatttcatttgctgtgcatttgctacttctaactggagagtttgaagtctggtgcaatctacttgtataagatgctggagtatcacagtcccatgctacaaatagcctgggctaggaggagaacaacttgatggggtttaccacaaatgtttcgatactagcaataacacagtcacttgaattgcatatcattctatactcttcaaagcatgttgcatctgttaacatagctgatctcagaatagtgccacgaagcaggaaggactatgatttctaaaattacgtgttttttttgtttgtttggtgtttttttttttttttgagacggagtctcggtctgtcgtccaggctggagtgcagtggcgtsatcttggctcactgcaagctccgcctcctgggttcacgccattctcctgcctcagcctcccgagtagctgagactacaggygcccgccaccatgcccggctaattttttgtacttttagtagagacggggtttcaccgtgttagccaggatggtctcaatctcctgacctcatgatccacccgcctcgscctcccaaagtgctgggattacaggcatgagccaccgtgcctggccaaaattttgtttttaaggattttttcctgactatgaaaataatgcatattcattatagaaattttggaaaatactgagaatcataaagaaggaaattaaggttgcctgtaattccccacttcccagaaataaccacttaaaaccttctggaatatatccccccgacacacatactcctttctgtatgtatttgcacagatacctgtagattagatttttaaatttgagatccttctataaagatactatattgttctaggcctttcacttataaacatttacccatgttataaatagttcttgaaaccccactatttaatagctgaatagttttctgtttgaagagaggattataatattgttgagtaactaggttattttcagttgttccttattctactcggtatcatgaagtatgttccaggacatacatctattttttttttttttcattttaaacacagctctgattatatcctaaagacaaactcttagagatggaatggctaagatgtttctgtctagttttcgaggactattatgtaaagtgatagaaagtcagggattttatccaaatttgatggtgggaaaactgaagatcagagagttacacttacttgcctcagggtgcagagtggagcagccaggtggccccatggaggcactcaccttgctggcactcttaccacctgggaggtgaggacagcaccttggcaaagctaagctaggttacagtgtggccattgtgggctctcttcacagcccytatttgactgtggtttgtgatactgatggagattaacgaaattgtcattctgcttcacgtcactgcttctcagagctttctgggcttttcctctccccctctctccccaactcagtgctctctcagagtggctgcagcccatctgcctggcatgtttgcttgcctttctttttaacctaaaacattttggaggatgcctatcaagttccacaccctgtgttggctgcaaggggtacaaagatgcgttaattcagtcctgaccctcaaatgtcatctaggatgagaatgcgaacaggtaactgtggtgaagtatgaagaagacataatcctggggctgtggaagaatcagaagtgtcccgtttgtaaagcatatcatgctgttcctggtgcatgacaaacctctagtctgctgcctcagtggacccctttgtattcctattctatagtatttgttttgmccagacttatccccaaaagtcttctcacttttgctcctttttgctccttgtctgctttgacttacttcccattgtttttgtacgcagtgggcacctaataagtaatcgatggtgtggcctcatcacctggcctctgggtacctctatcctggccctattcttgctacttgtaagttcccaggaatttgcacctgtccctgagtctcattttccttatttgtaatattaagggaagaaaacccaaataactgctaatgaaaataatagcaagcatgtattgagccttattatgcaccatgtactgttgtaagaactttacacatattagcttattaaagcacacgtcttcgtggggttagggttactgttgtcccatttctcaggtgacgatccagggcccaaggccacatagcygggtggtgggaccatgaggcaggcagacattagagattactctcttgacattgtcctctactttcttaggacccttgccttacattgtacttggaatggcaaaacacttgtggtgtaatttgggagttcaatatggttagtttgggagagcagaagctctcttgagttaataatgtattgcagagcaggcatggggacgtctaggaccttggctgttccctccccaaagctatagaacatcacagaaccagggaactgtggggctgggagagacctctgaggaagagctcctttttcaaccatccattcacttgctcactcaccaacatcttgagcacatgctatttgaaagtcattatactacatgttgctcttgctatggagactaaaaacaggtatgacttctgctctcaggaaactcacaacccagaaagccgggaaatagcatgtcacacagctggtgggactgttgggagagaaagcagtaaggatgaaaatgttttcagttgaaatgcctaattctctctagacttccaggaaggggcctgacaattttggcacaaggactaccttctttccagtgcgtggctcatgtccctgggtctggcaagtccagaattagtagtagagaactcttgtccaaagcactaatttggaggctgagatttattgttgtcacagcacctggcttacaaaaataagctttgtcataatggaggaagaaaagggaggaaaataaagccaggttttagatcagttgcagaatttttttcccctgtctattgaagtttatagtaagtcaaaatgcctggtacccagattgatttgaatgaaaaaaatagatatacatatatatgcatgcttgaacaatgtcaggcttccaatgtgcctctagttcctctgtaagtccccaatctaggagtttcttctgtagcttgattccagcaagaacaggcgctgcttcagtattcatttcagtggcgttgacaatactgacaatataattgacctaaaaagttctggatttcctgttaatgcactttagaaatgtacatcaactaccaaaaaaaattcatttctatctacatttcacttgatttccattttcaagagagaggcttcatcattattattctatttgaatagcactgatatcttgaaggatggaaggagatttctattgtatgcgggagtactttatttcgatattttctttgtctgattatacatgataaacacacattagtgacatttcgtgcatgtttggaagataaatggggatatctctttaaaccattcctgacacttgctaacctgtgagcttaatggcattttctctttgattcaataatttgtctgtcaaaaaaaagctgggctgacattctccttgttgtgggattgaaatggaaagaaatctcttctcttgaagataattttttttttaaattgaggggaacattttaggataaaaatgtttttgaaattatttgggtttttggtgatggaggtggaggacgggggctgggaggatggcgctgatgaatgcgagagccctgacattatatgtgtggcaagtcatcttaaaagggggcccattacctccatctgcaagtcctcttgaaataattagggaacgtgtgaaatcttgcaaatgaagatggctcctactgcggtgtctcctgggagccatcagcctccctcccggtggaggtggtcgggtggggtgtgcatctgtgtgcacaggcatagctctgactccatgcacctgtcttagttcccctggatgatggagaagtcccctgaacaatggtgagagggaaggcagtcccagcctcatgctggagaggctccaaatccagatgcctgttttatctttggagattttggagcagcctcattcaggggctgtggtgaatgtgaatcgagtggtgaacctcgagtttaggaagacatatggtgggctgcaggtgaggcttattgctcmtgagggaggcctgtgcatctgtgagaaaggtggcctcacatgttgggaatgagggaccatttcagagctgtatcatgtgaccccaggatgtgttgctagcctgtctcctggggcccctccgtgccctgcatttgagggtttcttggaagtctgattacgtaaagttgatgtkaataggcagggagcagaatggaagaggatgcttggtgttgagagtctgcttccctcccttcccgcttctccaccataaggggtcttcacatgcaccattagaaaacaaggacttattaggccccctcacgttgattcattcaacaccttgtatgtgtgccaggcacagttctaggccccggggaggcaccccaagtcatataacttgcccatagtgaagtcaggaataaaacccaggtttcttgattcctgatctgatgcttttctggcacaccaccctgccttcctggagaccccatctcctgcaggagcctgaaattctttcgcattgtctggttgttcttccttatggcttccggttcccctgtctgagaacgcaggtcagtcatttcatgctgggttaccctagcaaaacacaacaaacacaaacaaataaaaatgaagtcatcaaccatcacatgtgttttcccaggctggatttcccactagcaaatagggcccttcaaaacctttgaacatcctgagcactgttactttagaagccccatcacacagcgtatcaaagatattaaaattaacccccatctcatattaaacatgatttatgaagtttcaatgtgaaattttggggatggattttaaaaatcatttttatagttttgaagtttaagagtaaattcattatggcttaaactttgttatatttaactgtaaagcttgagttgatttgcacttaactgactgatgaatataatgtttctttctgttgaaatttaatgaaatatttatttaatttattattttcatttattatattattatttatttaatgaaacatttattaatcttagttttgcaatttttatttcacattttagagccatttattttcagatatcaaacatttcattggcctttaatgagtttagaggagagcccttgacgctatgcttgtagctcctcatggatgaaaggccctgaaaacagacctctttgcagctacccacccaaaaccaaattgtatactgcaacatttgctgcccttggagaaccccaaatgggcttgttggaaaacctcttctaaaatccctgggactggcctgagtgtcatggaagtgaccctgagggctcaagaagaactgccgtttctacttgccatggtgtcttactcagcttgggctgccataaaaaaatactgcagaccaggtggcttaaacacagacatttgtttctcacagttctggagtctggaagtccaagatcaagagccagctctgtttctggtgaagacttttcccagcttgcagatggctgcttttttgctgggtcctcacaccctcacatggtagagacagcacaccctgttcactcttcttctgagggcaccagtcccatgatgagggtctcacccatgtgacctcatctaaccccaattctctccaaatactgcaacttcaaatactacttatacaaaggttccacttcaaactactgtcacattgagggctagggattcaatatatgaatttgaggaggttgcggggtggggcacaaaccttcactccctaacatacagtgtggtggaaacacccaggcctcagagtctgtggctgtgggtttcacatcccaggcccaccacttttagcagtggttagcctccgaacttcagttcctacatctgtaaaatggggatggtaatcaatctgtagggttgctatttgcattagaagtaatgtttataaagggtccagcacccagtaggtacctcttctcattgtaatttacccagtcatgtgagggcatctttaatgaaatgaaacagcagctgttatgtgtggagttacaacaaagagacacacacacagagcagggagacaggccaggagcatgtctggaggcaagaaaacaggtaaggtccttggcattgaggcaaggaggggctcctacaaaaaaagtttttttcctacatttctgggaagtctcaggctttcagggaactcctcaggttgtgccagactgcaaagagtgggctgagaggcccagccttctgggcctggggatgattcaggaatgaaagatccccaagttgggaagactcagcttgagggtttttcaccagaaaacaatctgcagtttatttatttatttatttttgccatttccagaatggaaaacacaaacggaaatgatgagttttataaatataggagttttgtgcctgggatggaggtggggcgttggtatttatgtgcaaatagccctagattctgcagattaccagtatctggggaaggaacaaatgcccagcatttagaaagccatcagaacagggagcgccacccctggctgcgagaattggtgggcagtgatatggcaaccctctttcctgagtactccaccattagacgggattggtgggtggaaaatcagaggccatgagtagtctcccaaatccttccacttgagtcagcctgcagccaattaaccttcctgaccgactcaaggcaagcctagaccacagtggaaggaacgtcccctggcccaccctctctctctaccatcctctctcccttccttctgccactcaagtgagtgctcagtgtgtatcaggcactatcctaggtgcttgcattaaatccatgggcaaaatggaaaaatttataatagacattaaacaataaatatgtctcataaagacgttacacgttggagggcaaaaaatgctatggaaaaaagaaaaagagagcaggtaataaaattagtagtcccgggtggaagtggcaggacaggttgcagtattgaacagggtggtcaggagaggcagcattaggaaggtgagatgagtaaatggcaggtaagtcagttgagggtgttgaaggacaaaaagattataaaatgaactgtctctgagctcatagtgtctgatagggggaggaagaagccagtcaacattggaatgcctggaatatcatttcttcctaacaaatctgagcaatgtggcttagggagatgaagaatacctgtgcctgccagtccttaatcttatgtggctcatggtaccgctaggcagtgcttggtatcagatggagattgggacctgggtataaagccagagttctctagcccaggtggggtttttgggtttctaatggctcaaaacgtttgttggatgaatgacatgagtggttaaatgaaaaactgagtgaataaattcatcaatgagcaaatgaatgaacaatgaatgaataaagactgattaaaattcttatctgtattaagaatagataatttacaagttcacaccataagttactagttgcacatttagcttcagtagtaatttttaaggtgctttgctatatttaaaatatataggcatttacaccattgagtaaattttcaaatgtagtgaaaaattatccaattttaaatatgtttaggtattatggtatagtccgaacttagattttcacttatagctgtaatcaaagtagaccatattttctgaaccagcagatgactttgcctcctatgtagagtgagagcagactgcttgataagcttgtgaatcacagtttcttgcttatggataattgctgctcttagtcttgagacatgacatagagattgacgcagagtaaactgctggtctgctggttactaaactttgcatattttcagaaagacctggggaaacttacagaaagagcggcagacagtgtcaggcaggccacagactggccacccccaggtctactttatcagaagtttcaggtatggtctccaatgtctgcagtttaaaattgtttctcaggtgattttgttgtcgatagtgtaggggattaaggaaccactgcaccaaagccaactttgagagcaggaggtatgtccttttcttttaatttttttttttttttttttgagacggagtctcactctgtggcccaggctagagtgcagtggcgtgatcttggctcactgcaagctccgcctcccaggttcatgccattctcctgcttcagcctcccgagtagctgggactacaggcgcctgccaccacacctggttaattttttgtatttttagtagaggcagggtttcaccttgttagccaggatggtctcgatctcctgaccttgtgatccacccacctcggcctcccaaagtgctgggattacaggtgtgagccaccatgcctggccttaaaatttttactttattagtgtctatcaataaatggataagtgtaaatcctaattgcaggaagccaaatgagacagatttatccccctccaacaaggtagcatttcagtcttctttctttctctgtctctctttttcttattttgtttatcttctccctaaacataggacttctctgtatgtattactgtactatgtgctttctctttacaattctgatacattatgcatgtctttcaatacatattaaagctacatgatattccagaatgtggaagtgatccatcctttcaacttgttgaaattcattgatttactcaagtgcttccctcatagaaaaatgttgataaacctttgctgactgaataaatgaagagaacatagctatcttgtaccatccaccccacgtcagtttcccataggaagtttggggttaaaatcaagccagtttccttggcacatgtagttccagctacttgtgaggctgagacgggaggagcacttgagcccaggagtttgaggctgcagtgagctatgattgtgccactgcactccagcctgggtaacagagtcctatctctaaaaataaataagtaaatacctaaaaaaaataaataaatgggccaggcgcggtggctcacacctgaaatcccagcactttgggaggccaaggcaggcagattacgaggtcaggagatcgagatcaacttggctaacacagtgaaacccagtctctactaaaaatacaaaaaattagccgagcttggtggcgggcgcctgtagtcccagctacttgggagactgaggcaggagaatggcgtgaacccgggaggcggagcttgcagtgagccgagatggtgccactgcactccagcctgggtgcagtgcgagactccatcttaaataaataaataaataaataaataaataaatgaaccagctgagacttagttcttcttaggaaggttctaggctgtggtgagaacccctctaatgcaggggttcaggcaggcttgaaatggagtcgctgtttcacaaagggaaagagaacagatccgccaatgagaaaagttgatggggcagaggcctcaggcaaggtccagaccctgtcttcagagtctgtgaacatttaaggagctaagactttctttatcttcctggagtgtccacccactaatatagggcaggttatggtgaggactgtgaaagacccaagagccctggagctccctgtgcggcggctgagggtgttcagaggagtgagggtttgaactgarttcagaaggagagtcagcctgagctccgctgagcaaaggctctgggtgactctgccgcttacctggagagaaccgttttgcctctgtccggccatgtgaagaccggctggctagtgtagggggctcttggaaaccaggtgggtaagaaaccaagtaaactaactattctgttgtttctccaagaggagaaacagcagccacaaaaacctcagccctctgcagagcgaagctccaagagcccctttcacagacacataaatatttaataatcatctgtctacaaccaatctaggggaaaaaaatctttaaatagactgctcgaaaggccaaaacctgaattttaattgaggtactttgaattactcccattagtcagtcgctctgactttttcttagtgagggctggattgtttttgaaaggggaatcgaaattattagcagcccttaaaaaaagaaaaaacctgctgatcctactaaataataaactaggcttctttttaaaaagacgtggctttctaggcttcaagcaagaggggaaagtaagatgagccccacattttagagatgcaatttgaaaagcaagcgttaagggcattcagatgcctggctaagcagttcctcggcaaagcacttctgcaatgctccctggtcctgctaaagtttgcaggatggagaaggcgtgtgtgtgtgtgtgtgtgtgtgtgtgtgtgtgtgtgtgtgtgtgtgtgcgcgtgtgtgtttatatatwtattttccgtctctctgccccctgggcctgcagtcttctgtagccgatgtaacaatcctcctggatgaacctcttgtatctcatgctagccaatttcgacagtctaaagtgctcaaattgagccattttgttctctgtaaaataaacctcaggccattatgcgtggtttttcattcacccgcctccttgtcacccttcccttggcccctctctgcccaccctcccctccttccccattctctcctcttgctccccctctgacgaatgggagggaagcagacatcctttaggagaccgctgttttcagtccaggcatgtcaacttcactctggcacaatttgctttgagatctgtggcatggagcagggctacagggtcaccccccaaccataattgatcttgcttattcatctgcttcctgcgtattgccctctccccatgctggcctttgtttggataaattgttggaagatttactgtggtgctgaaagccacctgccctggtgtccccaccacctcttccagggtgagacgatagagtggcacttagggaagaaagttctcccttctccccgccatcccaaacctagaggacatctccyggcatcacaattcaggcaatttccagactaatttactatggaatcactttkcacggcccttgtgcaccggtatgagaaatgytaattggtgtgtgagcctgagatgctcttccaaaggatttatcgtcagaatcagaggaggggaaggggagcygaggccgtctttgtgatggcttggaggctgcactcactcgcttcagattatttttaaaaccaatggtcatgatggatctgaatccagtaatttattcgattttgggtcattaacccttgttctgcttatggcagcaaatgacttcatcgtcagagatgatgagtgttccgaactgtggggatacttggctctctcgagctctcatctgaaaatcaattttaagcaagtggcaggcattagaaatcctctctgcttataggtttctgcagcattgcctctaggatttgaagaagcagggagggcgggggccggggagaagcctctggaaaactcccattgccggggtgtttgcgttggggtggctaatgtcctaagaaggctacacaatagactgtcaaaatggttstttcagagtggggcatggatcacagtttagaaatgggggaaaaggaaggaaaggagcaggcctccatggagtgatcctgcctgtagactgaataaaatagcttgaaatcattgttttgattcccattgactgaaggctggaggggctttactggttaagcttttaaagccgcagcagtttaaacacttttttttttgccttttttgcctgctgcaccctttctccagttgactttgaaacacattaactcatctttggaaaaacaaaaaacaaacactgtttgccttcaattccgaggctggcttctctcttgaggtgttatataaataggtggcatcatccagcatcactgtgcagggcacaggggactggcgtggccagtgccaacctgcctcccaccgggtacacactcccatggctgtccacactgcagtcctctgccatgctggacaaactggctggcagtgtttcggatcagagaatttcttccctgcctctgaagatggaagcaatgtttgatgggtgttggagagctctctgagaaagggcccatctttaagcactgcccatgtgagcctgtgttttccttaaacatagtcatgggagatcctttccactgctgactttttaagttgaaatatttagggagaaaatatgagttcttagaaacttttaagtggaagagatttagtaatgatttagccartccccttatttttttgcagatgaagagcctatggcatagatatatcaagttccttgtccaaaatcacacatactgcagggagcagaagtgatcctgaacccaggtctcctgagcagtggagtacctggggtagggatggcagcaggttgctcaggtgcaggtaataagggactgcactgtctgcagggaatttacaaacaataacaaagcccctcactctgcttttaatgaccaccatgagctgattctcaacaatgtcagagctaaaaacacccctttctgccaaggtaggtgctcccactagccccctccccacctctttgggacccccactgcttctgactcccagttctgtgtttttctcactacactaagatgcatccctcatcaaatagcaaccaaacaaaaaaacaaccttatgttagaagttccctgcttcttttggaattaagtaaggaaaatagccttttgatgagctcacattagccaggaatggtgcagaaaagtgtgatgtcttaaaattcgaagctagggggcccctaaaaaagaagtgttgggatttgttggctctctccttgcctgcatccctctgacatgtgagtgtggattgcgggccaggagctcgcaaccttgctctaggtagattcgacagagccagggactctctgcgttaccttccaaacctaattctctcccatgtatcatcagagcctagggggaacctcccagtggtctgagggcctgaccagcttttatgtgtgtctctttgtggtcatctcggccagactggttgytatccaggtttttcttctcctccgcagccgctccctgaaatgggtgggtaaatatcccagtctgacttcagctgccgagtcatcagtcctgacagacggctgcctctttgccgagcaacccccctcactgcctcctcccccagcccctcatttcatcttccccctgtcagaactcaccctctggcagaaatcttttccgagagctaaatgtgagcctcaaagagatgccgtcaaggtatttttcataattttcaaaggtaatttccttccctctcccccacccgccttctctctgttataattatgtcttagcagctccccaaatcagcatagcagccaagttccctccccctgaaggtggccgccttttctcgcacaacagtcctgggaaaaggccttggagagcaaggctagggagccaaaggcttcctcaccattgcattgagaggcaagctggtggccttactgtcccgggatgaaggaagacttaaaatggctttgtgtcacttttggtctagagagtccactgtaccctgaggtatttccctaagtgccaggtccatgatggtgtttagggtactcttaatctaatttatatccttttttttttttttttgagacagtgtctcactctgtcgcccaggctggagtgcaatggttcaatctcaactcactgcaacctccgcctcccgagttcaagcaattctcctgcctcagcctcctgagtagctgggactacaggcgctcactaccatgcctggctaattttttgtatttttagtagagatggggtttcactgtgttaaccaggatggtctcgatctcctgacctcgtgatctgcccaccttggcctcccaaagtgctgggattacaggcgtgagccactgtgcccaggctatatccatatttttaagagtaggcaacatccattccaggacattctctgcagtttctttaccctcccactccccctctcatgcctccttactctctcaggaaggagccaaggaaagaattcctctttctccctgaatcctgacctctgycacctctgaatcctgcctgtggctggccctcaacaggtggcctggccacaggaacgggaggaggactggcctgtctcaggccctctgcagagatgcaagcatggccagccctggctgaacggagatcctgagggtaaattatcttccactaggaatcctgagacttgacattcaaaaattctattcattgaaaacagactagccctgaaaacctggtttagtagataaaatctgtaaccacaagaggataaatcgagtttggcttgtttgtactggtctaacttaatatgatctcccttggagtttccagcatctagattttctagatcattaaatccattacttttcagtgttaacttttttttaggaggatggggtagagagtggatatattttttagtggcatcccacactaattgtgggagcgtcatcaaagctcattttgggtgtgaagtgactaatttctaagcccaggggttctgaaggaggattttcatccatttatcacaaaagaccccaacagccagtcaggaaaggggtctgctggctatagccactggtgtagtccacccagaagaatgaggagaggggccacttccaatcccctaaaaatactgaatgccaggatgaggggtgtgggaatgtggccatctcgtctcccgtacctctggatgstctacggggccatggagccattgctgtgagccagtgtgtgaccatgagcgagtgggccaccccctccatcctcagttcctccatgtgactagtggrgcagatctcacctgcctctcagggtgagtgggcgaggcagacgagggctgcatgygaggatcgtgtgcaagtcttaagtgctcatgaaagtagccatcaccatttccttaagattaacgcctccgagcctcagtcttcattgtttaggaaagggattctgtgtgattgagattttaacaccatgtgcccttcccctgtggagtggtggcatcttaaagagtgaatattttgttccagctctatcctccagggattggctttgggcaggtggggcaaaacatggggccaagttctttactctgaggggagatgcataggcacatccctgacttcccatgtctccagattgcatgggatggaaggaggagaccagaggtgagggcaagccatgctggatagtgtccttccctttgctcccttcccaaagtccaggataggaggaggaggagggagtgaggctggccgtagaactccagggcctatgtgagaagactgtcacactctagggttaggggcagggtctgagtgcagttcagggttgccaggttgtcagaatggcttggagaggagcagcagccttgcccaaagctggttcctggagcgcagttaagtaaagtcctgctgtcaacattgggcttctgtttaccggttgttcaagcccttggtctgcactgggttcctctcctcgatggaccactgtcttccaaccagagttttcagccactgcactttgtcatcagacatagctgcaggccacggtgcatctcagaagcccatgtcagggctatacttttgttccaggacagagctcacagcccagatacagcatgagagctttcatgtcccactcctatggtgaagagccaatgggaccctagtgcacttgttcatttcattgtgaatttgaatccatggctgtgtgtgtgtatcgggggttggggggtgctttcctccgagtcttttttaaactttaataagatggttctttaatttttggcattatcctttaaatacatagtccytttggctcttcccccgrcccctgtaacccctccaaacaattataaagcataggaacaaagcgggctgggatgtaagttgtgcaactggtcagttcacaacgaggcagtgcrtgcatgcacacatatgcatgtatgtgcgtgtgacagacactgagttaaactcctcatcattaagtggtgtccttccttgggcaccagaagacactacacagtgtcttttcctgcataattggactgtcttttcatacaagctgaggcgcttctttcgggatataagcccatgcagtctcaacaggtcaggagcgatagtaaaaacctgttgtctggctttgtatttggaataatggagtcactaatctacttgatctggccaagtcagataaaggagaaagtgagggatgcctgtgcttcagagatggaatgtatttgtaaaagcgatttctttgcgggagggggagaagggggagacacataggaaaaaaagggagcaaagactgttggaaaccttttaattagtactaattacctcagcagaaaatgttggaagcttaaaggatttgtgtcagcaagtgaaagatcaaagattgctaggctcgcattttaatctgttggctataaaaaggagtgaggggggtggtaatgggacccaggagaatggctgcccaggtggcgctgtccttaatcccttctttactgctgcagccccaggcctagtcccaattacataataagatgatttaatttttttttttttttgctttgactttaactggatgtagaaaagaggaagggtcatttttctccccttcagtgaggatggggtggggcttctgatggtagacttggtagctgcacaatcccttgtttgatttccctaatcagcaaaatgacattttaatttcaaattaaaacaacaaccaccaacccacacacagaagagcgctctttaaggataaaagggtctgtgggtatacaaagaaagtgagggcctttggttggttgagctgtggttgggcatacctggggcaacaggtaaaatgtgttaatagaaagctccacttactgggttcatcaccatgacagttccttacaagtccagtagggcagggacagagggaggtgggggggaaggccgaggaagagtggagttgacaagccacaccacccatcttagaaggcctctgtgtttctctctgtcaccaccctattttctttcctttcagaatggattaggctggggcaagggctgttagcagaccccattggtgctctgcccatattcccttggcaatcaccattcttgtgcattgccaacctgatggcttccaactacagacacctgcaactctattctctggctgcttgaaccttctcagccctcaaccaatgactgatggcaggaggttggttaatatcccagctcccttgtccctaactgagatgtcactgagaagtgatccacattacatcccataccattctagagaagaagttggtggtcaactgctggtcagcccaatatggtctgctgtttctgtttaaaaaaaaaaagtatatatatatatatataattatatatatatatatwtaattatatatatatataattatatatatatggtaacattgttatgcctattcatttacatattgtctatgactgcttctacatggagctgagtcttaacagagatcatatgacccacaaatcctaatatatttactatctggctatttacataaaaagtttgctgatccctgaccttacggggttaaacccagctgcccttagcagtaacccacctcatactatatcctttattgacatctttccctttttaatctcactttctggtgttttgtgtgatcacttcccaaataaatgacttgctctcacatcctcacttcaagatctgtttctaggaactccagcttaacatcatatgcccatatacacaccaaaaggacagaatccctgcagatagtgctggttcatcccatttcttccagaagccaaggttgacaccatcagaaacataatgaaacaaaatagcagttcagcttggagaactcaaaaatgctttaacatactgcctctctgactgaaggatctgtgctcaagccattgaacctctttgttcaacaacttaggctccttctaaagcttaggctttaggagataggctgcaggaaaaatctagaaggaagcctgtatggtagaatggaggcccactggctctggatcagtgagcgtggctcagccctctggggtgtggcactttgtcttcatgggaggcgtgacctagagtggccaactattagaaggctagcctcctggctgcagcatctaaatatccactccctctaggaaaggctaccagagaaggtttcaggcccagacctcctgacgtttagcttatgtctcttcagaatcatatatgtaaatgtaaagcaactgccattcaaaatctgatgtacagtccctccttgtgtattgtcttcttgtatcttcagttagttaagtttgatacccatttatcatgaggccagagagggacttggttggaagattgaagaaatagatgccccggcactttgccaggtgtattagttatctattgctaagtatcaaattgccccccaatttagcagcatataacaacaaacattatttatcacacagcttctgtgggccaagagtttggatgcagctgaacccaaggtctctcacaagcctgtggttaaggcatggaacagggctgcagtcctgtcaaggcttcccagggaggatccctttccaagctcattcacgtgattgtgggtgggattcggttccacatgaaactaaggcctcactttcttgctggcagttggttggagacctacctcggctccttgccacatggacctctccataggacagctcatgacttggcaatgaacaagggagagagaaggagaggcccagaaagacagaagtcagtgtttttgtaatcttatcttagcagtgatatccatcacgtctgcaggattctgttcattagaagcaagtcgagaggtccagcccacactcaagtggaaggggttacagggctgtgactaccaggagggagggatcactgggagtcatcttagaagatgcctgacacaccatcagctatcaatctgaacatgccactatgctggtatcatttaataatgaggtacccacttagacagatttcattggctatctttaatcattaaatagtattagctactttagaataaaatctttctgaaacttctattaccaactcctctgttttcttaaagaggttacacaaaatgtacttttatgattttcaagtctcatctcagaatctacttctttgaaattgtcattcttggacttctagcctaaagtaatcactccctctgggttcttgtagcacttattttctatattgtttatgtggcatataatcatatattgctttgtgacagttctattgttatcttgagttactccttgaatcttgtattgtttaatttccacacgtcgacatcttgtctctccataagaattataaacaatttaagtgcagcagttgtctaatacttcagataaaagcaactgcaatggaggttttatttaaatatatgttgacttttttcctttgatgatgttgatttctgattcatgatggtgattcttttaaggctactaagaaaatagctttaaaagggtaaaatagtctaaaaaaggtatattactcattgcccttacattgggtggcccaaatactctgattttttttttttttagttttggtttatttattttggtaggtggttttgttttagtttttaatctgttttcctttagtgttaacataataaccattgcttttctcccttttctctattttggccaagaattgggactagattcttgaaatactgctttaaccgagttttctgactaaatgcttatgatcttctgtaacatcctgattttgtgacatcatcattgggactgagaggcagaggaaaaaggaacacacctttattgaacactgactttatgccaggcgttattcacttacctctaggttcatgactgtgtttcagagaatgaagatggattcaagtgtgaacttcagataaatagtgtgctgtacttttatagtctgaatgatggtcatcttacactaggaatcagaggccaggtcttaggaaaagagaataaaaatwaatgggtttaaggaggttggatttgaccgccgcatcagtgctcagggtcctcagttcgtaatacctggctcacacagctgcttgggatgttgcctccttgtgaaaccacttccttaggcctggatgagaacsttggcatttcttataagaatagtagtaacttagaagttgtatatgggctgaattgtgatcttcttccaaattcatactttgaaaccctaacccccagtacctcagaaggtgaccttacatggaaataggattgttgtagatatcatcagttaagaagcgctcatactggagcagggtaggcccctatttcaatacgactggtgtccttgtaaaaagaatgccatgtgaagagatgcacacatgtgtggggcggacgccgcatgaaggccggagttaggctggagcagatcccgcgcgaaggccagagttaggctgggccagaagccacacgaaggctggagttaggctggggcagacgccatgtgaaggctggaggtaggctgcatgccaccagaagctaggagagaggtctggaacagaccctcccctagtgccttcagagggagcgtggccctactgataccttgatttcagctttgtccactctaggaatgtgagacaaatttatcttgttttaagccacccagttggtggtactttgcaacaatagcccaaggaaactaatttcacaggagatgtttctggcctggatttgagtctgctacacctcatgttctgtccttggtcctgaatcagtccccttgttttctgtccgaggtctcccattaccttcaggagtctccattctctaaaaggtgtctgtgtgggaaggtatcttcctgtggtagttccagcccagttgctacttcccatggagaaagtagcccatcaacggtgatgaaaatgacttcctacactcaggcagctgtgttggggcagatctgaaatctctgagggacagcccatttggcatggggtattttcctgggctgctgtggcttccagggcagatgtgcaaacacatctgtgaaagttcagggcccctgagagctaatgagagctgaagcttcaacctgcttgatatgtttgctgtcactttcttttctagtgacgttggagaagggaaaagtcatgcagtctgtcaatcttgtcttctcccatgaaattgagaaagttctattactttcctcgtgaagactgacatctgtgccatctcttccaccactgtgggggctccttcctagatcacgatttgggccaataggatttagctgtaacccttggcagctgtggaagacagcttgccagaacagttgtcagaactcaaaggaagcagagcagtttgcccgacaatagacagagcaaaagtcttatcctcgatctaatccagggtttcttaaccttgacaccagtgacactttgggacagataatgtttgtagtcagggcctgtcctgcatattgtatgatgtttatcatcatccctggcctctgttcactaaatgctaacagcaccacccagtcatgacaatcaaaaatgtcttcagatgttgccagaagtcccttggggaacaacatagcccccacttgagaaccactgatctaatcccttcaaatcaccgtagggatctctgggggattttgcagtggtctcgggaaaatgcacagacatgtcgtattaggaaggggtagttttgggtaattgcaaggtagttgaggacatttaagggaattgtacaaggcataaagatgtcaggcttctgaagtttttttttttttttttttgagatggagtctcactctgtcaccaggctggagtgcagtggtttaatcttggctcactgcaacccctgcctcccgggttcaagtgattctcctgcctcagcctcccgagttcctgagactacaggtgtgcgccaccatgtgtgcagctgatttttgtatttttagtagagacagggtttcgccatgttggccaggatggtcttgatctcttgacctcgtgatccacctgtcttggcctcgcaaattgctgggattataggcgtgagtgagccaccgtgcctggccctggagactcttaagacataaagtgaaaagaagcttcaatcaatgcataatcttacagattttaaatgttcagattgttcagctattgtgattatgttaccaaggggttactgtttgctggcaaataggtagggtaactttcatcacagtttgcccaggacagttttagtttacgccattttcctggcataatcagtagtagtgtcccctttattctaggaagtatcccaatttagacagcaaattttatggtcatcttaccctcgggccrggtgcagctcactgtggtgtttgtggacagcacaaatgctaatatggctgtcactcagtagagtgtgtgctctctgattccttcagtcctcgccactccttattgtcatatgtgcatttgttgtattgcagcatttctaagatgtacatttcttttacatgttagcatacctgaatccatctcaaaattgatggattcttgaaattgtcactgaccaggaggcagctgtgatggagttgctgttattagtgcacacttgaattggtcatggtggttcttattatctttgctgcagttgacttatacagatttttggtacttcacatgtcatttatgaactcatcatgatttggcattgaaagacaaaactattgtgttaacaaaaagaacataaacttgacattataaagcaaatctttattattgaaataatgaccttggttcatattttctggcaaagtaacaagcagaatatgaaaaaggaatgttcctgaggcattttaaggtaggaaaaccttgggtcattctttattgacagtgttgttgttttttgttttctagtacataaaataatgttgtgtctataattggtgcagcttggattcattgaaatgcaatgtgtcacctgactggaccctgaagatgtgtttgagttgagggccccagtggttcttttactgcagtagatatagatttgagttggggaattagatcatggatatccacacacaaagagcctgatatctaagtcagggctgggcctgggcttctgaatttttgataagtctcaggagattctggtgcaggtggtccacgagccactcttttacacagtctgatgtggtcactccycttgattccactccagaggaatctgagcccagataagggagggctctgttcatgtagtgagttcagcccactgacccctgagtagtgttttcctggatgctgcatcaaacacaaggtgagctgaggaagggctgcttggcagctttgcctgaggtggggtctgacccagactggaccagatgtgggtcgcctaccctgcttctctcagctgtctgtactataagcgtgtggatacttggtacatggatatgcacatgtggcttttatttggtttccctatgcatgttcaggaaaacatgtcacataaaagcaggtaaaggtattttggaagaaagagagtggggatctatggaaaatgatagggagggaagagcagaaaacaaaaaagaacatttctaagtctggcagaggacgaagacaggcctggaactggaagcacctgcacttacatttcttgagtgctttctggtttgccaagcactttcccaagcttccatttgaacctccagattggaaatggggggctgcctgatgttctttttattccttcaaccccagtgcaggcccctcactctaagrtgaggacatctgggcatccacagccactgactcctgtccaagctgcctgctcagggggccctgggtatggggcctggaaagggcctgtgagaagagtctcctccaggttcccctggcagctcccaatcccctcaccatggcaacctccaagatggtgctgaagaccccagcgagagcccccactgctgttcagaaaacctgaaaagaatagaatatagactatggtggacatttgcactaaatatgcttacttagcaattctgcgcctgaggaatgtcaaccttgtgtttttccatgccttcctatgagtgtctttcacttttcaycactcttccttcaattttccctcagttagtgttctctttagaagtgatgtttttcaagctgccttcagataaatttctggctctcttcttggacttttcttctggaaaggaggcaggattgggatttgggcctgctagtaggatgcaaagagatataacctattgtgcccatggtcacagagcttaattaattgtcaaggagacaagagtaagatacctgggacagttggacaatagaccaaattcatggaccagtggtagagaaagtgttcaaatagaagtcctttgggtattcagtctaggcatggttagctgggtttgggacagacagagaagtctccaaggaaatgggctctaccttgacccgtagttgtgatgcacgtcaatagtgagcaggtgggggcatttcaagtgaagataaaatgaccagacacactactcaatctttctgcagatcttggcagatccttagaaggtgataggaataaaacctagaggtctggcttgaaagcttgggtcaagactgatcaaaaagttagctttgtcaaaagcatcaggctcattcttacctacagacaacccatggtgatcctaagtcattaatccacccagaggcctgtcctracctgagtttccttgctttgaagtgtgctgtcctctgcaacatgaggaaataatttgctgcctgcttcagtgaaccatcaggagagccagcagacctaatgacatgtgagaatattaacctcctaccatgaagagctgtgaatcttgagcggcagtctataattcaccctggactcttaagccaggcctctccagctttttctctcactcactttctcacttacacccagagagagaaggagagacctgctcataaaactttatattctccaatagtgtgagccttgctgagctgtttagtaatgagtgactttccttttgcagtcatggaaaaatgtatacctrcagaggcaggagcagggggaagatattttttcaatgttgcgctttgcatacgctttttcctatgcagaaaggaaaagtgtcctcctgacactggaaaaaatgcatgatattatggaaggtgaccatttcagtgcttgaataaccaaacttctttgtaattctgtactttatgttaaaagtcaaagaaaagtggaggtgaggatactaatcttaagatatttggatattagaagagatcttagagaccttttaaggtcacttggaagcagaagaagcactgaaatctcattaacagtggtcgtctgtttatgcccttgtttcacgagatttggggcttttggaggacaggattgtactcctagtgcctggcagagtgtctaatccataggaggcctcaaattaaagttagtcaaaagatggagccagtcacctgctctaaccccacattttgcatacggaagaaacaaaggtccaccagtgattgactcatgggcacagctagagtttttcytaggcctcaacggcagctcttttcttccatctgcctgtctaattgctgctcttggccttatgatgttttcacaagcaacgtgttattctaatggagactatcttgatcttgtcaattgagtgaaggcaaacacaaatgtagggccaaggcaccatatcagggagtaaatacagaagtgggcaattagcctcagggcccagagtgcaaggatgtgcagatctggctgcctggcagagagcacctagcatggtaggagtccttagaccagaataatcttccttactttgctaggaaagccttccccaccaggcctcactgctccaccagctccatgtgggctgggaggaaacctattttattcatcctaggcctggctaggggatgctcaataaatatttgctgtagggggaataaataaatgaatgaaggatccagtctgtgattgttagggtacctttctattcaaccaggctgtttaatttccgtatctcaagcatctctgtctggacaatggacaatgytgggcacctataaactttttgatgacttatagaggtaataaaatcaaactttcttcttctgcttacttgactagtgcgatgaattaaccaatggttaatgtctactctcggtatatgtaattctcagcctttctgatctcttcaaattactgtcttcttccttctgccatcttctttttttttttttaagaattaattttattaaaaccagtcaaattaaagctgcctctgtccagggcatctcaagatccatccattatggcttcttatcttggcaggcgatcrgcttggaaaggcagctcagccattatgcacatacaaagcccatcacttcacaaccaatggtcaattcatcaaacatttatcttttgccctctgagcgtgtgacgctttgcctctcatttcctagtttgggttgctctgaaagatgaagaaaagcaggcgggagttcttttctcccctaactttccccttcccccagatcgtttttattaatcagatttcatacttgaggcttgaaacatgccctgctctctttttttggccatctgagggttagggatagtctgccagtctcatgctgaactttttactgaatggtggaacaattaaggcaatgataaaactttgcgagttttcatcttgcaacccactttggtgcatgggatgtttaaaaatgaagagacctccaaaataatctagcctagccgccttagtttacaaaacagtacagtgaggcccacaggaggcaagggtttgactgaaatactgcagcaaggtgctaaccaaggcaggacctggatcaggttccttggttgttcctaagacagaggctctcccgagctgtcatctccccatgcattcaaatgattctgaaacatatcactatttcttctggaggtttagccactgacctgcttcattttctgaggcaactaatttcttcctttgaaaagaaaatatgcacatttatttttcaaaaacaatctttcagctaaacaacaattggtctaggtttgtcttcatgtactgtatctcagctgatccccattctgatatctgcaaattggacaggtcagggattttctgccaccttgaaagattagaaagctacattttccaagtgttatttttccaaagtcttagctcacaaaaccaggacttgaaaacagagctcatgactcaatggagtggtcttatgctgtgtgtttaccaactagatttgcgtttggcctcattgagttgacaagatattcctcatcagaacaacacattccctatgaaaacaccacactggcttcctgctgccatgagcagcagtcagataaccagagaggcagacacagaggaaatagccttggttcagtgctgggaaaaactctttttctctatgctgcacaactggaaacagttgatctcgtctctgtccctaacattgttaggtgctagtacacagggcccaggacatgccatgagaggatctggaaagcaaagctcaccaaattattctttgagaggttttgtgaaccatagagctagagctattctggaagaaagaaaatggctccggtagcaagccacttttggaggtcaccatatctcctggggccttctttcctgctggagacataaagctatcttgtagtctgggacagaaaacgtgttttcacctttttcagccaattaagacctcacagaatcaacagttggcacgtttttactggctttcctggcctgagtccattccaggggggccctgcccgtggggagctggtctttgggcaagtatttgattaggggcccttggggtccctggggctttgagatccagccgtgtaaatgtctccttttctggttggcttgcaatgagtagacaccatctgttgaattaaaaattccctttatggagggtggtgaaaggcttgtgtagaagagacactgttatctttcaagcaaacagttcatgaggttgaagagcagcgttcttggcccaacatatgtttgcccaatggctgtgggcgcctcccccaccaggctctgcattccgccccatggcgaggtgcacgcataccatggctgcggtacaccgtgtccactctcacatctccctagcaaagaaaacccccatttatagaacccgccaaacaaactcactctttagactcttaaaaacaaacaagatcccgaggccacaggctccatgcgtgcatgtgtggttttgtaaaatctcaagccgtgaatcaaaataatttcagagacatagtcaaagcccaggccaaaccctgtcaccagggtgggaaaaagacaggaaagattcgctttgaggagggaggatagcccagagaaggagaatgatgggagcaaaacatggaggctgtccttcatctagtatgttcctggagagacacctgctccttgtctctgtccttagggacttgctataataccttcaggacaagcataggagggatgggccaaaaacagaaagggcttactacagccctcattgctttcctctcaacttccagagctcatcttatccatgctgcttactgatacgctgtcctgtatggtgtccccttattccaagcccagcgtctctgtctccttcatagatggtaagagcattgagagcagattccatgacttrtgcatcatttgtatccccagatgcatgtgctcactgaattcctgtcatgttggaaatggataccacaccacatgctttttggtagcaaatcagctttctggactgtagcttacttgagtgccaggatcaagttatctcttttccttatgttccctcaccaccaaatgtggaataaggtatcagcagatgctcaaaagattagaattcatttgcattgagacttagctcaagyccatctccttcaccagccccagccccttctcagagtagcactaatcatcccaatctattaccctgcattatctggtaactgcttccctgtctatacctactacttaatagtaggggactattgcacagtcatccttgtagctccagagactagcaaagtactaagcacagagttggcactcaatacatttttataaatgaatgaatgaacaagctatagaggtgtaccccaaggggatcattagcagataaatctcaagccagtcccacctaatgcatacttaacttcaaaggaaaaaaaaaatctaagaactagytctttgggagattcttctaggagcatccatggagtacagagtgaaaggaaaaagaactcgaaaaccatttaggttcatcattatattaataattgaggacrtacaatgaatgggttacaaagctacacacagtgtttggataaaggatgtggcgatggtgaatttccatttctggaccacagctagaaagtatgtagaggtagtttaacatagttggggagcactgcactttatgtacacaggttctaaatgtggcctggtgactcatgtgtgttttcaggtaggccactttacctctctggacattagtcatcttctgtgaagtagggggagagtggaacagcctaaaattcctctaggattcaaagtctatgagtctataagaagactataatagggcatattttacacaaatagagctgtagctctaatatgtagtttactttctataagaggtcagggtgcaaacatgtgcctttttattatgggcacatgttacacccttcccatagttaggaaaatattaaagaagccttgcacagtcccagctagaagaatgaggcatagagtttagtgtgctggaactctgctaccctcttcctaccagactgactcttaagggaccctttggcaaagcagaactgacttaacagcccttataaactatagttataaaggaaggagctccagtcagataaccatagtatctggatagaatattagaagycatcgaatctgatctctatgaagaaattccctctaaacattctccatgattttagcctctgttcaaataagtatagtggctctgagggcagctcatcctttagtgaacagcttctccattttgacaagtttcaaaaaattgattcaagacatttcctcccagcttacataattttctatttgtttttgattctgcattctggaaccctgtaggctgaggactttgaaatgactaagacttctctgctcctggttaagcaactttaggactgtctcaatcactgtttcttacacccttcacctcctggtggttgtccttggatggtgtttctgaatgcaaatccacctttgaatctggcacctggaattcaaacaaagctccaggcacaggcacttaggggccaggagagtagtagagtggattgggatcagatttgcttctgtggtggtcactggcgattcatactaagtcctcttcccagacactgctctttttctaaagcttctacatgttatgtatgtggaattgtcttgttttatttaaaaggaatattaactgtggtttttcctgattataaaatgtatattcatgatagaaaatttagtagctagagaaaactatttgaaaatgactgataaactccttacctgggggttaacggtatgtatctgggagatatagataggtatcacacacatacacacacacacataaatatatacatttaagtgtgtttgtgtatgtgtgtacagaattgttataatgtctctgtgtacaagattgtatattaacagcagtttataaactagaacaactaagaaagatgactttgatgattcttaaccattaacatggaagaaaatgcccagaaaagcttggtgcagattaaaatttgtgtggaaaatggtgaggaccatatggatgacttttaattttcatgcatgagatctttgtgtgtgtactatattacattgtgacttaatttggggtacttaaatgtatarcatgaaaattgtactggctcattagatagctgcctacaatattatttttaattcctgtgtaatattttatgatacagatatrttgagctttatttaatcattcttcaatccttgggcatttaggcttgtttgcaatgttattgtaaatgctatagtgaacatacttgtacataaacttatacacatctttgatatttactgaataaattattggaattggaattagtggatgcaaaggtaattatttttaagtcttttaatataaattgccatccagcaatttcactgtctcattagtcttgtgtttgtttgaagtaaaagcttgacaaaactatgttaaaatctaagaaaaggatataaatatttttattagaatattctagattcctaataaagctgaaaatttctcccatatttttattattgacaaatttccttgtgaattttccatccaaggtttttggtcatttttctgttagggcttcaggttttccttaatgatttataaaagctctttccatgttaagggtgttaaatcttagactgttagaagggttgcaaatatattcccaattttcatattccttttaattttttcgagtaaatatttttggatagttgaactttattatttagtttacattagacactgtgaaatttcatcttattgagctgaaaaatggttgattctaacaggatcattttggatcctactgtatctttcttaatatctctttagggtcctgtcccctataaatgtgataaacatctccttaaccaagccactggcaaaaaacaaaaacaacaaaaaacaaaaaaataagatcaaaatccctagaatctacccatagagcaatttgagccattaatcagtattcttcaggtacatttttgaagcagttatgactctacttctacctaagattgtcattttctagcctactttttggcttcctgtcacaaagatattatgagaagcttattcaaagccttttttttttttttttttgagccgagtctcactctgtcgccaggctgaagtacagtggcatgatctcagctcactgcaacctccacctcccaggttcaagcgattctcctgcctcagcctcccgagtagctgggactacaggcacgtgccaccacgcccagctaatttttgtatttttagtagagacgaggtttcaccatgttggccaggatggtcttgatctcttgacctcatgatccaccctccttggcctcccaaagtgctgggattacaggcatgagccatcatgcctggccaaccattttgaactctgaatacaatatatatcttctttattcctacatgagtatctccattaacaactggtctctcaaaacttttccttaatgcacagaatctgcctgtttgagaatctgtattacattttattgatatatatcctacctcattctatgaaaggtttgggctagcttattagaatgaataaaattaaaaagcagtatataaataaatgaaataccaaggctatgaaaaaattataagccttgacaatgaagttagaaagcaggtatggatatcatgaaggattacctttttacaattgggtcacaatttacctctgagcttcctggtagcaaaagtaaaaaagataacatgatcagatacattattcacgttgtcctacagcaagaaaatacaggttcctgagagctatcatctgaccagaatttcatatgggtaattatataacctcatgtatccaaaataggagaatctaccttcttacctcctttttcaagtaacattaactccaagggcttctagctccttattctccattactaattctttaggcatcatatttgaaagttttcttagtattcttagatatggtgcagggggcttcagacctagttaactattaatactttagctttttggctggtcttggattcaggtctctcagatgagtgttgaattttactgtctgcagttcagggattagccatcatgttggggtctcaatagagctttggggttgactttgaccccaaagtcatgtaaccactacttcttttttgttgttattgtttagcaatgaggtctcgctctgttgcccaggctggagtgcagtgacatgactgtagctcactgtagcctggccctcctgggctcaagcgattctcttgcctcagcctcctgaatagctgggactacaggctcacaccatcatgccaggctactttttgtgttttagaaatggcgtcttactatgtcgcccaggctagatgcagttccttgtgatgtcagtgtacactctgtctcacataccctagccagaacctttttcatgttcttctatttcttaaagacatttctattcatcttgatacacttacagtatggattagttgatttatataattatttgtgtgtgtgtgtgtgtatatatatgtatggctatgtgacttgaatggcagaaaaatacacacagccaactctacatactgtatatagtaatatacaacatgtataatatgtatagtaatatataacatgtataatatatgtcgtaatatatagagttacgtatctatgtctgtctttatccatacatttaaggatataaaaaagagttttatggaaaaaagaatatctcttacaggactaggtaaacaaattataaaaatgtataggtataaaaatgtcacccataatcccagcactttgggaggctgaggggggcggattatgaggtcaagagattgagaccatcctggccaacatggtgaaaccctgtctctactaaaaatacaaaaattagctgggcgtggtggcggaagcctgtagtcccagctactcaggaggcggaggcaggagaatcacttgaacctgggaggcggaggttgcagtgagctgcgattgtgccactgcactccagcctgatgacagagtgagactccatcttaaaaaaattaaaaatgactgtgctgccactggaccatttagtgggagatgagtggtcacatcatacctcaccaattctctcttttctcccttcattttccaccaggtggcttttggtcacctgtcctgtccttgtggcttttgccatgcctttgtgggaagttgatatacagacatttcccaaggagctgccgtgtgccaggcactgcagttggagtggtggggggagtataggagaggaacaagttactatttctgctctcaaggtaatgttgaaacaatttaacaactgcactgtccaattagaattgatgctggctggagcagggtctatggtagccctgggctgtagtgggcattggcctcctagtttctggattatgaagaggtctgggggtgccaaggaatggccagggtagcaggaagggcactcagagctgcaattatttacctactgaaggaagtatttaaatattttaataatgagaactggtatacccatgcagacttgctgaatgttactctttcctgatcttagccacatggccccagggaaaccatgaggaggcattctggcctctgaaagaatacgagtctagaggctgccctccttgccactggccagtgtgctggtcctgctgtctgtcccatgcttggatttattggccgtttttttcttagacactcccaggttttggctgaacagtgctcagtggatgaggcagtaccgagccctcactgtacacttaacagctttctaggagtatggaggctgcatggagatcccctcttagaggggcctgggcagacagaaatcatcagagagatccatacagaacaggcagcagccagcccttgcaggtctgggggcctagccagggtagtagacatcagacccaggttaggccctttagaacttccatggccacaccattttctcaattaaaaatatgggcagggatatttagagtcgaggaagtaggtaaagatctttgtggagatcttgctttcttgattggtttgagaacatcccagcctttgctcctggatttggggccaaatatagtcccaaagagacagatgcttttgttttagggtctgtggtcagctattccccatgttcgctgcccatctcatgttggtgcagctctgtcacccctggtataggctggagctgagggaggagagatcgaattcttagcacagcctagatccaaggattgatccaggggttctggaagtatcctctggtggtttttatggtacaatgttctggctggtttttggctgggcaaggggcagggaggaatggctacaaattagaggctcctgcccaaggctgccagccctacctgggcccgggccctggctcttcccctccattctggtgagtggctcatttgcagggaaaggatgaaggtcactgatttgtgcccacccaggagcagaagggactgggcctcaaggggcggcccttctgtggggcccctggccccctacccatggcccccccatgccagccactggcctggcctgggcagggctgcacgcctgttcggcgctgctgttttcataagctaatgagggcagagtgtgagccacaggcgatgatgttgggatattaactctgacaggaagcttgatcataattatcttaacgaggatagggttaattacagtggaaacttaaaagttctctccgtttgaatccactggagcccaatgcgttgtgatgttttgtcattttkatgtgactttggaaaaggcactgggatgctcccagcagccgctgcagctcctgggggagcccaggcagagccctgggaacgagggaaggaggtaagaggatggtacctgtgtgtgagatcctggctgcgttgctgctggtggagggggaggcaggcagcctgcagggagttccaggggtgctgattaggtttccagaacaatccaggcctggatgatctccctccagctggctgtgcctaggtcctgggtgaaccttgctctctcctatcagcccccagcccatacctcagacatcgcactactccaggaagctggtgagtgatgctggactgacagttggcgtctccaccggggatctggttttggggtgcattttgctgtccatacacaaggtgatagcagacaaattgtcattttatttaacagcacatatttgcaggcacctggcatataggggaatgaactcaaagatctacacacatattttttctcctattcctccctagaaaacagcagtaaaaataacagtaaaaaaaaaataaataaagggtaaagccacctcattctaggtgtatgtgtattgtcgtccacgtgtcagctgggacccccaaaacctatcttccccagtactcccatttactatgctctctgccccctgacttctgtgccccagccctcagctctggatctagatgattaaatccccaggagcacaccacactgataacatgaaaacaaggatttattcattagcaatcacccatgtaatatggttctctttttactgagcagctaataacgtcacatagcaaaaagagtctcaaaaccagacaggtgacaggggatttgagactgatcttaccagctcttctgggaagtctcactctggcgtggatttctgccccatagcccaccctgaggggaagaaaggctggctggatggaggtgggcgcttccttggtgctcctgggctctccccatcttcatgctgtgtcgttttgctttatgcctccctggagcactcttggaaaggagctttcttctgcttgccagttgccaaccatttgctgattctcatcagaagaatctaatatttgcataacgtaactcaggaacaatgtgtatttggatgctgcctttgagcggagtccaactgatgtttgtgcacaaaggaattattaaccacccgtaaggctccctaaggggaagtggcctcacctcccctagtggtaaacgggcccagtcctgagaagccttttggcacatcactccctaacccctagtggaggaagggacttcagaagagcccgaaagtcccctgcacaagcctgacttgctgcacgcctcctctgtgggtttgttcatgggcccgtcccctgcattccaaacacacccccagggtcagggcgtctggaaacaaaacagtgaataaaaggaggaaggaaaagaaaaaaaaaacagcgtatgctagtaaccagttagccgtccttcacttattctcgacaagatcctatgagctggaaggaacacagaacaggagagttcagatgggctattgacaggcccaaattcacacaacaggaaatagaggagcggaggcaaagtcccaaaccttcctgcctagatgtgcrtacattgtgggtttttaaattttttttttgtttgtattttttgtgggtacataagaggtgtagatatttatgggtcacatgacatattttgatacaggcaggcaatgtgtaatcatcacatcaggataaatgggatatccagcccttcaagcatttatcctcacaagttgtgttttgcctctcggaaccaagaggaaaaagagaaaggaggaggaaatgaaacacgatgacctctggacccctactccaaaatgtgtcccccctcggtggggctggcagtgttggttggaggagcaggcgtgctctgggagtcgagtcctgagtgggaccaccccgaggtctggcaggaatggaacatgccggcagagctctgggcccagtggtatctacagatttaattacttacaacacatttttatacctcgtaagtattgactccctattttggagtcctcttggcagcgatcccacaagggagctatggatgccttgggaaagatctggtgctgaagttcacactcacagcagatgtgcagacattgcacacgcaagcacacggggctgtaatggaagcactatcagtaaatgaataaatagtgtggacgacatctccctgatttgtcacattttatagaatagcccggcatcccctacgtgtctccctcccgtccacatcgtagctcagctgtcagccggtgcaggctcagcacatctcctgggtctggcaggtgaacgagctgggagtctgtgtctctgtgtaagcccctctgccggccggcttgctttaattaatgtctgtgtgcgcccaggcaagcacttgtgcacaactacctcgtgtcacctccacccccaacactcatgagagcccataaaattaagagttaactttcagcgatgtgtataagcaaggctatttttccctttctgctgtttttttttttttttcctggagccgggtacttaattctttctgttgcctttttatttactgcctcaacatctacagggttgcactctacacttctttcaaaaattaagtgagaaatccactttccataaattaaaacagtaacttcaggccaggagctttgaagcagcaattctcccaacccccgtctccccacccgcagcaaaaacaaataaaaagaaataataaaagaaaaagccctctcagatcggagtgattatgtaattctgcagatgccttgcctttggggcagccactgggacgctgggcagaagcaaattaagtgattagtaaagaaaaaaggcagaggaaaaaaaaaagtcaaaggatgtgaacggagagaaaggaagccttccctgtcgtttcccccgcgactgtacagagaactgctaagaaatgatacttgaagttatatttattattgtaagagggtatgatatttctgggcaggaatgatggatgacaacttgaatttgtgtccagggaatgaaggtgaactgtgacagagttatttatcttgggaatggaggttagggtcagccgaggctgggtgcctgaaggcacaagacattgacaaatttatcctgcaggccgtatctgaagccctttgttttggatcctggctactcactaagtgaccctcatccttcatgttggcaatgcgtgaaggatgcggtgggtgccagcggccccttctcccccgccgcccccgccccgactcctgctactaattcttgtcattcactttgctgacaggcaccaagcccaaactattcccagtcctgaaagggaaggttaaaatatttatttcggctcataatggcctccctgatttagtgcaggatcatttttcctgttgcctttgtcattgcaggtcactggaaggactgagcgcattcaggagcctggaggaactcatcttggacaacaatcagctgggggacgaccttgtgttgccagggttacccagactgcataccttaaccctcaacaagaaccgaatatcctttcctctgcccgctgcccccactccccacccagccccacagtcgtcccccaaccccaccctgcacaaatacctgcaaaatgtcaaatgagttttaygtgtcagctaaattaaagtatgtgaaatacagttcgtgggcagacaaagcattctgtcttctggcactcgggacacttcagagtaatttattataggtcattcataaatgaaacgcaccattatatcttcctgttgctccattttagtgtagagatctaagttatggctgtgaagaaatctttttaatagataaaaatagagaaagaaaataatgtcaccgctgcagaggcagcgaagcccagtctgtttgcttgggcttgtgtgggagggcgacctctggtgggaagtcccgggtaatgccgccaagcaaacttcctctcctgggaggtttctggaaggctctggggcaggcttggggaaccgttttggtgagggaaaggagctaaggtggcagagacatgtgaagcccaggcctggctatgccctcactgggggataccatgctctggtgatgagaggcctaggggacccacgacagtgtatggcctcctctatggaggcaaggacctagtcagcctagggtgagacttacgggcactaactgctctggattctgtagtggggatggaaacagggaacccttgctgcaacctaaggcccgtagctcctgcattgttagtgtagtggattacccggcactagaatgccagctcgatgggacagggagtttccttggttttgttaactcctctgttcttcacactaagaatagtgcctggcaccaagtacaagctcaataaatatttgagggatgaatgcatcattatcattagctattccttattgagcactcctaggaatgaggcatggtgctgggttctttatgtgtgttgttattcatccttaccaagccctgtgagaagggtgtgtcttttccatttacctagacatagaaagaggtgaggtgtaggcacacagccagacactagcaagatgctaggtcctggatgattcagtgtcaactgtgttgtgtccaaagtccaatgtctgcattctactgtgttgcttcagactcagtggtccaatggctttgttttattggatggaacatttgagacctggagtagttaaaccacttgttcacattcatacaataagttagaaatagaaaaggagacaaggcattttcctctagagtataaaataaaatcagatatacatgtaagscttggcacatatgcatatgccagcatttaagaatgatttgcagaagtatttgttagctactgtttatacttcaagccataagttaatgttttctttattctctcagatattgtctcagtcagctcttgctgctacagcacagtaccgtacatgaggtggcttaaacaacaaacatttatttctcacagtctggaggctggaggtttgagatcaggatgccagcagggttggtttcttggtgaagatactttctcactgtatcatcacatagcagagagagaggaagcaagctttttcaagtctctccttataggggcactgatcccatcagagagatctacccttatgacctaatcacctcccaaaggcctcatctccacataccatcattttggggattagaatttcaacatatgaatttgagggaagaacaaacattcagaccatagtattataaatatgctccttgtggtcattattgtcactttgatagaagtagaaggggagggcctacatgtaaattcacagtctttgtcataatgaaattttggtggaattttcccttcttatgtctgttagtcaaccaagtttcccaatcactctttgaaaaactttgtagtcttatggctttctaggctgtcttagatgatcagttggccaatattctcaaataaatcaaggacagaaggatttttagacatgtcctgtgtcccaggtctccgtagaatattagggtccatggactttggttcatgtctcagcttaatcatatttagcrgtgtgaccttggacaagttatcttctgtgagcttctttttctcatttttaaagaaatatgttggactggtcgatggttttattcacagtattgctgtcaccagagataagcaggcctcttggcttcagagtgctgagaggttttctttgtctttggttgagtcctttccctattctgtgcctccacttttccaatctgtagcagtaatgctaagggagtaatggtaatggcctaggagggaccgaagcagaagacactgtgtggctgtaaacctgaccagtgatatcactggtgctgttgtagcacattttcttatcagtgaatattctgaatagacttctttccttttttctcctctgctctactaatgtgattgtgaagatcatcttccccatctacttgactcagaagtcacagagaaaggtaggtaaaatcaggcaataacagcacatgctatcttctcaacccagcacttctgatgccactttttcagctaaatgactctcctacctaactgtgagaatgttgcaggctttccaacaatttctaggttccatattgttattgccaccccatgaaatgctttagatatggcctctatacattagcttttgctgcataataatccaccccaacatttagtggcttaaaacaacaaatatttacaattctatagatcagatgtttggccagggctcagcaggatggttcttctgctagtcttattctgggtcagtcatgcagccacatctacctggaggctcaactggggctggatggtctaagatgacctcactcatatgtctggaggttggtactgggtgttggctaaactacctgtctcttaacaggctagcataagacacttcacatgggaggagtattctaacagcacaagccccatagtacaagtagtcttcaagttcaacttatatcatgtgttaatgtcccatgaccaaagcaagtcacataccaactgtagaayaaatatgggaagggactgcacagggtgtatgtataaagaagcataattcatttctgtaacaatctacccaggagaccttggcattggcatcttgtctccttcagattttactttatatttgtgataaagggagccctagaaacaagtaactattggcctcctaaaaaagtattagctcttttgtgtaaattgaatctttaaacaagttaggaagcttgctgccaaatgaggttttatcttgaatccttttgtgaagttagctttattttaaatttttttggtttgtattttggcatatgtaaaatggttattcaccccacctaccatgtaaaatctagatttttccactttggtttgactcaaagttaaatgtgtctataataatgctgtaggttcctagaccctggacacttgggtcattggcttctttaatcctttagcaagagggattatcacatagtggttaagaacaacaggctctgaaggcagacttcctgagcttctaccctaaacctgccacttttctgcatgaccttgggcaagtgatttaacatctctatgttttggtttcctttgaaaatgcagacaatgctagtacccatcccataggttgttttgaagattattctaagtatctcagacatattagattctagtaacatagtaagtgctatgtaagggttactattattgttgttgttattatcctagagaattgtgtaaactcatctggtttgacttgggccacattgtaaccaaggccagagtacagatatacttctgagtttagaatggttctttgacttgcataatttaatattgccctaatggcattccgtgagttgggtactgttggtgaataattactctcatttttatggaaaaactaggagtggatgagctctctgaagtcacatagattgtcagtagtggggcttagtctagaacccaggtatgctgattcccagctccagactctgaaacccaaaggagcggcaatcattgtacaaggagaggagccaagatacaggaggagtcagcatcctgagcctgcctctgcaaggtcctgctcccagctggggctgctgggagtctgctcttaaaagggattccagagcccagaaccagcatctggaaaatttcttctgtgttcatcagtcaatgcctccctgccatctgcatacctcctgctggacctcccatctttttccaccagccctttttctcattgtgttcagccctcgtgttgatatcctgctctggtatatctgaaagcctggttgtctgagattacctyatctcttggttcgtagggatctcattttctttctttgtttcattgagactggccaggtagtcactggctatggacttgaaccccttccccactgctcacactctttctctctctctctctctcacacccaaccacgagcatgcacacgccatccccaactcttccaccaggaggggtgggatatttggtaatggtctcagccatatcatgtctgaataatcaaccccaagtaaggttgaccacctgaaaattcaggaaagtgtagataacctttgcgcaatcaaatgattctcccccactttccttttggggtgtgtggggggcacataagcagattttatttggaatcacacttcatcttctgtctccctatttgcttcagcacatgtactgaatagccaatgagtttggattatagtgccagcacgaagaaagaatggtgctacatgttacacagctgggctgtggcacggagaccactccagcgagtcagaggtgggactggagttcccatagccatttgctgtgtcatcttaggaacgatttgctgtgtcatcttaggaaagtctctgtaccttgtcaggggcctcagtttctttataaaatggttaacacaaacttcagcatattgttgagaggtttaaatggtataatatgtaggaaatcactttgttaaagactttacaatttcttggcatattttactgttagccaatgcctcgatgcgtcaaaagaagtagcccaaattggaaggaaggatctgaggtacagcacatagcccggtgatggcacctgtgctgtcacacagaaacatgtaagaaccctcatgttccagtgttttaaattttgcttttgtgttaggaaattataagtcactttttcctctagaaatgcagtttctttaagatctgggtttaaatccagactctatcatgtactagctgtgtgaccgttaacccgtttccttaattgttatttcagcatgataaatttctgacatatgtgaataaaaatgaggtatgtcattatgctgtatatttagtattcaaaaacccagtattaggattagctgtggttaaaatcatcccagtggttatggaggttgccctttaacccgcagctgagcccagagggagggatgtgtccattctcacctgggacagcttcggacccgcacaactggacacaggctaggaggcttccctcctccctcatgctccaaactttcaaggcaagatgctgctttgatcttgggccctctgcagaaaatctcctttggcaagcctccccatgacagctgggctctgcaatggcaactttctgcagacaacactgaaaaaaaatctcaacgctaagtaccccggagaagacttgatgagggaaaccaggtgtgtgccgggaacccagctggagagagttgaaactgtgccaggtagctacacatttttaaaaaaggtacccttaggagaatccctgaaatgatccccactgcagtggtcttgattagccagggacaccaggtttcttccacagattgcctgtggtcaattttctatgcatcttgacaaaaaagaaatgtgagaagttctatgttggatctcaaaaccagccaacataaggctgtgtttgtccttgctgacccaggagacaaagaaaccaattaaaacttctcatgttttatcctctggtggtgctatcagcataaaggcgaaggactggtctagagcatgcatgcagggaggaggtgctagtgcttcctgcctggtgtggatttgggggagaccacctgactcagccaaaagtatcatttatagtaggtagttgaaaggcttaggaagatggagcttctgccatacaaaatacccaaaagcaggcaggctcttagaaatctctttgattcattggcaaaggatggytgaagcttcttggaacctgcagaccccttgcccaggaaagtcccatgatcagagcattcaaatgatccacttctttgtggccagggacagatccaggtttggggagtgtgaaacctctgtaatttgagggagccctcttaaatactatataatcaggaatgcaaaattaggtatgaaatgaatgtttatttggaatagaactgtatcaaaggaaattttaaaattttaagttgataaatttcacaaatgtcaaaatacctagaaaagtatcaatctttattgaagatatgcctctagagaaacttttttcctgcaaatttctcatagtttcattatttggtgaaattttgtaatttttttctagagagaatagataattccctcttttagcatggttgatcgaaaattgattttttaaaatagtttagaaatgtttctttcagtttcaccatttgttattggtagtttcaccactaaattattggtaaaacttttaggattattacattttggagaaactcttacacatttctttcatatatgataggagctgtataagatttcaggacattttggccgggcacagtggctcacacctgtaatcccagaactttgggaggccgaggcaggtggatctcctgagattaggagttcgagacgaacccaggaggcagaggttgcagtgagccgagatcacgccattgcactccagcctgggcgacagagtgagactctgtctcaaaaaaaaagatttcaggacattttaagttgtgtgtgtgttgatgtgtaggcatgtatacatacacttaacaactgaatcttaaatgttctttgaattgatgaatgagtttgttaatcattttgccatcagttttatgttggtccctgcatatttgtgttaatatggtggatagtaagagtattactggaagccattcctactgatactgttggaagaatttaactagacacagaagtgactgcaaattatacaaatattcccccactgaatcataattaaatgttactcctacacaatgtacccttaggtggggattcccatagacattcccattgttactcagctgaagggaaaatgtggtagaagtcctagtggagcgagacagtgatctccacagattatagtgtaaattacctactttttcaaattaaaaaaaaaaaaatcacatgatcatgtgactctattaccagggtctttcccagggccttggaaggggcctatgcaarcaagaaacccttgacgcatgagctttattagctccatggtagatctacaagtgaaggttcactcaacttaatctaggcctacttccccgaacatggtggccagctaggcttccttcactcgtcattaaatgttgagaaatgactggcatttcaatccaactcagtttcccaatatttcctcaacttaaaagccttgccagtttggggttccattcctgcatatccccaccttcatacagcagacagaaaaaagagccaagctttgaggaatgtttcctaagaggaaagtaggttttggtccggsctttccatstgcagtagagagggcttccctcagtcgtgtagggcccttgtctacrtaaataattagaatcactccaagtcagtatgtcagcaccattctggtagcccactttcttgcagtcccacaaaagaaatactgtgctggccagaagcagtagtcagcttgtctggctgtccttcctggaacaagggcctggccttgaggttttaagacagcctgatccagacatgagttctagtgctccttggagcatctgatgggtcgcatgggtgggctagaaagttggagcaaaccatgaaggggagaaaccaagcctgggactgaggcccgtgcaggtccgggtctaggtccaggcctggggtactctacctgaatgacaccatccagtcctgggtattggaaggggacttaggacattctgaggaaggtacttgaaagcacagggcacctgaggtgtctgtgcccatatctaagggcaatactagcaatgagacttttttctttgttttttttttttttcttttgttgttgtagtaatgactgtgaagtatttaaagatagaaactgctagaaaagctgaacttaccctggaattgttcactgtcattttaattggctctatttaaataattttcctgaagagtatgatgattgaactttagtaagtgtattttgtctccagggattttgattcctggccacccacccctctgtactcccaacctcatccccctggtgtgggaccttctctccagtctctatatgaactcccattctcacctcctcattctagtgttcctgtatggccatctctggatgttatttgtgaaagatttgagagattgaaaacaaacttccatgtctatttctctgtctttgtttgggaagcagggaggatgttggtgaattgaagccaacagcaaatgagtgtgctcacaactttcttttgctagtttcccctcttrctagtttccctctcttgctagtttcccctctcttgttagtttccccctcttgcttgtttccccttctcttgctactttcccctcccttgctagtttytcccctctcttgctagtttccccctctcttgctagtttaccttctcttgctagtttttcccctcctttgttagtttccccctctcttgctagtttacctattcttgctagtttttcccctcccttgctagtttccccctctcttgctactttaccctgtcttgctagtttcgccctctggttagtttccctctcttgctagtttcgccctctggttagtttccctctcttgctagtttccccctctggttagtttccctctcttgctagtttccccctctctggttagtttccctctcttgccagtttccccctctcttgctagtttccccctcttgttagtttcctcctcttgctagtttctccctctggttagtttccttctcttgctagtttccccctctcttgttagtttcccctctcttggtagtttccccctctggttagtttcctcctcttgctagtttccccctcttttgctagtttccctctcttgctagtttcacctcttctgcttgtactctgcttctcattgtctctggctgctctcacctagggtatagcatttggccttgcatatgatggtggcagagcatgtgtacaaagaatgcttgaaggaacttagtttggagaataaaagatttaaggaagacatgtgagcttcaaatatctgaagcttcatcatgtggaagagaagaagccttattctttgtgaccccaagcagttaaattgggtcactgagtagaggttagagaaagattcaattccaggggaaaggaaaactgttatggttgtcagaaatggaatgtgctatgtcgtggtgattgcttggcaaatattttagggacccaattccgacattggttggattttgaattcattcttttgtgacaagttgaaatgaagtatgaggaaatctgtgtaacagcccaaggttagataacatcctcacagagcaagaacatcccttttctttgattttaccttctcctaggttcaagtggaccccacttctgggaactgtaatctgagtctttcacgcttgcatatggcatttcttctacccttgtatgttttgttcctgtagctctgctgccattccctggctgggacccccttttatctgccaacttggttaacycctctctcatatgtctctcgaagtcacggcctaaccaggcatgcctatctaaccatcaccttacctaggctcagcttgtctgtatgtggcttaagccaggagttagtatggggactaagttgtcattaaaccctttccagtacctgtgattctgtgaatctatggctcttgctttatttggtttggccatgattggacagtgggtcccactggaagatggctcctggaataatctcccccatcatgcccccctctgacttttctctttcattctctaattccctcactaacagagaaagaatatattttaatgaggccttctgaaataatttctggttttctttttctggtttttttgttttgtttttttcttttgagacagagtctcgctctgtcacctgggggcatgatctctactcactgcaacctccacctcccaggttcaagcgattctccygcctcagcttcccaagtagctgggattacaggctcctgccatcatgcccagctaatttttgtatttttagtagagacgggtttcaccatgttggccaggctggtctcaaactcctgacctcaaatgatctgcctaccagggcctcccaacgtactggaattacaggtgtgggccaccatgcccagcccttgttttcattactagaaacgaattaagttttatggttttgcatattgtaaaaatattttactctatggaatcttcccttttggtgtgttttagaaacagaactatagaggaaagaaaaatatgatgggacaatcaagtttattcattcttcctcagatgatctggacttagtcttacctgcctagcgaaagttgggctgtgttcccaacagtgggagtgaaaaagtagcaataccgtatacccacagctgaattgatttcakcccccaccctgaggtctcacaggagcagactggactcatcagcgcctgtcagtcatggcctatgctcattgctaagccttttgtcttactggaccaagattcttaacctttgtcacatcactgatttggagaacctgctggatcacttggcagaagtgacaccagctctggagtacctcagtctgctgggcaacgtggcctgtcccaacgagctggtcagcytggaaaaggatgaggaagactacaagagatacaggtgagtgtccaggggttggaccatggtgggmaaagggaaaaagagaaactttaggggatgatattatactctggggtgcatagtagatgtttggtacatatcagtgggtttcccatgacaatgttaaacttttaccttttggtaacctatagccattgtctctcttggttgaggtcacaaaagctaagaaagatgaaaagttattgccttttctactttttttgtgaagtgccagatattaagtattttaggttttccaagttacatggacttgtcacaactactcagccctgctttcataatgcagaagtagtcatacataatttgtgaacaaatgggcatggctttgttccagtaaagctttatttacaaaacagatggcaggccagatttcacccatgggctgtaacttgctgacccctgctctgtgttgtaagatctttctgtggtctgtctcagagtcatcttgaagagagagatgacttcccaccaaaatttagggagctcatagacaatctcaagaggaagtcccacaggcccatacctctccaccatagagctatgccgtggcgcccaccagccatgcgctttgatgggctccaagtagaaatgcttttcgttcttctctctacttctcaaccatgtgctttaaaagccctgatccaaagtcatttagagagtctttttggtcttacccattttaccaaagtcacctaattttccttcttcatttaaaattgtctgtgttctcattgttgattgttgttttgtaaatgctttaatgaccttttcatggacctctctctccattatgacataagctctcattaaacaccccacctgaatcactcttaaaaataacttaataaattttgtatatgtatatatgcatatatacatatatgtctgtgtctatatgtatatgtatgtgtacacacacattcatgcacttgttcatttattcattcattcatggggccaagaagctatgtgtgaagccaaccatgtaggcaagtttttgtaatttttttctagaatgagagaggtagggagggattggtctcaagtacagggcttatgaggttgcaaaaggaaaagaagagctaagaaaaatttttttctattctttttttggtgtatcatcagctctcaaataattactatttgttttttctattgtaactggtcgcattagcaaaagtactaagaccaaggtatgtggggtcagatcagaagatctgatgtggagtccggctttcccagtggggcttttaaaataggaggacagtctatatcagtattccataatcaaggatctacctctgagtcatccaaggtattctgatgcagttggtggcaattacaacacaacagtccataggtgtttctgatgtccagttggctttagaattcggagacactcagctcccaacaagttcaatttyttcctttactgtctcacaccattttatagatcctatcttgtgtattttttctcacttcttcatgtatttccacatctagagaatggcttccagtgggtaggagctgagttgtcttgactcttgaagcctcatcaatgcctaaagtagtgctggatatgaaaaaagggcttggcacctttttttttctggaggtggcttgaaaccacctttccttctcaggaactaggaacttatagggagatgcagggatctttggccatctcagatgcccactgcccatttggaatcagatccatttggatgtcaacaaatgcagctaataagcaaaggactatgattcagactcaatccaagtgctggttgtgggtcatgaatctttagggagggctggattctacaagtgtggtctatctcatgggctagcctgggcaccctccaagcccatcctccccactccagttctgttcccttggaaggagttgaggggtggggctagggaggtggtttgtgagtacacatatgacaaagttgccatgagaggctagattctagaggtcatacaaaaccaaaatcataactagtcaaaattaacttagaaaatttacatcatccacaatgatggcaagatgcttgcactctgagagaatcagggactaggaacagcacaaggaacagtaaatatgttcccatgtagttacacattcactgcacagcaactggttgaagagtggaatggtaggctgattctmtagcacatttaaattttttattcatttaatctctttattttttactgttggtttgatgagtgctcacacttgtatatggaaaagatagatatgtgcttgatatagttccattctatggtctgtaagcagatccgctttgtccttcctcgagtttgtgctccatttgccactgagaaattttagggttttgcaatatgacttttgattctggagttcctgtggcatttgtgtttatacaaaacaatgcagctgccttttttttcttttggtaaaacattttcctggcccttcatccacaaaacacgaggtttgccttccttctagctgtttcccagagcytaatagtagagcctctatgtaaatttatgtgacgttttcactagaaaattgcttaaaaatgaatgmtatttctagagtttactgtttttcactttaagtacattttctgacaatatgtcttctattaatcatttaagcaatactaggagccttaaaggagtgtattcagaagcaagaacccatggttcatttagtgctgtctgaaaaaaattcttattgattggcatcctctgtggttatgtgatgtaatatttataatatgtcacccaggcatacatcaaaacaagtgtgtctgttgtttcatttccatgggagatgttgatttcaaagaggtcagcccagtttttaggtcacattgtggccaaccactggaccagaaatgggaagtgactcgatttatgtagttattggaaatggcatcacagagcttgagtttctgtggagtctttcctcccctcctcccaaattcacccttttcacttcctcacttacctcctgtgcacccagttggattttcttggcacacatccccaccataaaacaggctcattaaatttatatgtgagcatgaacatacaaccaagttgttgagtagcaccctggccccactggggcaggagcagaactgtgcctggggtttctctttgccattcatcatagttcatggctgagaaatgtccatggccctgttattataggagcttaaacctgtctgtgattttcagtgtgtacacaccatgctgctattttgggatgaatgtggaatggaggtgaatgtgataatcagcagcctccaggatttgggcaggaagagaacagcagtgcaagmcttggccggagagaccaccatgctactgagaaaccactttagtgccccttgtggatttcaacgctagccaaaataacaaatcaatatgggaaagttgggtgcccagaatggtctatttcttgtcttcccttgccattgctttttttgtttttgctacagaaagaacaatggactgaaggttaacagtagacaagtctggacttcacctttcaaataagggagttggtctcatggtcttttagctcttcctctgtcactgaaccctctgtcgttcatcccctcctgccactccagtctctggttggccttgctttactccctcctccctgtagggccttctgtattccttacaactttcaattatttaaaacgtgacaccctttctttgttcccctgcatggagcagccctggggcctgcccagtgtctgcagcactcagccaaagggaaggagggagggaccctcygccgtctggtcgctctgggctgccaccatttcccagacgaataggagctgtaaaacttgtggcttacataacccagtgagcattctccagctaatctacaatctgggctttgaagatcacaagaaagcaaaggtcacgacccagagatcaaagtgacagaagcccacagagtaattgccggttactctctgtagagggccttggtctgtcctgtgggtgtattgtttgcacagagacttcaaacatgctgccggtgaactgtgaggaaaatcagctggcctctgccagttgtcaggcattcatgaatgctgtaggtgagctcacctcggctcattagagtgagattgttgtcatctctctgagcatctgcagttattccactcacactgtttgttcattactctgtggtctttattgactttctcacagtcgtcatttacttggaggtgttgggggtggttatataaggaaattggaataacaagaaaggacgacatggacatttttattgtaagtcaactttgagccacgtagagttcaagcaaggtaacatttgaaagaggcttagacatcatttggcccatccccttcacagcatagatagaaaaactgaggctcagaaaggcagcagagactgaaccaagatcacagggcaagatacactcaagagtctggcctctttcactatgctattagtccccaagctttttgttacaaaaacttgccctccttttatttttctccccaacactttaaaaactttgatctctcaaataggctgcactgaagccattgctaagtttattattattatgaaacatatacgttcagcagttgatcacggcttctgttcagcatgaggtaaccagtgctattaaatggagttaatgtaatctagtcaacagtgaggaagcatgatgttttgttgacggactcatctatcccatcaagctttgtgaaagattgagaatggctcacagatcacccactgctgccttcaggggtctcaggtagcgcatcagtagcttgtaccatgtctcactgcctccaaagaatagaagcaagaaggcagcaagaaataatgcaaagaagcatagactgccgtaaacggaagaaaattttaaaaacgaaacaaaactctaatgaccccatgcccagttccctcaagaattggaaacttggtacttcttgaatagagtgtcagagaaaaaaacatgtcagccaaccccattcgcagaccgtggaggcccatctgagcttttctgtggttgtaaggtgttcctggggagcagccattgccctggggggagcagccattgccctggggataacagttacaggcagggggaaagaacatcctcctctctctctcaggtctggatgaaaaatgcctgagtgttgggactagagcagagaaaattgattttggaaagaaagaaaaaaaaggtatttctcctgttccttttctcctcctagcggttttagctctctccttagaggagtcctttaagcaaatggaacattctatgtgagaagaaagaggacctgaaaagctcaatgtgctggtctctcagatttaggaaatctgtttccagacagagacaaatgggtctttaagcaccttcccaggatccctgctctcctcttgataaccccaccttctgtatctcagccaagagcacctctgactctcacccccacccctcaccacccccagccttgggggctttcccctagccaccttgagaaggtcaggaaaattggagttgccctctggagctagggacgtgagacttagaacttagaccgatctcttttcattaagcagtgccctggcttaacaagcagttttataaatctgaagctgtctccgggtgtcgcaggatttatagacgggggtttctgccataaagtggtttatgatggctgccttctgtgttattagtagctgtctcttccttcaaccattgctgtttgataatagccttaaaacacccagaattacttacctgcaaaccctattcccgatagcccctgttgacagtctgaataagtttagtgcccttttgttgtactttaccttcaaaacaaactgattgaaccatcaatagctcgtggaagctgacagagggatgtcatctggactagcccttgtgattgcaggttatctgggggagttaaccttcccgcattgttaactgaaatgttttatgtactatgcaactttaggatacggctgtgataaccccagtaactaagtaatacatcacagtaaagagattttggtgcaacaaataacccaggattaaatttacaagggttgaattgatattgtaaaagccttcattctgtggctttgggaatcctctcttgtatttttatggcaaacttgtattacactcaggattgaagctgtgccttttgacaccctgacatgacctagaacaaagggaaatagatctcccaggaccatgaaaggacaggcaagcaggaagcccactgacttatcacttggcaataatgtttggagcgagttccaagccaccaaggggcaagaagatctggcagacatggccactggctgggttctgtgcactgcaggcattggggcagggcagcccttagcagaactggaaggagaccctttgctgcctcaccaccctcctaatttcaaagctattattcctcatggtgttattttcacgaggacattggttctcagcaggactagcagcatcagcatcacctggggacatattagaaatgtaaatttcaggcccagttccagaaatactgaatcagaaactctggggatggggmcctgccatctgtgtgttgggaagtctccaggaaatactgatgcccactgaagtttgagaaccactgtgcaagaatagaagctcactgaaagagcacagatcttctgcattgcttttatctcctcatgttggtacttgactcaggtcctgacacacagtagctgttccataattattgttgaacgagtgaatgtatgagtaagtaaatgaaagaagacatctctatggaggaactttggaccctgggctgaatctcagatggaactatttggggcaagtcctcctagtgtccctcacacctctccaagcagcaaccacttggaaacccaggctggcccacgggatgggtgaaaatcatccctcatttcagggggtgactggcagcctgtgtcatgggctgtctcttcgattgtataagaagagtgatctgaaaacagcagctctttgtcatctaaaatttttaactagcttaaaagccagcacctctgtctctctctttctcctttgatttcagggctgtgatccaaagtgaggcaaaatgacaatgtgcggtctgttgtcatcatggttcctgccagccccgtgaaggcatccttcactccatcgttaaacattggctgattttctaatactgatgttttcttcacctgaatattcatcttttcccaccctacacttagtgggtgtctttactccctgcacgtcactcctgacatattgtttctgtctgtacatgtctttatttgaaagagtctgttgtcataaagacttttctgctacaagcagaagacggaagttttctctgacattgactgaggccggtgggagctctactggaggatagaaaagatatttggtggtggttcatgcctgtaattccagcagatggatcacttgaggtcaggagtttgagtccagcctggccaacatggtgaaacgctgtctctactaaaaatacaaaaataagccaggagtagtggcacacacatgtagtcccagctacttgggaggctgagacaggggaattgcttgaacctgggaggcagaggttgcagtgagcagagatcatgccactgctctccaacctgggcaacagagcaagactccatctcaaaaaaaaaaaaaaaaaaaaaaaraaaaagaaaaagaaaagaaagaaacaaagaaaggaaagatatttgggtgttttgtggcactttcttgattttgggtgaggttagcaggtatttggagggaaggcagaacccagggtaggaaaaggacaatagaytgaggccagggaggaaacaggaagtagccagagtcaaatttccaggacaccaggcatggggtggacatttctgaaggaagaaaagaatttcataatattttgactttaacaatgagtcctgtgaaggttattcctgcagacctctaaactattctctctggctttgggatggtcagccaagccttttacctggataagcatatgcaggccacttggtgataatgtcaccgaatccttgggktgttacttcctcagttgggaacctctgtgactggtggttcctttgcctgagttttgcttgggcctgctgagcttgttccacctactcggcctggtgggctgcacttggctcgtgctgccagttcagatcccatgcctgccaagggtgagccaggtgtggagtggtaaggggtacatgagcaagcaagcacagggtctggccactgcatacagccaggcatgctggaagcagcaggctgggcagctctagacactggcatgggcactagctccctgtgaggctgcatctggaccaggcataccacaaccagcttccackgcaggcactggggaacgtggtggcacctggaagcttgaagatgccaggaaccacagagccccaaagagggtgtcacagcctttgcttggggagctgttaggtctgggctccccaaagggccacagctcttctctctgtctcatcacccaccatgtggcgagtggggggacatgtttcagccctgtttgtgttacagctctttcagtcctgccatttggtgggtcccaagttgttgtcccagatccaggaagaatgaagcatgcacacaattggagggtgagcaaggcaaagaggtgctttattaagcaacagtacagctctcaggacaactaaagtgggtagctcctttctgcaggcaggtcatctcagtttctgtgcagccctcagcagagaggagacccagagtgggtagctcctctccacaggcaggttgttccatcaactgcccaagtctggctgagtctggggcttttatgggcatcagaggaaaggaagtgcatgctgattggtccatgggtggccacagcagggtccagaaaaagtaccatatgttctcactctgatttacgaaactggtagcccagcccctatgctttaggccacctctggcctgatggtggggtttcaccrgggacacacccctttccacctaggagcctgtctgcctcctgctgccagccatcaacctgctgtctatagtgcccatggtgcccaggctgtttgtgccaagggatgcctgcaggcccatgctgagctgtcctctgctgtcccttggcctccctgctgtgctcatcagcacccaaagtccagaaggggctgaggtggcagggggctggtgtttcagtactgctccgagcatgtacacactcagccagattgtgacagtgcctgggcttggccgccactttgctccaaaattggagtgggcattgggagtcgggagaggccaggcagtgggagcaggcactcccaagccttccagtggaggggggcttcccaagcccccaagagcacagggatgcctgggtctgcagctgcagctgggcagctgcagttgcacctgggagcaggggctcctgccccaccaactcaggagggcatggggctcccacctgttcctggctcctgccagctccatagagcaagcagcccctactgcagctggtgtatttgcagcaattgctccagatgggctgctactgccaccaataatgagaccaccttacgaatgtggaaggtggccttgggaacccaaggctccagtgaaggcaagccacactgttccaagtaacatcctcactgaggaatagctaggttcttggggttgccttaaggtgtggttccttgatgcccatttgagatttcctgtttctccttttccattgagttttcagtcagtagacctcttgctctgtgctcccataaccactctatgcataacctcgattttggcacttagctatgcttattcctaatttctccatgtgagtgtataatttctgttacactgagaacacctttgagagcaggaagcatgttgtaatcacatctgtatccctaaggcctggcacatagtaggtgatcaagaaatatctgtgcaactgaaatcaactggtatgttattgactccattctaatgccagttttcaagatgtggtgagagtgagcaaataaatttgtccctgccttcaagaagcttacagtttgggtaaggacattaatgaacaccaagaaaataattagaaaacaacaaaatgttagactgtaaggtgctgatggcatattctaggagtcctgggaagggagaaagcaatgaagggtggaggtgtacaaaaaaaccttcacaggrgatgaggcttgaaagatgagtatatgctgaggaggctgggtataggaaggaaatgacagattcccttggagataatccattgctcttgacactgtgtacttacctcttgataagcagaatagggtggaaacaactcgcttgtttgattgttggactatggaacttgatggaaagcatcttggttagtgattgtccctgacgagggagaagtatagacacatgtccatacctgttatacatttatttatgcatttatataactataccctggccaagtggttattcttgtcaactccatatatacctatttgaggacagttaattacactagcagccattggcttatttctggagtccatctgccaaggaattcttccagggaaatggagagcacctagcatttgttgggccattaatatctcctagaaattaactcccccttttctccttgataatcttcataggttagcaagtgtggaaataaccacatgtattatcgagggatgatgcgaacaaagttcttaagacccctgcctgattcctcaaggaagcatttctcagctacatgtgttcctcacttgtaacccacagtcatccaggtcattatagtctatgatacagatgacccataggaatggcagtgacrtaaagggtacaatcaatttataggtttattttactgagaatttctgtgtagcaaagaagctgagcctgttttctagactggaaggaagggcatgcgttgatagggtgccactggctaacccacgtgtgtgtgtgtgtgtttacctttgagccaagtgtaccattagtgtgtgcttctaatgtttagttgtgcatgtgtgtaagatagaatcattctgacttctccaaggaacagttgtttattctttgtgaaagaagagaggaggcgcagccaaggtctaagttccagaagaccggatggtgtggattcttgaagatcagacaagctgtcgggatctctgaggctgccactcaaacttcctgagttgtctctgactcttatcttccagatgctttgttctgtacaagctgcccaacttgaaatttctggatgcccagaaagtaaccagacaagaacgagaggaggcgttggtcagaggagtcttcatgaaggtggtgaagcccaaggtgagctgcctacttgctgttcttcacaagggatttacatctcatggcagtgyttacaccccagggcatgcagaatgtcctctgagtgtttagaatgcagttggaatctcacatgaagggtccttccatggatacattgttggccaaacatgaaatarggttaggtgtaaattggatcttcctgttttaccaataaagcagcactatgcatagcccaatggtgaagttctgtgggggactgcaggtctccttcttggaaatattcactaagtggggcctctgcaggtttgcagctgagaaaggagaaagaggaaagcattgggcatgggtgggctttggggtaggggggattcttctagtacttcagagggggactttcttgtttgccaccaaagggaagctagggaagagtgattttcttccatcacaggcaagggctccayggccctctgagatatcgttagtgtggaaggtgatgttttctgacartgtgtccctaggctggcatgtgccccccacatgtatctctccagagctgattagagtggtgtttactgacctttcctttaccagctgagtctgtaagtgaatttggtgtcatgctaatggcagctctgatgaggcagtggagaattggcttggggtcttggattcagacmcaaggagattttttaaggacatggatgactatctctttgggaggagttgggagtccttcagtgaagccagaggctggggaatggactcggtgacccctgatgatctccttggagaaccatcattgccttgaggctctgtggagctgtgtggtcacctcccatgagattgcaacttgtgtgttgaaaatgctggcactgatatcctagaagtctagtttatcctcagctattgacttatagcactctgcatgtgcattggaartgattaaaggggggaaagaaaaaacaaaaacaaaacagaacaatgaaacatcttccatcaagttgctctgctggyagcagacctcaggccactttctttcccygaatccatgaggtgcaacttattttccattatgctgaataaaattgctagcagttgtggaaatatrtgatatggagggtatattactggcagataaatgtattgttacctctttcagcatgtgggaaattaattgagtgattcatttcatagctattaaagtgttaacagtgctccctatcgaggcacaggtttgatgtattgcacacaactgcctttagttattctagcttttgtaatttttccaaatgaaataatttatttcttggccttctttttatttgtttttggtgaaaacagtccagagatagccagcatgaccaaacccagcaaaagtacaacaaatgcactctataatatcctgggttattataaataacctgcccaccctacatatctcaccttcttgtatacatctgtattcacgtgtatacctgtgtgcagagtggatcagtatttctcctgcgctcattgactttgatgtgggcagctctacattgtcacacaaaatctgaaggggtaataaatgtagtacccaccatatctggatggggcactcagtgcatgcccaccccccattcttctaaggttcttggtgcacagatctacaagtgttcacatcatcctctaaagtagaaggaaggggtcactggctcgctttatgggtgagggaactgagggctggagaagttaactgggctgccccaggtcacctggctagtaattgtggagctggaggtttaccttgtgtctgaccactgggcccacactcttctctctctgctttctcacccctggagcagtgagctacatatttaccctgtggatctctttgttcaaacaaaacctcctaaggtctaaatgaggaaaacaggtaagagcaggactgttctgttgagtagaggtgggaggaatcgaaatccttccttgcttttgaaagtatctgagactggctccttaaaatccagcattagttgtttctgagtcattagcaacatcagcagaaatgccctttagggttcccaattagtttctaatcaattctagaattagttcatgtttgtatgattgactccaatatccttactaactgtattaagctttaaaaagcctgttaaggtgtaaattagttcaaccattgtggaaagcagtatggcaattcctcagagagctaaaaacagaactaccatttgacctagcaatcctattactgggtatatactgaaaggaatataaatcattctatcataaagacacatacatgtggatattcccagcaacactattcacaatagcaaagacatggaatcagcctaaatgcccatcagtgacagatcagataaagaaaatgtgatacgtatacactatggaatactatgcagccatacaaaagaacgagatcatatcttttgtgggaacatggatggagctggaggccattattcttagcaaactaatgcaggaacagaaaaacaaatacatattcttacttacaggtagaagctaaatgatgagaactcatgaacacaaagaagggaacaacagacataggggcctacttgaggctgaagattgggaggagagagaggagcagaaaaaataactattaggtactaggcttggtacctgggtatgaaataatctctacaacaaacccccgtgacacaagtttacctatgtaaccaacctgcatatttacccccaaacctaaaacaaaagtttaaaaaaatacctgttaattatttgaggagagagactaaagtactcttacaaagtatggtgatcttggttctctttctgtagtcacatgatttccagaccaaagaggacttagaaatcacctagtctgtgctcccgtttcatggatgagggagctgggagagggtgtagtttcctgaggctccatggaattgggaccagaacccctgggggtctgggcttccagttaagtgttcaatttatgccatgattcttcaagtgcccaggacgattcttctgtgttcttggtttcatatcgaactggatgcctacattgaatggcaggcagttcccttttgtctgttattttcagagataggcagtggtacttttcttgtagaaagaaagacgccaaatgagctccttgctgaattaataaattggcattaaaaaggctggttctcacctgttcacggtgtgtacagacatatgtttgttcccatgcaggtgtgtatacccgcttccgtctctgtgtatatatacatatgcatgttctgggaggtatgtgtacaccagagtcagcttctaagtggcaagcaatttcctttccatgtgttgctgctgctgtgctgagcacactcagggaagacctatttttcacgatggaatcggaatctcaagctggctcctgtcctttccagggcagccaaggcctgttgtgcttattcagcagaatgctctgatggatgattaaggtggccgtgatttggggagctattttcattttattcctgacataaagaatttgggagaatggaaaatgtccctccaatcacagctcttgccttggaggtagggaaacgggcagtctgggtgttctcggctgacacaaatgcagaaccatccaggaggtaataaaggcccgatgtcgcagaggtctgattgggtacctggcaggcgctggcgcttgagtgcaagtcctcactccctttctcccatgatgacacatttctcctccgtggctgccttttagcttttgttgtttcaaagctggcttctgtctgagctctgattgttgtagagaaagatgctgtcattcattaggaagtgatagctgaatgctacaatggatgcttccagactttatctctstgtgtgtgtgtgtgtgtgtgtgtgtgtgtgtgtgtgtgtgtgtgtgtgttattagttgatggacctgcaacagctaggctttgtcatttccaaaattcaaatatataaaatatatataactttatcaaatattggccattgaatcatgccattgttaatacagagaacaccacactggatacagagaaggttcaagcccccaaagaaagagcccgctagtaaccaaactgtgaagcccctcactgcactgggaaacatagatcaaaggggtgcagaggcctgtccaggatgacgtgtgtggtcggcatgtcagccctgcacagcagagagacagctcaaaaatccgacagtcagaattgtttaattatgtcctgactttgtaattattcatccctgttctggcaaagagcacagttgtcatttctttgacataattatttaaagctgagccctcttgtttacaggcatgtatacaaagttggctaccaactgtttaatcttcagaatcttaaaggagcctaaggagggcaactctagaaagtgttttgacgcttatgttttgcttgcattaatatccatcctcatagggaagatgtggtaataaatatgtctgtgagtagtgaggtgtctttgaagacatgtcacttgtttgtttatgtgggcacagtgtgttcaaacgtatgttttttcccatgcaggtgtgtataccagcttcaatctctctgtgtgtatacatatgcatgttctgggaggtatgtgtacaccagagtcagcttctaagtggcgagcratttcctttcctgatttttccacctgattttcccatcgtgtagtttgtgtatttgtgtagtttgttgtagcttgtatatttgtgtgtgtgcctacgttttgatacttgggagggtgggctattgtgtatgtgtgtgtgtgcatgtgtgtttgtgtgtgatagaaagaaggaaggagagggagggagatgccctgtgttgaagaaataaactttggagtacatgcatttccaaaagtctctcttattcttttcccctaaactgaaaattggaaactatttgggcctgagaatcacctgctcccacraataccctacatagtcctgccattgactcttggagttaggtcctcactcccctgggtacctttagtttcttccatctgtgtctgtgtttttaggtttccatgcaaaaggccatctaggatgaagacggaatgattcataaggaagctggcttctcattgggatgaggaagctgctcgcccctggggtgccagctccatgagggcaggaaccttgtgttttgttcgtttctgtatctctagtacctagtctatagcagaggctcagtcaatactcatcaaaggaatgaaccatgaacagcagagcatattggaagatccatcatgaaaaggtygttgtatgtgttctaattacttcagtcaacatggttacmttaaaaggcaggaaagaaaccattgcctttagactgtgtgttaattgccacctgtacactggcagaaaagacagattctgggcatcgtatttgtttttccaaaggattttcctgggattatttatgatgggaaaacctactactaccacaatccccatgacttggcttttccactgggtagcatttcacggggaggcaagggtgtgatctgaagctgcgttctcctcgtcactcggggtggtactggagtcctccttctttctcaacccacctgctcatattagggcttttaggaagtaagtagctcttctcatgaaacatgttagggtacccacaagtctgtgtgtagttacaatgaaattttccgtcttcgccgctattgtattttttgtctatacctaaaggagcactacctagttgcttctttgctacacttaattgttttttatgcctagtgtagcactttactaagtgctatcttattctaaactacactgcgtatgtctttgatatcttctgttactcctatgtagcccaattgcaaatgcataaaagggtatcagaaactacttctaggtttattacaattactgtcctttatactcaatattttcaagaatatatattttatataaagccaggacatgcctataaataaacattataaatcacaagtacattcagttcaacagaccatcagccaatatattttgaaagttctccacagtgccaaacattcaaaaaataatttaaaatattggttgtttttctggatgtttccaactacctgaatgtgctcatgtttttatgatttttttttctgttttcatgcagatgtttcttgtctagagacatattcagattctattttcagtttctttytagtaaattttggagagaggaaaattttttaattaactgttttttttaagaaaatgcttagatggtgtgttcaaaaacaactctgggagccaaacatttgcagtttgtttgttttttcaaccttattcctgacttcacagtttgcacgttcatttgagggagaatcacttaaagattttgtatttctccatttttagaaccatggcatcctgtgcctcaagcaaatgcttttggagtattgctctttggaggcggcctctgtagccttgcatttgggtagcaaccctctaaaataaaaaaatagagcactgcaggaaagccatgtctctggtgtgctggtgaaaccaaaatacacaatagaaagaaggaaggtggtagcagcctcttaggggcattcccaggagtcctaggggccttgccaggtgctgagcacatagtagagactactgtccatgaagccagtgcctgggggatgttactgtttccctgatgggacctctggcttgcccagctccccaatggcccagcttcaccctcttcctctttttagcctcccacatgctcgctgctgtccaaagatgcttagatggatgtatcaagaggatcatggaagtaagtagcattttttaagtgttggggataagatgagtaactcttggatactttgtcctgcctctgcaacccaacaactgggagaagtgtggtagattgcattgtttgtctaaaaccattcctttctctctgcccttgctgtggctccccatctaagggaggaatacacttccccattccattgactttggccttggccatgtaactccttgaccaatgggatgcgagtggaagtgacagcatgacaattctgggccaaggccttacacagcaccatgtgttttcactcactgctcgcacacgtctgccatttgctatgaaaacaacatgagagacaccatgaccagacctgaacctgacttgaggcctgcaaacatcccagccaaccacagacctctacatgagaaagaaatgcttgtaataagccactaagattttgagcagtagtgtgctgactaatacctaggcaggccatcccatccacacaccctacctctgctgcatctctggccattgaaccagggtcttaactggaacacaacttggagttttgtgaggttagtggcagtcattggtgccacagcaccaactactgtagggtttctgggtacttaactaattaggatagcagggccagtctagaggtcaactggctgcctagtggtacattagatgcacagaaacttccctgatatgtgagttagaagaacatgcattaagtagtcactgtctgctagctattgtaccagctgcttaacaattttatctctaattttctccctacaaatgaggaaactgatgatcagataaattatatacataacctaaaattacagagcaaggtggaaccaggtcctttttttcccccgggtcttcctaagccccaaaactcatgttctttcccctctatgccttgaattacttcagggaaaaaagtcacactcaaagcttgtgctcttcccactgtatcccttacatttcattaacaaggcatacatttctgatggaaggcaggggtgaaagagcaggaagatcaggagatagaaggcagccagaggcaactttgtaatttccaattttaaccctgtgatgactccccataacatattttggtgaaatacatgggctaggcaaagaactacaggagccaggctgtggggggatctctgagttaggtcaggtttgcagtttcccctgagggtgaggaggaaccttggcagagtttgaagtgggaaaaaagtctgggcaggcctgtatttgcatccctgggtatctgggagagggagccttagagctctgtgcagagcaggtgctttggtgatgtggaaatctgtgcaacagcaggcactggtctgaggctgccacagtgttcccagcacccaggccagtgtcagtgctcaggcagctacaggggttagagagctgtgtctaaagaagctctgggatagcagagatgggtccatgtaagagtgagtagctctgattctgggacaaggagacagctgatggctgtcagagacccactagtgactcccccttaaagggagttcacaacatctcgaaaatgttctttgacatgttcttacctcaaagcccctgtcccttatagtattcactgtctcgttttaaggagtaaatttaagtcttcctaactgggccataaaaagttgtcattcgcatgatcactggcaatgactaagatggagcctttatttgtctttagtctgcacattatcagcttgacattttcttgatccactttggaaaagtatctttggcattttgtttktgcaatgtagattctttttatcattatttttattaagtttgaaaggaaagagaagagggaaaaggagaggaaaataaagatgtttacttaagaaattgggttctggagagtaaagttagggttctgatttaaagttatccatatttaaaaccaacattacccggggttctgtgcagagctacagggcaggactggctgctgttcttcagctatgggtgcatgggtgagcttgacaaatcctycccatgcttttgtccatcctccagcccacccctcccaattctttgctttgagcttggtgattctaggctagtgatgaagaagaataagttggaaatgcaggggcaacttgtctaggaacagggaaaaaaggccaatgactgacgtatgagtaaaaggagaatcatgatggcctcggcatcccctcccctccattagaccagggccttgctgtctttcctgaactctacagcttaatagagctctgtcttcctcagaaagacccttctgggcccatggaaacatcagactgtaggattctagagactgaactctcaggccattgtgtatccttgaaggcagggaaacctgcaagaagggggcaggcagaggccaaccacacagatgccaggccactagagaaacatcatgaacattgttctgaagctgccttcaatgacatgtgcatgtatttgcaattccatggctaaggaagaaggagaaaacagggatggcatggtcccattttctactctgcagttctggctatttccaaaccrcctgctactataggtaatagcagataagaagagcaaattgtaagaagaaaatataaaagaaaactcatgtaagctcagtgatgaaatgaatgtttctgatacttaacatttacctgatctttttgttgttcccaaaagcaaagttgtggasaagataaagtagtaagataatcttagggcagcagtcaccaacgtttctggcaccagggactagttttttggaagacaattattccacagactgggggtggggatgggggatgatttctggatgaaactgctccacctcagatcatcaggcattagattctcataaggagcctacaacctagatccctcacatgcacagttcacaatagggtttgaactcctatgagaatctgatgccaccactgatctgacaggaggcagagcccaggcagtaatgctcgctcaccagccgctcacctcctgctgtgtggccttgtatctaatagaccacagaccagtacatgtctgtagccccgggattggtgttggagacccctgccttagggtgtccaacctgaacagagttaaaagtcttcacaacatttggaagaaaaatgtgatgatggtctgaatgcggctgatatgtactttcagggtaccctttggaggagtgtcaaacaggtatgcctaggcaagtaccagcatgcagtagcacgcaagtaatggcaccccgttccaccaccctgcagactcagtgaggggccagatgctcacaagagaggggcttctcatttcaraagaaattatctctgccctttatcccaaatggtccattgagaagcaaagagaacatctttctttcctgtttccccagagagcctgtttctcctcaccaacacctctagaacatccaagttcccagacagctgttggatccggcttgagagtctgctacaaccctctgggaggtgtgtttttgcctagaagttgttttgcccacctgtggtcaccatagcttccttctggggcctgtatacacactcagattccaaatgcatcttctttgtcactctgaccagcagaagtgccatttcacaagcatgatrgggaaggcttgtccttggggtcrctgaaggctggtgctacaattagcccttctgtttgcttttctgctccttacagtagagtgtcttagatgaacagacagggcwccatcaataatgcacagatgctctgtaattgggacttcctttgatgttaatttagctaagttcaacgccattgtcagtgatagcaattacgtgcagccttttcaccaaggacattttaggataattttatttttcatgtgcattttaaaatatggcagtaaattttgagctacattacctgaattagaactcattatttattttcaacagtgaactaatactctgtctaggctccaaagctgtcttttttttttttttcttttttgaagtgggggatatgtactggggcttctactttatgcagyttttaactcttgagtgaaatttagaagtgagtcacctcttctttttttgttgagcattttgaattgtcacagaggctatctggctcggtgacctgtcacgtatttttgttgggcccatttttattcactcctcccccattccacagcctttacttttgttcttgacacaatttaaggagttgcctccagctgtttttctggggaggttttaagtctgaatttattgtagctgttgagttccatggaaaacctgcaattcttaatttgttcatgagctgttgttggatttgctgctccatttggggactgggcccactccaagtttcagggtaatgtttaggtttggattaaaggctggacttctacctcctgttattggttgccttattaaaatggggaatgtaatgccttccaagtctgttgggggattaaatgagataatctgtggcaggagctaatgcaggctctggtctaaagcatcagtagcagctagtgttcttagtcatgtaatttcaacttacaaggactctttttgtggcactgctgtgtcatcaagatgtgtgggtgaatgtgaggaaggtaattttggcttgagatgctggggggcaggtacctaagtcagcttgggataccataacaaaatgccattgactagatgtcttaaacaacagaaatgcattttcttgcagttctgaagtccagaagttcaaggtcagggtgccagcatggttgggttcaggtgtgggctctcttcctggcttgtagatggctaccttctcactgcactctccactcatggtggagaaagtaaagaaagagaaggagatctctccgtcttctgatgaaaccacagtcctattggattagggtctcatttaaccttaattacctcctaaagatattgtctccaggtagagtcccattgcagggtagagcttgaacgtgtgaatttgggggtacgcattcagtccacagcagggggcattgcccctctatttctggtggcttaactaagttttctggaatttatccttaaatgaaatacttcygctcttctgagacatctacttcctagtaagagtaaaatacctaaaagaaaggartgtgagaggggaaagaaggcctcacattcatcctggggaggtccaggctcctgagcttgggcatctcctcagccaccgcacgagacccttttgttcttgtgggaatggtagagggaagcagtagggcaggtgaaggcatgggaggagtaagcatggcgtgggggacgggaggctccttgccactgatggagccaggagcatgaaggtgcagctgccctctggacagctgtggaggagagaggtctccatacaggaccaatgcgggaaaggatgcctggtgcagaagtgagcccttaagctctttcatttgagtgacctcgcactcaactctcttaatcctcctctaattcccttggcgaatctggaaatsaaggctgatgtttagatcctagaatttgtcattggaatcaggcccctctgcccccagagtgaaatgaaaaaactggggaatgaaatttgggagcttgttacacatgtccaaagaatattatcccatcatcagaagggttttgaaacccaagattgagatattggctctttagacaattagaaaacagccaagtactgtattatgaaacaaacaaacaaaaaaatctgttcagtttaatgctagaaaaagagaaagagaggttctaacttctgtactcattctaatttttagtcatgggatgttttggagaagattagattacaaaatatttttttcttctttgtgttcagaaaagcctcaataccaacttgcagcctctacacttttagatgccagaggcctaagctgaaaatatgaattgtgtttgcttaggtaaaaatgaacagggcgagtaagcggaataaagaataaaaagcttttccttctttgctttccctcccctcttcctttgcacattatatgactaaatgtgcaactttgttcacataactgctacaaacagttcactgtgtaggccaaacgctctcttatgcagtaaaattaagaaataatatgctttgaaagtgatttatgagtgtggttaaactgccagatttacaaagaaatagttcagatcttgggaagcctcaggagtcacgtcaaaaatgaatttgaccatgatttaaactgctacttttcttacatgacatttaatatgtgtactttggaggcccatatgtctttaataaaatagcattaagttttaaatatgatatgaatgcagccagtttctaaattcataaccttttccacaactccaaaatgctaaccaataagggagtcatacacgcaataaaacataaaccttagaaaatagctttttattaaaatggttagacagttggcagctgggttgcaatgtaataaatacttacagcattgtgggtttatcagacgttgtttaccctgcaagcaactgggaccagacaactaattatagcccctgccacaagagcagttcaagctgagtccccctgagtatatcgaagatgcaggatagtttgtgttgagggccctggacagggagtccagagatttgggctctaatccctctccaccacttaaaggggtgtgaccttgggcaagtccctccatttttccaacttctccaatctgtgtcacagagataataatgcctggcaggcagttctgcagtgctgatagataagaaacatctgacaccagtgcttggcacatagtaggtgctcagtaaagagaaacaattctttttaaaaacagcctttaattaaaaaaaaaagtattttaggctagaccttcatgtcattctagcagtgatgttttatgatgactctaggttggccccaagagaagtttaaccacttagccagagatcagtgtaaacatcatgaaaaatgaacatggagctccttgtctctctcacctcttgaaggaacaagcatgggagaatggcagaaggacatatttggttcagggggaatgggagtgtcctggtggccactgctactttcctgttcccagagatgaaagggaggtgtgcaacactgttccttcttgcctttggctttcccattcatagtgaaggtgacttatctttgtaaactgctctttatcacagcctaaggtctttgagtacttctgctgctgctgtgtgtgaatgcatctgcagacctttctgtggagtagtcttgaagtaggccttccagtctccatgtttccagatgcataggaacagctggtgtttccagcatcgcagatgaaacagccagtctggcagtggtctgattgtgtttgtccatgcaaccaaatcttaccaccccccacaaacctccttagcagggaattcctgaattccctaaaatggaagttgtacattatatttgagcctagattttgaatctcagggcacagacatatgtgtggttatcaaagatgaaaagaccaaggaaccacttcattttgttttgttttgtgttgtttttatattttttaacaatgttatggtttcattaagggaaattaacaaagaaaatccttcaactctattccctatatgtgactctatgacacatgtagggaatatgtgtgttcccttccaaaccgtatccttttctaaatgtgtttagaaatccttttctaaatgtgttcttgatgtgtttaatgttttactttttacttaaaatttttattacttattttgtattcctcaaatatattctttctatggactgtataattctctatcaagttgacctaagtactattagttaccaaaccattttcccaccgttcctggattttaaccttatgtataaaatactgctagttgtatgtatgtgcagggtatgtgtgtgtgtgtatgtgtgtttcctttaaattacttccttaggataatttttcatggctgggcttattgggtcacaaggtgtgggcacacaagcggttttaggctctgcctaaggattccagggtgccatttttcaagttggcagcctatcttggctgagtcattgcacctacccaggctagagggaatgtaggtcaaaaggaacacttaacatttccaagaccttctttggaaatgagtttcctagagtcttattggtgggtatggttctagaagcaaggcttagattctgtacaaagcatgcattgacctgctaagttgtagtcctagggaattacgggttccctagagcatccygaaaattattagtggcacgaagtcctgatcagtgtgaatgtgccttcagactgtaagccaaatctttgcataataccaatcattctacctataaaagcacaaatatgttattgttctcaatagccaatttaatgcggctttggggaggaaaaaaagagaaaagaagattacaagctggctgatcttgcttttatttctcttaaatctatccacacttctcaggggttatacttgtttaaagattgtatgcaactgtgcagtctgtgtgatttggaaagcaaatcaaactaaatatgaagttttcagcatgtgctgtttttaaaggatttcatgcatttattccaaatatacatttcttcccaagtagcactaaacctataatctttttcttgttacatttgttttttggggggtgggaggccaagagggtgacttagctttggagtggaaggttcctattaacatctacctccttcttgtgcagcattattcacagcagagctattaaggctaattattttcaggtttctatcaaagggggatatttgagctgacaaaaaaatgcatttattgggaagacaaatggcctgtttaaataagaaagggaccattatcatctacagcttccacccccctcccagttattagcctatatagggaggaggaaccagagacccatgggagactgtaagtcagaggaggttctgggggaccgtgctcactaaaatgcctggaaccccaagaagggaagtagattttcctatcatgtctgyagcccacctgaattgttcattgactttggagctggtgtcagcctgtcatttttttttcctcctaggtgaaattcattgacccttgatgtgttatggaaagaatattggttgaggagctacatgtattagtcaggggaaactaactgctgtaacaaacagtcccagatcccggtggtttagtcagtctccattcactgataactccttgatggagagtraggagtgtccagggacctaggcttcttccatgcaatggctctgcatttttcttgggccttgagtccttcctgggttcagcccatggatggagcaagcatgagaacatggaggattgaacaggaggatccacagtctgggtttttgggtggcacacatcacttctgcccattggccaaaactcaggcatatgaacattcataactgcaaaaaagcctgggaaatgcggacattgtgcactgacctgtgtccgctcaaaactcatatgttgatgccctcacctcagattgtgactgcatttggaagtagagagcctttaaagaggtaatttagttaaaatgagactgttaaggtgggccctaatccatctggctgttkcccttataagaagaggagattaagacatgcaaagaggcatcaggggtgcccaygcacagagagatgaccaagtaaagaggcagcaagagagttgccctgtgcaagccaaggagagaggtctcaggagaaaccagccctgtgggcaccttgatcttggacttccagactccagaactataagaaaagaaaggtctgttatttaagccacccaatcaatgatattttgtatttcagccctggaaaactaatacagcagctcaaatgagtgctccaaaacaaaagtcagtgtatttggtaaacattgagccagcatctaccatactgagcacttgtgttttggccccactgcaatagtcagctactgtaaacccttgggcaagtctagtttgtcctccagggctcagattgctcatctgtaaaatgggtacagtgatgcagatgaactctgagggtctccctatggttttgtgacctggatggtgcacagtccctcagctggcatcttggtcaggtaggggtccagtatctggcctactgtggtggtacactgaaggacccagattttagggttcaacctggattcaaatccccactctcccattggctatgggattttgagtaaatgagtgtctgccttagttacctcatctttaaaatgaggttaataaaaataaatacctgaaagtgttgctggattaagggattaaaggaaataatgaatatactgtaaagtacttattccagggcttcgtgcccaataaagacttaataactttgggctgggcgcggtggctcatgcctgtaatcccagcactttgggaggccgaggtgggtgggtcacgaggtcgggagatcaagaccatcctggctaacacggtgaaaacccgtctctactaaaaatacataaaattagctggacgtggtggcgggtgcctgtagtcccagctacttgggaggctgaggcaggagaatggcgtgaacccaggaggcggagcttgcaatgagccgagaccgccatgccactgcactccagcctgggcgacagagcgagactccatctcaaaaaaaaaaaaaaaaaaaaaaagacttaacaactttgtatctcctcctctctctttctctttcttcttttttgccttttaatttttctgcatattttgtaattattttcatgtaagcatcctgaatgtgaagatagagagtgggaagcattgtcacgcacgtgatctcattttatcctcatgagaggataagacagatgaagtggagccttattttacaaataargagcactaagatgggggagttgtgggattcactgacaattccagagaaaagtgaaagtgagatcgaacttgggcctcctcttggcccagtgctgtgttgttacatgatctctaacctggccattctggggatttcagggctcaggagatgacatgattcaggaaaggagagccggagtcatcaaccaatgccaggtccctaaagttccctcaggaagcacaaaatggaaatggcagctctttcaagggtcgggcagacaacaaacaaatatgttgcatttatagccaggaatagaaagaacatggttaacctccaaaagttcctgaatccatctgatgaagatgatgttgacttgacctagtttgggaccagggtttacttttctttgtgctccacgttacctggacttctccacacttctgagagtcagggacatggcctcgaaacaatgtttgtcctatatgtctagcttgccacagctctcatcttcaaaccaccagttcttggttttatatacatggcagaagatgccccagggccaggagttcccatcccaaatcataggctgaggatgcagcaccagggccaggaaggaagggaggaatagagatgacatattcatgtcctggttctgttgaccatgcttgagcttcagagccaggcaccatcctcctacttagaggtgatggcgaccagacagtcttttaagagaaaaagtatattttgcttcacttttattcaaaacaagctttctagagggctgaaattttggatgcactagagacagctggagatcttcaagctataggaaaatgacaatgaattcagcctttctgctatctctttcctgtagggcaggttatctgtctttgtcatggctaatggcaatttatgctatccatgaccactgggaaagaaaaatattcatatttttaaaatgaactgagacagatcacttctctatcagggacatggtcatgctagaaggaaggaagtagagtttccaaggtcatagtttctcagtgttttctgggaggtcaccatttatttatgatcttatcatttgagtttcaaaattaggatgaattctgctggaaccttaaaaataatttgaagtgatgagggcagaagaagctgctcaaatcctgtgcttttcaggaaatagggtactttttagatttgccaagcagcaacgacattgtcacccagaggtttagctggaaggtaacatacctgaagcctcaagattggggcattttcaggccatctatgaaaatgaaatatcccaagcccaccattagtattctcaagctatgaaagaagatggtttaggtcatttctcaggccatgccctctggtatacttggcctggatatattcaacttgtattctcattcctacccctaactgcaatattaacattttttttttttttttttttttttttttttttttttgagatggagtctcgctctgtcgcccaggctgtattgcagtggtgtgatctcagctcactgcaagttctgcctcccgggttcaggctattctcctgcctcagcctcccaagtagctgggactacaggcgtccaccacgagtccggctaattttttgtatttttagtagagacgtgttttcactgtgttagccaggatggtctcgatctcctgacctcgtgatctgcccgtctcggcctcccaaagtgctgggattacagacatgagccacggctcccggccaatattaactcttgaacacgtgtttacacaggtgaccttcagctatttagtcttcaccacggggctgaaggatcgcgtggtgcnnnnnnnnnnnnnnnnnnnnnnnnnnnnnnnnnnnnnnnnnnnnnnnnnnnnnnnnnnnnnnnnnnnnnnnnnnnnnnnnngtgcggtggctcatgcctgtaatccccagcactttgggaagctgagacgggtggatcatgaggtcaggagatcgagaccatcctggctaacacggtgaaaccccgtctctactaaaaatacaaaaaaattagccggacatggtggtaggtgcttgtagccccagctacttgggaggctgaggcaggagaatggcgtgaacccaggaggcagagcttgcagtgagctgagatcgcgccatgcactccagcctgggcgacagagcgagattctgtctcaaaaacaaaaacaaaacaaacaaaaaaatggatttcaggtgattctttttggaaggtctttcttctcacccattggctagtttctacccattaacaccaagcctcagtttttccattcttcttcccactcattcatccatcttatatttactttgtttatcagggtccttggaaggatttgggtagaaaaggaactaaaacagccttagccttcacagggagcactttctagggaagatggactcaagtctttcctctgtctcactatgctgacctcttctacagttgcttgggtgcctacaaattttttctcctttgtgtgcctgatgaagtctacaaatgttatagactgaatattttaaataatttgacctttgtgccttatagtactcttattccctttttattgtcacattctgttagaatggaatgaacagaattcttcaaagggctttttagattgccgtttgatctgactgtggagggaagaatgatagagagttgggtgtgcagttttgcacacttctgggtgaatgggcagtatgcatgtcatctgcctccctccaggctgaccacatgggctcctcagggaaaacacagcccagccagggggagtgggggtgggtctcttcagatgtatggaagtccttgtgtgaagagccctatgtggctttcaacaataaagtctcattgagttggaggcagtttggaaaaaggcttggagccccacattagatggataccagaagaccaacatcccattataaaaagaaagtccttacatcaaaatatttaaaccaaagggaaaggcccaagaagtatggaaaagaaacaagaaaataagcaaaagtagtgaaagtatttccttccaggacatcagaagctagaccatggctctagtctagaatcatctgataatgatggagatggattttttgttcttaaaaagaatgctctggataagtcatttcatgtcagcttttataacagttaggagtaagggaagagacctgccttcatcttgccagtctttttaggtgtgttggtccttacctgccaggaatttggtaaacttcatagcatagagccttctgtctggggtatccgtggtcatttgctgccagctctaagttttcttttgtgatttctggcctcatttcccactgttctgcagtgtattttttcagtttaactagatcagtgtatgtctcaagttcttcttcctcctcctcctcccttcccttcgaaatagatatgccttcattattgttcgcccaatctcttcactcactcatctaccttctagggaatatatatctcaccttctttctctcatcaatccttcggtgcccaactcagattctgtcctctatgaagccccctttcagaattcccagaccccagagctttcctttaactacatctttaagccatattatattttcaaatatttgaatatatccatcttgctttcccaagtgagaaggcaaggaatgtatctcatctaccttctgtttaccccatggggccaaacttagggatggtcctatattatcccttagtatttagcatcttctactacactgagctatactgagacagtcaccttcttccccatggccaattaccagggaagacccaatgcaccagcactcagttctctcaccaagtgttattctgaaaatatgtgtatgagacagtggccagccttggaccagagggaaattctgcaattctgcaatttatgtggatgcttgctagaggtcacaccacaaggccactgtccacatatcagctttgtctcaggagctgactcatgttttttatataaatcatagtgagttgcccattataaacaccttgtaacattcaaaaggctttatggctgttattagctactgcagttgtgatttactagctaattcaggctgatgtgtagatgagtgtgcccagggcaccatttgtcccatctacataagtcagagagtagaataggctgggtactcaaaagcaaatgtctcttccgacggcctgtggcatgtcagggcttgcttatattttcagttagcaggtcagcagtctctcctctctaggtgggctgtgtcttcacaccttgacacctccatccaagagcccttggtgggaagcacggctgtaacagacagtttgtgttcagcgctttcactaaagacttccttattgcaggcagaaaagaaaataaagttgtgagagaaatatctggaatggccctggtgacacctttatgtttcccagtgcattcagcatcagattttgtattggyttctagttagcagtagtcacacttaccacttgttctttttttccaatgaaagtatctggcaggatgcggtgactcatgcctgtaatcccagcactttgggaggccaaggtgggaggattgtttgagcccaggagttcaagaaaagcctgggaaacatggcaaaatcctatctataaaaaatacaaaaattagccgggtgtggtggtgcctgtagtcccagctgctcaggaggctgagcctggggaggttgaggctgcagtgagccatgatcacaccactgcactccaagctgggtgacagaatgagactccatctcaaaaataagtgaaagtaacactattggattgcctgtggtgtgtacatttatataaaatcagatatagccacagattgtgtttaggatgacatatgttttacgtaacatgtttatttgtattaatgttttaggtttttgctttctttttaatcctactaattgcctaagatgagatgaaagaaaattcacctatacaagtggtattctgctcttctggatctgaaaacagggactaaactgagtaaaacttataaagtagtttgtagtttatttgacagggagaaaaattatagaaacacacatgtatataaaatgtgtgtatgtacacacatacatgcttaccagatgagcacattatatgtttatatacttactatatagctatatatgcatgttatgtaatacatatattaaacactatcccttactttgttgtatagatttctgctttgattggctcacatttaatagacaatatctcttcttagtttcagatttcggtgccatagaaccaagtagcttgggtaggaggtagttctttgcaattccaaatcctcatccttcagcctctaactacagttgactctcaaacaacacaggtttaggactgcacagattcacctacctgaggatttttttcaaccaaatgaagatcaaaaattgaaattctcgggatgccaaacccatgtatatggaacaccaacttttcatattccatagggccaactgtgggacttgactatgcgtggatctgtgtatacgcagggggccctcaagccaattccccttgtctatcaagggatgactgtactaagttgacctagaaagtgtgatatttgaattgtacccttgcctcaggcttgatttccctgcctgtcactttggggtgagctgtccaacatggcaaggtttgtcttctaaatggttgcatcatccacaaaatcaggaaacagatttatttgtatctgttgtagttagtgcttttgcccgtgggtttctggtgggaggagcgagaactaggcagcctttgtacctgtgactcaaaggaaataagtctagcattttccattagatgtttattgctcaccgagaattggcttagaaacctgtattgagttgttacaaggaataaagctgaatgagatcagactttggagaaatcagagaaatgtaaattaatataagaataaatgatcaccttgtacccattaggctgggataattgaaaaaccaggtaatggcaaacgttagtgggatgtggggttataggaaccctcatgccctactggtagagttacagtaattctggagtacaggctggcttcattgagctgaattaatatactcatatcctgtgcccagcaagtccactctaagataaatatcccgatgaaattcttgcataggtccataaggaagttcgtaggaggattttcattaatgtattatttgtagtggtagaaagttgaagccagctttgagttgaaggaaattccaggagattggaaggtagaatgtggtagatgccttggagtactgagcaacaattagaagcagggattcagtggatgcatggcaacatgacctagattgcattgactacatgtgcttgtttcctgtgcttttgataaactgacatctggggctgggctaaccagggaaagactgtccytcccagggctagccaattcttagagattgcaaatgactcacttagaggtgtgcctttgatatgcaaaggaacaaatccagagcccctgctgtgaaccacttcctctctctggctcctacactctaggagacagaattcctctgccctaatcatcccaggaccagtcaagacagccagtcctacttctgcttaccttgcctggcccatctcgtcccagaaccaccacagtcaagactttactgcctccttctgccttgttgcctacccagatgcttccatgtggggccctgtgtaacatggcatgccccctcctcttgggaactagagtaagctatgttttcaatggcagtcatcccctgatctgttggcctcaccacacctaaataattttataacataggtataaaataaagtcacttcatggcttggcacagtggctcacgcctctaattccagcattttgggaggccaaggtgggtggatcacctgagatcaggagttcgagaccagcctggccaacatggtgaaaccccgtctctactaaaaaaacaaacaaaaaattagccagatgtggtggcgtgagcctgtaattccagctactcaggaggttgaggcaggagaatcacttgaacccgacaggcgaaggttgcagtgagctgagatcgcgccattgcactccagcctgggcaacagagctagactgcatctcaaaaaaaaaaaaaaaaaaggggctctagtgcatcttgtggggaagaagttggttgaaccttgtttaaccgtttgtttcccaagctcatttgaccatgaacccttcctggtagcacctacttacttaaatatgaagcttggtggtgaacctctcagggtacttgagcctttctttctagcagagggctttgggctcctgagcaacattcatgaacggaggaagactgtgtggacaagtggctagggaaaggcacaacaatttgwtggagaagaagccattaactgagataccacctcttccttagtatccaagggacttggctcagtaggaatattatgttttttcttttcttttcttttctctatttatttatttatttatttgagacggagtcttgctctgtcacccaggctggagtacagtggtgtgatcttggcttaccacaacctctgcctcccgagttcaagcaattctcctgcctcagcctcccaggtagctggggttatgggtatgtgccactgcgcccagctaatttttttttttttttttttttttttttgtagagtcagggttttaccatgttggccaggctggtcttgaactcctgacctcaagtaatctgcccaccttggcctcccaaagtactgggaatataggcgtgagccactgtgcccagccatattatgttttttcaaaccagaaagatatttggttcaagtcacagttttcaatcattgtgacctttggcaagtcctttgaattcttttggttcagttttctcgttggcaaatgcagctttgaaacttaacttcataggtttatgttgaaggttaaaaatgatatatgtaaagtatctggcacttagtagtaggttagtaaaaattagccactgttaagacattattatcaaaattattaatatcttcatttgatcttttatgaggactaacagtgaacctattcacaattagccatgtgactatagaagtggcttactcaaggtcacattgctcattaatagcaggggtgggactacaatttacttctcttaggtccttgctcaatgtcatcttcattacactggaccaagggtccttttgcctatttcgtgactgaaggaactcagcacaagctctttcagtggactgaatggaccacttcattgcagcactggagagagatgcgggatgggattcagagggcctggggtgccactgggatttttgcttcagttatactctgcatccttgttaataacctagagaaggttgtaaagaatatgctcattatatctgtattttcccctaaatggagaggtattacaaaccccaccaatgacagagacgtgacataaagggacctggagctgtcaggcatatggacaggaaatcactagatgagattcagctgcaataaatgcatcctaatacatctggggacaaataatccgaaacacagatattcaatgggaggaagatatttggaaagcagtaaatgctgaaggggacctgggggatactggacagcaaattagatgtgggttttcattgtgttaggccaacagaaattggtaatgcaatcttgcgctgtattttccagcagtcccctggagcagctgggaggagaaagcctctttcaccagccaagatcaagtctgctcgccccacacactcctgaagaatggcctggctggggctggggtggagggaggggtcgctttactttcccctggcccctacctcacagggatggtgactttcctttctctaagccttaccctgaccctgtgtccttggagagtcggtctctttcctgtctcccagcgtcttgctgcagaatgctgtgggatgttggtctgcctgggacagccaagggaggacagtcctgcctggaaagtcctggtctgcagggaagacttggcctcaggtgtttgtttccatgtaagctaaacatagccatcttttctagtgatcctggcttcctccccgctctccctcacactcacacccccatcctcttcctcatgaaggatttcacctgcagatagcctctatagacagaggaatatttgacaaaacacaagcatctgccccagcagctgttcccagcaatggggatcagtcaccaactcctcccacctcctccttctcatgcttcactcttctgcaccaccccccgcccaattttatagtcttctcaagtttaaagacttcccttgacatgcataaaaccaaatttctcttctggggaccagtgaacacatattctgatttttttctagttcctcgccttaccccattctcaggaaagcccagttacttcgtgagttcagagcacttccttgctggggcgcctgctaagtggggtgagtttcactggagcacccctcccaacttttgggaaagagttcactctcaccaacccatactttctgcctttccttctctgggattgtcttacctctggaaatccttcagggacttctagggaatggctatgtcaatggggctggtaaaaagcagctgtgggctggtaaatgtcagaagctgtttgcaaggctgggaaaattcactgtttatttcttcaacaagccctagtttcctccactgagaatgttcttcatcaaactcatcattcaggtttgtattcagagcagtttagcttaggcatgcaattgtcagtcaacactcgtaagtaagtggccaagtttaaagttactctttgaatatttctatacactctattcagtaagtgttcaccaagtcccttctctgtggctaccacacagctaaatactcatgtgtatatgtgtgggagagagagcgttttactctcgtggaggggcccgaatgaaaaaggcatcaccgtggaagaacttgagctttcagtcctgataggtcatggatataaatggatggcagctgctagcacagtgatttatgagtgatgctcccagccaaaggaagtcaggcacattctagaactgcagaccgctgtgtacagggcatctcagtatatttagcaaaatgagattgcaaaccacagaaaaaarggctgagtgggtggagaggaagaacattctctggccagaaacttgctgaactttgaggccagggaccggaggctttgcagaggtggggagagacgttctttggcttgtccgacagaaataaatcaccactgaggagatataccaaaggccaattatatggagtgttttcttggaaaatcatctcccagacaggccctgtaaatcatccccagcattggcagacattcagatctgcctggtggggcgggtggcatgccagtgcaccccagtgtcaggtagaggaattacacaggggtagtctcgttgtagcagggaaaacagaggtcaggtactagctgtcttcatccgaggaagcagtgtagggcagaactgtttgttctgtcctaggaattgtagggccaaggcttttgaccaggttttgccacttacttgttctgcgactttcagattctctacaaayagagtggggactgggttatctctgaggttcctagaagccctgacattaattttatgcctttgtgttctctataacttctgcatagcgtaagcttttgcataccacaccctatgctggtaattatcccaagagagacaaaaatttccatctacccagcaaggttagtcatacaggatcatcttgggagggtgattggggtccctcaaagccaggtcctcagtgtagctgtagagagagatgggaatttagcctggagaatgaagagctaagggggatgccagaggtactgtgttcaatattggaagggcttcatgtggaagagggatccgtgtctgttgtcctactctgtaggccaaaaacaggaccaatgaactgcaaatagaggggcccaaaaggaaggaaaagataaaccagcaatcattattccattgctcagtgacacaaactttgatttcctcagtgtttgaaaatatagcaagaactcttaactggccaaatgtggtggctcacacctgttataccagcactttgggaggctagagtggaaggattgcttgagcctgggagttcaagaccagcctgggcaacatgcagaccctgtctctacaaaacaaacaaacaaaaaattatctggacaaggtgtacctatagtcccagctacttgggaggctcaggtgggagtatcacttgaacccgggaggttgaggctacagtgagccgtgattataccactgcactccagcctgggtgacagcaagacacacaaagtctcacagacacacaaaaagaactctaaccatcagaactatccaacagtggcacctaaacctggcagagcggaaagtgatccatcactgctgtaatctagccgaggctgggtgacagtcatggtcacagcagagaggacaggatgctcctttctgctctatctgtaaccatcttctgtccctggaatgagctgagtgaggaatgctctccctcctctcctcaaagtatcttccttgtcccagcaaagcttcattcttcctattgaggaggggttcatttatctctaggagagttatcttaaaatttgtctactttttggagaaaatatatattgagactttgagggtgggaatttaattggttgccaataaacaggaaggccccaagggaaagaaatgagaattagaaactgactcacaatatctggatgggaagccaggcaggagggaaactcaggctctcgaaagggaaatctgttgggcacccagcttacttcttaattaccttttttgttaatggccagcccattccttatgggtttgttgttggtgggtttacttaaacctttttgaaatatattggttattttagcttgtactgattctggaggcaatgaatccacaaagttaataaaataattcttccatcatcttaaaattatttcttcattcaagcttcaagatttccttcttcttcccatattctagaatgaacaattgttttttctttatttatcttctttgtgattctattgattctgttgggatcccttctcagtctttgactttctttctagacaaagccctcctaaytgttctcattagtttgagtatgacaattctgtccgtgtgattaattcaacacacacctaacatttattaagttcctactctatggaagtcgttgagcgagacactgaggctagaggtgaaaaagacacttttcttgccattctttatacaggattgtagcagaaccaaattagttgtaatgaatagagtgctatgatacatgatgcaaacactggccattgttcatgaggtcactttcatctacctcctgtgacagatgaaatcactgagactctgagaatttcagtgaatcactcaagttcctacagctggtaaatggcagagctggggtctgaatccagggctgtctgactccaaagcctgcatcctttccactgtgcaacacttccctttgtttgattgtcgatggaaatacagagaaacatgtgacttaagaatgagttggggaacttaattgcactggtgaaaaatgaagacattttataataaaacacataggaagatgaagtagaaagtttaccagtgtcctgggatsctccgcaaccactttgaggagaatctgagctcttggtatgcaggctyggaatcatggctctgtctggcgttggacataaaatggtagacttgatgcagactccagctcagtcatccttgtctgttatgcttggaggcgacagctctgcatgaacccattaactcagagagatttcggcagagcctttcccttccctgaccactgggcacgagtgcaccactctgctctgagctgatcagctttccatatgcacggaacaaccacagcctccctccccatctttcatcacctaaataagggcagttaatgtttaagagtagagaatagggaacataatgatggataaattataagtttggggatatgaaaagtcaaactgtgtaaatatgtattttaaaccacaaacagaatgttaatgcatctttcccattaactcactaactgaaattacagagtgtaacgtgagccaacgcccacgggttggttatgatgttttcagatttagaacagcaaatgataaatgcccttctctcagacaaagaagcgattgacacagcttttcaatgtagtcactggcaatgtcagcagtggaaaataaactgagcaccaggaggagagacgtcctgagatacctgcggaaagtggagtgtgggctactgttaagcacctcctgtatatgggggaatgtctcaggggtcggtgcagcccctccgagcagtgaggacccaggcgccattgcctggactgcctttctggattagagggaaggcttgttttctcaagcatcagctctatcttgctctgggttggtgggcagctgccgtgaagccagtttcactgtggctaggtttgggttggggatgtgtggtttttgcatcagccatttcattgtttggttgcttatgggcagcagtgtaaaagagaggttaagaggatgtggagaaattagaaccctcgtgtgctgttggtgggaatgcaaaatgctatggaatagtatggtggttcctcaaaaaaattaaaagtagaattactgtactatatgatccggcaattctgcttctgagtgtataccccaaagagttgaaagcagagtctctaagagatatttgaacacccatgttcgtagcagcattattcacaatagccaaaaggtggaaacaaaggaactattgacagatgaatggagaaacaacatgtggtcagtatattcagtggaatattattcagccctaaaaatgaaggcacttctgacacatgctacaacatggatgaaacttgaagccattgtgctaagtgaaataaaacactcacaaaaagacaaatatgattctacttatattcagagagacagtagaagaggggtcgtgaggggctgggaagagaaggaaatggggagttattgtttcacatgtacagagttttggttttggaagaggaagagttctggagactgtaccacaatgtgaatgtatttamcactactgagctatatatttagaaatggttaagatggtaaattttgtgttatgtgtattttaccacatataatattactgcatctttgtaagagaaggagaaggaatccagctttagggacttgggtagattcactgctgctgtttacttgctgtatgactttgaacaaattagtaaacactgtaagcctgctcttctcaactgtgaaataatatctgctgtaagggttgtaaaatagcgagtactcaataaatgtcagcatccctcactttggtgtttcagaaatcctctcttatgcccaccccaaactgttctcctgaaataaacatggtggacrtgtgtgtgtgtgtgtgtgtgtgtgtgtgtctgtgtgtaaaatctttgtatacatggtaagttatgcatggacttctttctgggctgaagtttggctctattaacgtttcttcacaaagatggattccttccctttgataccatctctgcactttgtccagttcccctgcatgtctttaattgaaggatcagaaagtaaatggggtatcctggagagactgcagcctgggcattgtatacctcacttcttgttagcctggtggtcctcatggcccttgggcagctcactcatagtcacttgggggtgctcagtctttctcatcccaccccaggatctgcctccctggtgcttcctccctgccatgcatccccctcccaccaactcccttcatccccaaactcccaccccttcttttagaggtagagtctctctttgttgcccaggctagagtacagtggtgatcatggttcattgtaacctcaaactcctgggctcagttgatcctcctgcctcagcctcctgagtagctgggactacaggtgtgtgccaccacatctgggtgatttaaaaaaaaaawtttttttgtatagatggggtctatgttgcccaagttggtcttgaactcctggcctcaaggatcctggtgccttggcctttcaaagtgttgggattacagatgtgagccaccartatccccctttcactggcttttgacactttcttggcctcttttggccctgagccaagtaaccctagggcatatttcaggaggaggttgttggcatttctgaagcctgtgggacaatttggctgtatgcaaatggttgagggtcattttcccctgaaggttaaatggtgaccctggtcaatgtttagctagtgtgcacttaaatgatttcccctagttaatgaatcataggacaaattagctgaggactttcgcaccctgcaggtaagctggggtggtaagaactggtaatactgaaattgtgttgagttatgtaggctatgcagtgcaggatctgcttagcacagctttccggtgcttagatcctaattacaaatgtaaattgagggctgcaactgttggagagccaccaaatgatgacctggatatacttatttctgagcctgctcaaacatccctcctcttcaccttaggaagccctatatccaatctctcttcctctatccctgtcattcccaaattgtgtgctgagactccccagagtgctgcagcagactcacagggatgatacgggatattttaaatgtttgaaggcaatacaaccacatgcaacatctgacagacgctatgtgaattaccakctcaggtgtttcacagtttcatcattagatcatgctacaattctttggataatactgtatctttgcaaagttgcataatttttttcggtagttgctgtgattaaaagcaagtgtgtatggaataggaaatgtggatggcagtgcctaatatgtacaattccaatattaaggaagttgtgcagggcccaataggtacacacatccctttagtaaacaagtgtgaaycttgaagaatgaaataaaaatgtttcctttcaatttatgcatttttttatcaaatggctattgagttattaggacataaatacttattaagttgttccataaaatggaactcaggtatttcttttggtccgtgggctctccctggaaaacattactgagaccgttagggcaccatgaactaagttggagagttattgttattattattttttgagatggagttttgctcttgttgyccaggctggagtgcagtgacatgatctcggttcactgcaacctctgcctcccaggttcaagcgattctcctgcctcagcctcccgagtagctgggattacaggcgcccgccaccatgaccagctaatttttgtatttttagtagagayggggtttcaccatgttggccgggctggtcttgaactcctgagctcaagtgattctcccaaagtgttgggattacaggtgcaagccaccatgcccagccaaattggagagttattatagwcaaaaaaaaaaaaaagaaaggatcttcccctccttaccttcatcagwcctcccactgtgaactctcccttctgaacaaactcactgtgtcccttatatctctctttcttcaccattagctccttctcccacctgaaagatgaagtttcattgatcctttaaaaataaaagaaagaaaatcaagccttgtcgaatgttgttaccayctcctcttccattctcctttccttctcctcctccttctcctccatctttccctttccttcattgcccracttaagaacagtcttgtcccgattcctttactgctcatatcatatccacattgctaaaaccttgtctggctttgtcccctgctgctgcctttatgtggccctcaccagggtcactgacaagttccaaataaccaacccaacgccactcatatatctgcatcatagtcacaataagctgaggtctcacgttcccccacctgatattttggcttctgctggttcctgtgtctagaacatctgcagctgtgttaccttctcattaataacagtggtgttgatagctcatcttgagtttccttctcccatagagcctctggggacctcaatacccccttaccacgctatccgccaaaatgctcagaggtatttgaagccacaggctgtaccacacagttttgtgtcctctgtagtactttcacacacagtaggaaggtagtaaatatgggtttgaaaggagcagcactgttcagaataggtggtccagactttggtctcccaggaacccctgctaacatatgctgaaagracctataggtatgatgaggttggcttctgagatggaacgatagactccaaatctttctctcaacttaccaaatagagacctttctttctcattatataagtaatgcatgtgtactgtagataagttagaaaatgaataccaaggaaaggaataaagcttatatttagaaataacaactacttatacttgtatttttatatattaactgttagaattttatttccgtatatgtgaaagatatatatttatgaagtataaataggattatattttacttgtttctttatgatctccttttgttgcttaggaacactacatatggtgaaatagaatagatgaatttaataaaagttacatagtattttatattacactattgctcattattatttttaattttgaaaatatatattacatcattattccaggaaattatctatatcagtactactcaaaggtgtccatggactggtgccagtatgaaaattaatacaggtccatgatataagtacaggaattacgagtaagccttcagaaacttttaaaggaaagtaacattcccatatctggtaactcattttagaaactatttttaatacaaaatattacatattaaatgcttattaacagaagtaactactattaaaatcattccatattttacacatatttcaccacctaaccaccccccagtgcccgcccagattttttcatataactgggaagccacagtccatattattcttccactggcttttttcacttagtaggtttctttccaagaaggtaccaaagagaaaaattgagatagaatctattgaaggttcttgaggaataatttacttatagtaaaatttacccttagtgtagagttccatgaaattaacccaagtgtagagtctggacaaagatgtctgataattatcataacaatcaagataatgaacagttacctttctggaaaattacctcctgtaccttagtagtcaaccatccccaaccatccctaccatccccacttcctggcaatgctgattctatttctgatcctaaaatgttgcctttttgagaaataaatggaatcataccatagtttggactctggcttcttttacttatcataacgcatgtaagatctatctatattgttgcaatgtatcagtagttcattcttttttattgccgagcagtttttcacatatggatgtactactatttgtttatccattcataagctgaggggcagttagtccagattttggtgattatgaataaagctgctattaacatttgcatagaatttttgtgtgaacatgaaatttgtgtgtggacgtgttttcatttcttttgggtaattacttggaagttggattgctaagtctcgtgatacatgtatgtttaactgtgtaagaaattgccagactgtttttcaaagtggctggctgtatcattttgcattgcttccagcaatgtatgaatgttccagttctactcacttgctatatataacttgatattgtcaatatctttttgttttagttttagtttcaatttttgcctttccaatagatgtgtaatgatatctatgccattgtggtcataatttgcattttcttaatgactaatgatgttgggtaccttttcatatgcttacttgggattcacacatcatctttggttaaagtcggttcaaatcttttgtccatttaaaaaagtgggttgtcgggaggcggagcttgcagtgagccgagatcgtgccactgcactccagcctgggagacagcgagactccgtctcagaaaaaaaaaaaaaaagtgggttgtttgattttttatattgagttttgagatttctttatatcatttagatataagtcattttgagatatgtattttgaaaatactttatcccggtctgtatcttcctttttcattttattaacagtgtcttttgaagagcaaaagttttaaagtttgataaagtccactttatcaamatttttcttttataagtcatagttttggtagcgtatctaacaagtcttggctaataaaagattataaagattttctcttgttttattttcaaaattttatagctctagtttttacatttaagtgtatgatccactttgagttattacttgtatatggtgccaggcataggtcatgggttgtttttgtttttttgtatacagatattgaactgcttcagcttcatttgttgaaaaggcctgcctttctcctgcttgcctttcatctttgtcaaaaattaattggccatgtacattggtctctatctttagactctattctatctcactgatttatgtgtctatcctttcatcagtattacattgtcttaatcactgtatagtgtattttgaaatcaagtagtagaagtcctctgattttgtacttttttgacaaattattttgggtattctagttcttttgcatttccctgtaaattttaatatcagcttgttaatttctataaaaaattttgctgggactttcagattctgttgactatgtagtgcatttttgagagaattgacatcttaacaatattgagtctgtgaagatggtatctctctctattaatttagatctttttakaacttttaatctgttttataattttcagcatataaatcttgctcatactttgttagatttgtacataaatattgtatgtgctttgtgctattataaatggtatgagcttcgaaattttaatttccaattgttcattgctagtttcactttgctaagcttacttattatttctgagtgattttgtaaattgagattttttttttcaaattgacaatcatgttacttttatttttattttattttattttattttatttgagacagagtcttgctctgtcggccaggctggagtgcagtggcatgctcttggctcactgcaacctccgcctcccaggctcaaacaattctcctgcttcagcctcctgagtagctgagattacaggcatgtgccaccatgcctggcttatttttgtatttttggtagagatggggtttcaccatgttggccaggctggtcttgaactcctgacctcaggtaatctgcctgcctcagcctcccaaagtgctgggattacaggcgtgagccaccgtgcccggcttcatgttgcttttaaatagagacagttttatttcctcagtttcaattcttagattctttaattatttttattgccttattctaccacttagaacaacagtacttagaatcacagtaacttagtaccacaattccacagtactatgtaaaacaggcataatgcatgcagatatctttgccttaatcccagtcttgaaaggaagacagccaggctatcacaactaagtatgaagttagctatagattttttgcaaacgtcctctatcagattgaagatgttttcttctatctctagtttgctgaaagtttttatcattaataatgttgaattttgtcaaatgtttttctgcattcattgaggtgagtatatagtttattttctttagtctgtgtatatggtgaatttcattgattgatttttgaatattgaaccagccttgcattcccaggataaaccctacttggtaatgacatatttttaatattaatatattgctagatttgatttattaatattttgttgtagattttaattttaaactgatactaattgtacttattcatgtgatactttgtgatatttcaataaatataatgtatagtgatcagatgaggataattagcatatctattatctcacatatttatcatttctttgcattggggaaattcaatatcctctctagctatttaaaactatgtattattgttaactatagtcatcccacagtggtctaaaacactaaaacttatttcccctttctagccatattttcttcatctatgtttgtaattaatattggtctatagttttcttgtgatattttatctgattttggtgtcagtgtgtaatacgttatacaatgaatttaaaagtgttccctcctattttctagaagcatttgtgtagaatttgtattattctctacttatatgtttggtagaattcactagcaaatatatctaatgaatatagatacattcattagacatgtagttttttatcacttttgttgtcaaagttgtcagaagatttttaactacaaatacaatttctttaattgacagagggctattcagattatctatttccttttaggatgagatttggtaattggtgtcttcaaagggatttgacaatgccatttaaatacaatttagggtcctaaagtttgtaatattctttcattatcattttaatatcttaaatatctgtattagcgtcccatctttcattgctgatattgacaacttgtactttcttcttttttttcatattaaatctgactagaagtctatcagttgtattgacttttttttaaagaactagattttggtactactaatgtaaccgcccagcaggttcaccttacctgttgcctagacagagccaatttatcaagatgggcaattgcaatacagaaagagttattcacccagagccagctgtgtgggagactggagttttattattactccaatcagtctctccaagcatttaggaatcagagtgtttaaggacaatttggtgggtagaacccagtgagtcaggagtgctgattggtcaggttggagatgaaataatagggaggtgaagctgtcctcttgcattgagtcagttcctgggtgagggctaccagatgagccagtttatcaatctggatggtgctagctgattcatcaagtgcagggtctgcaaaatatctcaagcattgatcttaggttttacgatagtgatgttatcctgaggagcaattttgggagggtcagaatcttgtgccttccagctacatgactcctaaaccataatttctaatcttgtagctaatatgttagtcctacctacaaaggccatctagtccccaggcaagaaggaggtttgtttcaagaaaggtctgttattgtctttgttttgaagttaaactattaatataaactaagttcctcccaaagttaatttgacctatgcccaggaatgaacaaggacagcctggaggttagaagcaagaaggagttgattaggtcagatctctttcactatctcagttataattttgcaatggcagtttcattaatttttttaattttcttttttattttattcatctctgctttgtctgtcttaatttatttgttcttttggctttgcatttaatttgcttttatttttctactttcttaaggtagaaacctagattcttgatattctttactagtgtaagcattttagtgctataaatttccctctgagccctgctttagctgcatcccatgtattttgttttattcaattaaaatatattttccacattgccttatgacttccttttacctgtgttctttagactttaatttgttaatttcatatacttggcaatattccagatatcttttttgtattcattactagtttaattttgtgtggttaaaaaggaaataaataataaataaaccaatagtaataataataattttgtgttgttagataacacactttgtattatttaaattctgttaaatttattgaggtttgttttattgcccagaatactgtctgttttagtgactgttttgtwtgtatttgaaaataatatgtatttttactgttgtttcatatgaggcttcataatgttaattaggtcaggttggttgatagtgttgttcaggtcttccatatcagtgtctactttattgattagtgagagaggagtgatgaagtctccaactgtaatcatagatttttcccttttttctttcagttttatcattttttgctttatgtattttgaagatctgttgttaagtacatacacatttaggattgttatgtgttcctgataaatgacctcttcatcattatgtaatattcttctttatttctggtaatggtgttgcagaactttgctccttagttcagctaaaaccaggttcttgtcacatgatcaggaaaagttaggcacacagacatattgaagggtaaagggaatgtggaatctattgggcaaaaaggaaaaaagaaaaaaaactctcagaaagcaagaggggttcctgctaacaggcccccatctcacagattgatttcaggccatacacaggaackgaagaggccaggctcctccccacctccacatgacacaagcttcccgtggcttcagccctttctcccagtgtgcaggcaggtcggagattccagggaccctctcccttatctgcctccaacatcaatcaatggcttttgctttaaatgggtgggtcttgctcattgatgagtcctgcctcagctgtaggagacctctgatagtccaggtctaggatcacttactgttcttctgcaggggttgaagtctttcattctttaacattttcctcagatacagtatgcccccagcatgacagtgtatgctacctctttcccagcaatttaaagcttttgttcttttaagggacaagtaattttgaagagctctctgcctttccattagtagcatctgctccctcctgtagaattgagggtagctttccctgtaccctagtcctgcccccactctttctctgtgagcacatagagaggtccttggaaaagagtggctgtgaacccctctgtgtctgcagttccagggattctattttctcatgctagtacatagttggccttcagcaatctattgaaaattttagctgaattcttcacatccaggcatcagaggccccatcttcctcccactggttcagttccctgctgggatcaagaaaagtaataattttacaaattatccagctctttttttttattgcatgagtgatattctctccagctttttatattcaaagaggaagccagaagtcctaataattcattttattacaaaagtatctatttatgaaggataggaaatttaatataaacaaaaactactgattgtttaagaagtgctagtctgtacctttatgaactgatttatattttcattctatgccacatcttggtcttattaggtccttgggtttgttacctggtagtaaggctggctttttgttgttagttctaaatttacatcttttgaaccaaaagttctagtatggcagaatttgctgactattcatgtattcacccttattatccccttttccttttaaaaaattttattgccaggcacagtggctcatgcctgtaatcccaacactttgggaggccaaggcaggcggatcagttgaggccaggagtttgagaacagcctgaccaacatggggaaactctgtctctattaaaaacacagaattagccaggcgtggtgccacacacatgtaatcccagctacttgggaggctgaagcaggagaatcacttgaacccgggaggcagaggttgcagtgagcctagatcacaccgctgtactccagcctgggcaacgagattgagactctgtctcaaaaaaaaaaatgtattaagatgaaattcatattgaacatttagaagtgaacaattcagtgacatttagtacattcgcagggttgtgtgactgccctttctatctagttctaaacatttccattgttccaaagtcaagctcgtaacccacaaagcagtttctcccatttcccactcttccagcccttggggaataacaatctgcattttgtctccatggatttatctatttcttataaatattataaatatgattatgaagtttatatatttcttatagagtcttacaatatgtgactttttgtaaatgacttctttcacttagcataatgttttcaagattatccacatcatagcatgtatcagtatttcattccttttcatgactgaataatactcctttgtatggctatatcacattttgtttatccattcatcctttgatggacgtttgggtgtttccatcttttcactattgtgaatagtgccactatgaacatatttttattgcatctgtttttttaacttttattttagatgtgcaggttttttacataggtaaaccgcgttgttgtggggtttggtgtacagattgttacccaggtaataagcacaataccctatgggtattttttctgatcctcttcctcttcccaccctctaccattaagtaggccccattgttgttcccctcttagtgtttgcgaattctcattgtttagctcgcatttataagtgagaacctgcagtatttggctttctgttcgtgcattagtttgcttagcataatggcctccagctccatccatgttgctgcaaaggacataatctcatttgttttaatggctgcatagtatgctatggtataaatgtaccatatttgctttttccatttaggtcagttccatgtcttttgtttttttgtttgtttgttttgagacagggtctcactctgtcacccaagctgtactgcagtggcgcaatcatggttcactgcagcctcaaacacctgggctcaagctattctcccacctcagcctcctgtgtagctgggactataggtgtgcaccaccatgcctatctattttttaaaaattttttgtagagatagggtcctctgttgcccaggctggcctttaactcttgggttcaagcagtcctcccgccttggcctcccagattgctgggattagatgtgagccactggcctgaacatgtcctgcttgagtacctgttttccattctttagggtatatacctgggagtggaattgccgggtcatgtggtaattctacgtttaatgttttaaggaacctactatctcctttgactataatttttgtcatattgctctttgagtttgtcttcccagagggccctaacttttcattattgaagtaagacaggcaaggaagtcatctttctactagtttcatgtaggaacctttgtagcttctctaaagaggatgatttttttgggtctcctttaagactttcctagcaatttcataaccttcttggatggaagatacaacatggcaaaatgcagttgaggataaagaggttgtttttaacaataagagccctcttgaaaagtcatgagttttgcatgacaagaagtgcttccagttgccagtgggagagtttcctcatcatgcagagtggatgactcactgcccttgactgctcttctgatcccgggggcctctgttctctcacagtagatgcagcacacagagctgccaaggcatttccagcagggggttctgtgctcaggttttgaacaagggcagcatgatggagcctgacttactcatacacttcctgaggttgatgaacacattttcaccccttttagttgtggtaggtaatgtattcataaattcaagcctttttcccagattgtaatggatagtttatatctctctcatgattatttaattattcaagccaggatgactgtgtgttttctatcagagtctgagctgcctcagcaagatgcagactggtatctgcccttaggttaaaaattccggccagacatagtggctcacgcctgtaatcccagcactttgggaggctgaggcgggtggatcacgaggtcaggagttcaagaccagcctggccaagatgatgaaaccctgcctctactaaaaatacaaaagttagccaggtgtggtggtgggcgcctggaatcccagctacttgggaggctgaggcagagaattgcttgaacctgggaggtggaggttgcagtgaatggagatcatgccactgcactccagcctgggtgacagaatgagactctatctaaaaaaaaaaaaaaaattccacaccattcccttcttccaagtatggatggaatttcttccaggatctgccagcttttgtgtgtgtttgtgtgtgttgtgtttgtttgtgtgtgtttgttgaatgtctgtctaccactagaatgcaaggcccaagcagggaaggaccatggctcttctaccctctgcagactctccagggacggcactatgcttgggtgtgtggcctactccctatttgtcatcccagacctatgttttactcttctttcccttgctctgtgtcctggggtgataatgccttcaaccaccaggctccattgccctctggcttctggttgggtttggacaatgagggagaggtagggctacttcccctcccattgccacctgcaactttgtggttctggctgtgtccatccaggactatagcctttcatgccaggctgccctccctgcagctctgggtctccctgcagctctgggtctcaccgtgtgtcttggccacggctatctgctctgggtagctctggtgcttcagtgtccccggggttcctttgatcttgcccacacccctgtaaagaatttgttcttttaaaatcccaggtgaatatgccttctctttcttgccagggtcatgacaatgggctgaatttttgaatagatgagtggatggatgagaagacaaagggccatgtttgtggctcaccccccatatggaaccccgctctggctgccatctcactgggaggccttgccctgtctcatgtccctgctgcctttctcctgcactcccctttctcaatctgtcccaaccatactggctccattgctgtttctagaatgtacaaagcaagctcctgctccaggcctttgctctagccattctctctgcctgcaagtgtcttctctcagatatccacttggctaattaccttttctaggttttgctgaaatcttaccttttctatgagcctcacccaaaccactgtatttaataatggaaactgccctccaccaatatcaccttggcagccaagggcctccttcatcttggtctgtgtttcttttttccagaacacttaccacrttttaagaaactgcatttgacttatatatttattgacataaatattatgcttaatatttatcatctgtctctacctgctagaatttaaactccaaaaggcaggatttcgttaccgtttttttccatgggtatattccagactcccagagcaatgccatcttcacaataagtgcctgtgataggttgaagagtgccttccaccccagaagatatggtcccctggaacctgtgaatgtgggcttatttggggggtggggtggaagagtctttacacatgtaattaagttaagaagtccaaaatgaaatcttcctatattagtgtaagccctcgattctaggaaaagttcttttaatagaagagacagggaaacagacacagagacacaggggagaaggccaggagaagacaggcagagactggagttatgtagccccaagccaagacatgcctgaagccaccagcaactggaagcggcaaggatggattctcccctagagcctttggagrgagtgtggccctgcagacttcttgatttcagaaacctggcctccggaactgggaaggaataaatttgtgctgttttgttttgtttttttgagatagtcttgctctgttgcccaggctggagtgcagcggcatgatcttggctcactgcaacctctgcctccccagttcaagcaattctcctgtctcagcctcctgagtagctgggactacaggcgcatgccaccatgcccggctaatttttgtatttttagtagagacagggttctgccatgttggccaggctggtctcgaactcctgacctcaggtaatccacccacctcagcctcccaaagtgctgggattataggcatgagccaccaggtccagccaagtttgtgctgttttaagccatcaagtttgtggtcatttgttatagcagccccaggaaactattagtatagtgcccaataagcatgtgccgaatgagtccacgcaagccttgttaacactgatatgacctccatttgaaataattcttctgcttttaatagctaccaatgcctgttagtaaatgtgagtacgtctgacatttaagcagtgttccagtttggggtatggtatggtccatttttgcagtagaaacttaaacttcctgaaaattttcacccactatgcttaacagcttaaagtctaacctaacccccaaataattgctttcactgtaaacctatcaayagcgtatggagaatgaactcacaaattattggttcttcaggcagtggatgggaacccctgttggtctttagccatgaaatatccctgtatcatttccccatttttatcctgagtccctcctgctgtatttaagctaattctcagtgattgtgtctttggaggagtccgtcacaagcatctatgtgatcaccctttgtatacctgacaggggttattttttctcccccaggcccagtcctggtgcgtgctgggcttgtgatgcagtgtggtactaactatctgctccttgtaggagacggaaggtaaatcaaattgaaaacacccttcctgtgtagtgcgtcttccaaatgtcctcaggtctctattacatcttctggaggctgccagattctctgcgggacaagaggaagctggagcagcttctctgtagcgacagaaggtgccattagcagaaatacatcatctcccagtggtgctagcaatagcagagtcctgatcatgtccattcttttgccagactgaggagagagtcctcagaggcaggggctgctggtaacagcgcctccatcattctaaaatatcccccctggagtcccagagcagctatttctgcccagacgcaacgagagcttcacagagcttatttcaggcattgatctttcacaaaagcctccctgcttcctagattccaggccttctctagaaggggtgggggaggtagaggcctgcacatggctgatcagttgctctggctggggctggatcacttcttccaggtgttgctcattagatctcttttcaagggaaatctattagcctggagcagtggttctaaaactgcagcttgcagggcttggtaaaacaaatttctgggcctcacccctaaagtttgggatttagtaagtctggggtagggcctgagaatttgcatttctcacaagttcccaggtgatgctgaggctgctgacctagggaccacatttcagaaccagcggcttagatgcagagagacgatgttcttgtgttctctcctacttagtcttggcctcagtcctcctacttaaggcagtctgggccttttgaggttgggccaggccctgtctcaccctgtttctggaatgcagtgaaaacagctcttgattctgtgcagcccatctgtgctagttacctctgtctcccaggagaagagagcaatgaaccttcttcctccatggctctgtttccgctgtctctgttaacactgtttcctcccccttggtcctttagccctcacagcttcccccttttgctggtctctggatgcctcaacatacctgtgtggctcctctgaccctgtcctttaaatagacctttctttttattttattttacttttttgtgaaactttaagttctgggatacatgtgcagaatgtgcatgtttgttacataggtgtaaacgtgccawggtggtttgctgcacccatcaacccatcatctaagttttcaaccagcattcaagaccatttgtgttgaattctggttcctgctggtaccatgtcctgggatatttcttcccttaggggcaaagagttttctagacagactgagtcagaatcacttagtctttatctcaagagcagccttgtcacccacagtagaaggcagaattactgtggagtctaacagaaattagrgaagtaagaaatttataccaaatggaaatatggaagatttatctcacttatttcaagcttggggaaatactagcctttaaatgtctgattactagagcctgggaataaagagggactgcttaacctagggaagtggtctttggtaattgggtctctgatccaattgatcggcgaacaaatctgtcatcatagagtcactggggcagctaccctcggcccaactctgctgtaggtgcctccatgacctgactagatgtagttgtgaatggagctgggattgtggagggacttcatatgtacattacgcatgtgtggaaaggtaaaataaccatcagtcttccaattagaaagccagaaagctacctgggacataatcaatgagggcaggcagattcacattccatttgggtgtgcaagggtatgtgtgtatatacgtgcaaagataaacacccctacacacatcattaaagaaaagaatggaaggaaaatcacccagatgttaatcatgtttttctctggttattgcaattacagatgatttttgtttcctatttttctgtgttttctgtttttattcaatgaaatatttttattcttccaaaaatatgttaagtgtggcataggaaatagagctcagtgccctgccctctgctcagcacctatccaaatcctattaacataccacatagttcaggttctgcctcctccaagaagactttcctgaccagcctcttgctgctaaattttggaaatacttttgctgagtgattgttcctacattgagtatatttgtcttatttcttcaagtgcactgtgacttatgcaaagatactttttctgttttccatttcccacaaggccaaatacagctgaactcattgtagatacttgttctacaatgggcagcgaatttctgaaaggatagaaaagatgtgaaaatgtgaaaaacagaccaaaatgccatttctcctcactcacatgccccacagtcatatctcaacttggttgtagctctccctcgctgagaggtcatgacctccagcttaatgtcagtgctgtagggccttagagcacatctcctggataacagtgtgcctgcgcatgggctgtgtatttctcccctccttccaaagtggtgagcactttgcatcaagcgcaagaaagatgtttgatgaccttaatagcattagtgacaaggcctccatccttgttgggcacttttggtctgctggtaaaagaaatgttcactctatccccaagagaaatcttcttttccaggaatatacagcaaaatcaatcaagtcttccccctattgaaggctagctactccacccatgtgatagatgccatcaattttttcgtcctctggggaaacagagtcattttttccttctttatcttgcatagtcagtgctcccttacaacacagtaattcccatcagrttttgagaactctgtcttctccctttaagcaaccaccctaccagaagccctcttcagttctttctctttttgctttagtgtcaaattttcaaaagacctgtctattcctgtactccccattttgttaccttcaacttattcagcgattcagtgcagtgtgtatcagcgcagaatttggctccactattctaccattagcttaattccctccatgttgctaaatccaatggacctctcagtgcatatcttatttggctttttgctagtactataaacctttgttcacctcttctttttcgaagcacagtctttccttggctttagtgacctatgtggcttttgaccacctccctggccactcttacatcaccatctctgtacaggctcatctacatttacccagctgatcaatgttgaaacaccttgggactcagcccaaggacctctcttcgtctcgggctgtactttctttcttggaggcctcattcacatccaggttttcatgggacagccacagtttgaaagtactcagggatgtgtcctctgaccaccagagaaatatttgcctctgccttcttgacatgtctcagacgcctcaaaggtccctcttgttcttcctgtgcatggccagtcctccttcaaggacctctgagatctcagcaaatggcactgtcacccctacaggtatgcaagtcagaagcttgagttggccgatctgttccacattctacctgccacactgcctcagcatttctcaaagccatccactcttgttctttacttctgtcacccaaattcaaaccatatcatgttcatggctttcatttttaaaattctggactattatagtccccaaactagtcttacttccatcagcttttgaccccttgcagtctactctgcttccttgaacagatctttgcaaaatacagacaaatcaggtcatcctcctgcttcaaaccttgcactggcttagtcttgcttttagggtgacagggtttggctgtggccccacccaaatctcaacttgaattgtatctctcagaattcccacatgttatgggagggacccacggggaggtaattgaatgatggggccccgtctttcccatgctcttctcgtgatagtgaataagcctcatgagatctgatggttttatcaggggtttccacttttgcttcctcctcattttctcttgccgctgccatgtaagaagtgccctttgcctcccaccatgattctgaggcctccccagcmatgtggaactgtaagtcgaattaaatctctttttcttcccagtctcaggtatgtctttatcagcagcatcaaaatggactaatacatagggtaaagagtgtattcactaccatagcctgcaccaccatgcttcacctcatcccactgcctacagcccagctccatcttataccatcagcatccctgtccctaccccctactcatctactttttagtccctctgaagtgtcattctccatccacaacgggcctttgttcattttgtttttttttctctgcatgccacatctgaaatcccttctctcagtaacctaaatcaactttgtccttctcatcctccagttcttarcttgttatcacttcccctgggcagccttcctccaagaccagaccagatcctgctattttatggatcctcaaagcagcctgtacctctccttcctagcccttgtcacctttgtgatttaacatgtctttatgtgttattttgcttctctgcttccttaaataagctcctcaggacagggaccgtatcttttttgctcatcattgatatccttagcacccagcataatgcttggacgaagtccgtactcaatacccatctactgaatggaaaagactttggcagaagaaaatgaagtcaaccacttgctcctcagacctgggtcgagcaagccaccacacctaaatgttcaagttagaatcaagaaagttcatttgaaagtcatgattcaggtttccagcataaattatatgcagttgtgcaaacatgtcaaagtttagtaaattgaatttgtttaatgtaaacaacttttgaccaaaataataacacagctttagaaaaagacattaggcacccacttttgaagagtttgtataatttaacacacaagaaaactttactgtaattatatgcagacgtatacaaaggataaatgttatttacttgctccaccctccataaaataaacctccaaccatgcttcagcttgctgcattaatcctaatttagaaatcacccccgccgaaatgggggtggggggggcgcatggtgggctctcatcttttcttcgcgtcaaaattagccgtttaaattagaaccacgttgggagcgtaggtgacgccaacgttgcggcaccagtccggggagcacttaaaagtagccacctgaagttaattaaaaccttacctgtcaaacccagtatggctacatttgaaaatctttaatgtaattaagagaagcacattatgggaggtcaagtgactttctttttgaattccacttctaatctgtcgtcaaatggatggaaattgccggccgagggagttaatgaaagctgcatgagcgagcaagggagcaggaggaggggctggcagcctggaggagctggcgggagggcggacggggacccctgtctccttctagcggcgaggaatgagcctgggggagccccaccgggcaacttcccttctgccaggaggctctgggtggggggttcattcagcccctctccctgagcacactgggggcatgcaggagcagggtatggggcgtctgcgcagctccctgcttatcgctaagtgagatctgtggccaggacggcggggcctggacagagtggagccggcgccggccctcgtcacccttcactcagagccgcctgattagcatcagggttccgctcgcctcttgcacggatcccccaaagagccggtggggaggggggcgcttccacgcggagcctcagctgtgcagcgcctgaccccaagcccgtcagggggaaggtctcccaggtccgcagccttcagcaccctggatctggggaagccccaagaggccctggtactgccctggattttcttctgggcatgtgggcttctgggccactaaacccatctcctactgcactaggtaggtccggctccggagcccccagtgcaatcttaatgccagaacgctgccttttggagattaaatcacttaatgctttgctgtgtgttctagcctgagggtgctgttgacagaaggcagagtttttctcctctggttgctgcttctctctctcttttttctttttgcattgcgtttgtctgtatcagcagaggtatctgtgtttgaaaaaggattaactccctcagaatgttgccacttaagttttgcccctgccttggaaactgacatgagaataaacaacatattaagtcttcacagaacactggtaccaagaagtttccaaaccagaggacttaacctccttaatccaggccttttccctttgacttcctcctgttagtccgagcatgggcagaaggcatcagtggggagaggagtgtaaatcttctagtttggaaatctcttccatactccatggaaaacattgggtgtctcctgtggggccagtgtggtgagttacttggaacagaatgggcaatcwagtaggcgttgaaatattcagaagcatctcatagtgtcttagaagatccaagacctagcccgatgggtcttctctgttattagaattgtgtggaagggtggcagaygcagttgaggggatgggatgctgagagacaaggcatttattaaaacgacctctagagacttttttttttccactgggcttgaatttcttgggcttggagagttgtcactaccccatatgaaaaatggaagagatgagtgagaggaaagaagatgaggggggaaaaaaccaacctgagagtggtttaaaatcagaacagagtgttggtgagagtcagtttccaagggtcgcctcttcatgctgtattgctttttcttgaccaatgaaaagccccctttttcagatttcsccccatttctcatccatagcagaaagggcagtgcttctagaaattgagatgtgtctccaggtaaaagccacacaaggcagtgggaagggatgtggctgtccccagcctccatttgatgccgcgtttctctcccagccacaagttcacaggtaaaagtgaaaagttgctctggacgtcccttccaaagagagctgtctgctcgccatggcaaccttttcctggggtctctggctgtcaagaacggggtgcaaagttcacagagctcagcattgtgccctcctctcttcttgtcccttttttcctgaagggatcgaggttggtttgcagcacagtttaaagcgaagatgccaaatgaaaagttcctcgttttaagttggtgcttatacaaagctgctttgtggtttttttcggcctgtcagacttgtcaggcctagtaagaaaaagtatattgtttccagcacttggattcctttctccctgacatctgccactctgtaaagatgataaattcctgcctcattagccaagggtgtgggattacaggctgacaacacattaatcaccagcctctgtggcaggctgactagcaataggcattgttaacaaaacttttctaatatgtcactcttctctatgacagcctgtaatcaatcattgtgattgacggcgctgatagattacactatttatactttgtgtaatgaaagatagtgtttccacctactgtcatttctgggctagtggtagaggatcagtaaatggaaacaaacataacaacagggcaagccctcattcaccccaaaatatccatagaactaccccaccttcccaagtcctaggcttggcttccacttttggaagtgaaaaagggcccatcctggaactctggcaatcattctgggatgaggggtagtggtgggggcacctggaaggacagaggtaatttggattttcacagagagagctctttgcaaaggatacgatcccaggtattgataggtcgagtttacataggtaggagagtccccaagcagcccctttccttcccctcatcagcttacgtgtgtgcagctgagcgttgagtgcctcctcccctgccagatgagagatgatttagatgttgataaaatatttgttctttcctggctctgagggcaaatattatctttgtttcccataatcgtaaggcgctgcaaaagtcaacagcacccagagcaagtacaaaaccaacactcggagagaagccctttctggaggcctttgccagggcttgcttgtcccccctgaagctcagaaaatttcaaacaggatacgaatgaatcagctgagctgaaatgtgttctgactctcacatcctcggtatttttggagggtcctttcagtcatttttattttggtctggaaagcattcgtaaaggatacaagctgtttttgctttgctggaagttattatttcaatagagtgacaaggaggctcctgggctagcatcctaagaggggagcatctttcctcgtgttggggccatttccaggcaatttggccacaagtgcctgttttaatgaatcactttaaaaatgattgtggtatttaattttccttactattgattaaacacaagaaaatactcctttattacttctttaaggtggttagggagattgctcataggtatataaatcttcatttgactcttcagtacaagcacagayrtgcgattccctgccttcccattcaatgcatttttgatctttgcgtctctgcattatatgtggattggcgaggccaagagaggagagtagtaaggaagcagagtcgtcgtcctcctcctgaacgctgtggtgttgataggcatcagacactttaggtcaccctgccagttggcaaagcaaaaggaacctgagacctacccctagtgaaattgccttagaggcggatgagatgggaggaggtgcagggagacagggagctaaactttaatctctctgtgaagtttgagtgagcccaggatgattaatgagagagcagaccatctgattaagcccctctgtgtcatagaacatgattagtaggtgacagagatggtaacagtatccagccaaacccttgtttctttcacagctccggctgttatatgattaatgtccccaagggctatcttggggtcaggcaggggaacctgtcagaacaggtggaagtgacaaaatgggcagaaactcctaagggggactggagtggtgagggagaaaatggagggggcagggcagccagatggagccggcgacctttctctgatccaagcaggcacagagatcatcgtgggaatggaaacgaggaagaatcacaaaactgcagatgtttcccaggtcctcaatgcatcaagtactgccagctcagacttgtgggaagcacagtgtgacacggcgcgttatcactcgtggtttatgttctgagatggaatgggatggggccactgcaggccctgtgggtatgaatgtgggatgcccgcacctgtgcctgtgtaagcatgagtgtttgtgcaggtacactaggacaagtgctccactctgctgggggattaagtatgtatcaaacgggtagagctgatatttcaatttactgctttctggggccaacacctatacattgtcttgactgtgctacttagaaaagataatatgggaaaataacatggatttacagaattgaaagttttaattctgtaaatttacagaatcaaaaggtttttagatttaaagtgaactgtagaaatccctaattcagataatccagattacaggtgagaaatctgaggttcagagaaggtaatgacttgcccagtggaagtcaagactagaaccccaggcttcctatttccggtttcatatactaaacccttgatgagtctgttggtaggaagcctcagaccttttcattagatgtgagtttcccagcaagacttgagtctttactctccttatcatattccctctttcccttcctagaagcactttgacctcccggtcaaaggtttaaacctcagttgaaatggagtctcattaagtccttttgggcaagcagccttcccagatgtcaactttgagaggagactatgctctcaaggcagccrttttgattgacaggagtcctgagggtagccatttttacattaaagggaaactggtttgtattgagtttcatctggtgagcctggcttctcttcttccacctttgatgccctatgtgtctgttacatacattcaagagtcattcccgggctctaatggggtctgggagaactttcatctcagccattttccagggctctcttgggtaaccagtttccctttgttattcacgtctatccaataactcttgctcttatgttcacacaataataataataactgggttagaacctgggctgggcagtgaccagccccctacatctgcttgatctctaatgcaggagtttacaaattggaaatctttgctagctaggaaaaagatcaccttgcagtaggattttatccataccaacagtgctcgtgcttcagtgagttgcaactgtggacttaatggcaaagctgcactcagtgttatgatcacgaaggagggagaaggaagaatggagattgtattggattttactaaattgtgtcagtgagggagtaagttgaataagagacccaaccagggcatattcataactctgtctcctgacagtggttgattatgtacaattttgatgttgattatctttaaatagctcttcttgttgtgggacaaactgggagatctacctcacatgagggtaaagtacaaaggatactaaaatcttcccagagtagagtccccatgattctgtagcataggctttgggggatcaattatggataaataaatgttcattagcttcagagctctagtatatgatttttgtcatgggtttcacctcagcatcatacagcctttccaggccaagaagagaatgacctagtgctccaaaaacagtcacttaaagactggctctgtggccttcgagtgagttatataaaatacaaccaagatgagactgagtgctttccatggtcaaagggaatcatctaggaccaaacttttctgtgagctgatagaaaaatttgagcaaactttggcagactgatccaagaagatacttagcctttactgtagtattcaggatattgtcagacattctggtgtagtgtggtggtggtgaagtggtgatatgttttagtacagagttcattggttgctttggaggatcatgaagtgcttgtgcctttcccctattgctatataggctgagatgccaaaaattcaggctttcataacccacaataaaacctcatcttttccaagatgttgacccattccctctgtgcacactgctttatggtagagacttcctggtagagccatgctgttgtggaggtgactcccagctttgcttttagtaggccctaaggatactttggggtgtcaccatgactcactggtaaaatttgggaatcattttatgagagaggccacaagcaaatggtgactaatgatacagtactgaagtttgcgaatgatgtacattcatgtaaattagaccagattcactttggctgccttcctctgtaatttcttgagcagagagagaggagtggagttaattaacttagggagaatcacatctcaccttaagggagcccttgggagtgggttgggctctataaaatcatcctccaagcacttgggcagagacatgtttgagaacttctatattaagatatagtgtgctaatgttattacccaatcagagtgtgtgacaaatagtttaatgaagaacagcaaatgttctgggtagcaggtattcctttacttaaaggcgaagatgagctatatttaaaattcaggaaatgcaaacttaggtccatttgaggctaatacatacacaagattctgccttttcatgacagaggaaaacataagaaaaatgtagagtgcaggagacattcatttatcttggaggagaagaccattctgtggccccatcagcctggactcccaagcccagggtaccaagccctcttaytcccttttgcattaaaaacatcacaatcatatcttttttatcctgttatttatttttgagactctgaaaatggatttcttttgtgggtggttgtttaaagaaaccagcacagaaaaatcagcctgtgcaaatacactttttttttttttttttttttttttgagcagtgattttctttttgtagttcggaacttgaggcgaatgaaggtctccctggtgccctggtagctgcagcccctcttttagcattttttcaaagggcgcaggccaatctgcccataatgagcttggaaagtgaggatgaagttcctgataatatgacacaaatttctttacttttgctccttattttatcttaattagtccctgtagaaaggattgatttttgagaggcttgtagtgaacatctgttggtattcctggggtcattcttagcctgtcctgtgtttgacatttcttgtaaaagaggaggcatttgttcatattgacattagctgcctctgtatctctcggtggtacagatggtctgtgaataaagacatcaagctaataggcaagatgacaagcttcaatggagccaaggctcctcacacttaaatggcagggcagcatagattgcttctgctgctgaggctggggtctgtgggtagcaaagcgtatggaataagttaaaaatgaagagggaacctggaaaatgactagaaatctctccctgaaactgcaggggctttttattactgttttcattattattactggtccatatagtatgtcaagcttccaagatgtccagggtcagggagagaaagtgaaaactgggttttctgcccatcctgtgaccatacatttctgtcaaatgggcatgctaatctcagaagggagctattgttctcactttctggggaagtacattcatgttcctccttccatcagaggacagtcactcttaagtctagaggctgattccccccaaacccatgaaaccatgttttcccaagggacttccaggaaagcagcactctggaacyttgtaattctgtacattcctgaggttctgggctttctccaaaatgcatgtcccagtttggtataataattcgtcatggctttggcatgatgaatctcaatttatgtccatttatattttaatcatgaaccagctattaagacaaagaggtttttcagttgattcttaccaatgtgaaatgccatatcttatgttacctagttcaagtctgaaggggagcctcccagttctggtgttgggtggataagccccccatttgttagggtctttttatcagtttctgttgtattcttgcagcttctatcttcccagatgctggaatcctcatatagagcagccccctttgactcaattacctgtatagcttttcttaccttctcctggactctctttgtatctactatacattctttattttccatttgtacattggtgacatgtctacaggtatgtgttgatttttttttttttttttgagacagagtctcactctgtcacccaggctggagtacagtggcgcaatcttggcttactgtaacctctgcctcccgggttcaagtgattctcccacctcagcctcctgagtagctgggactacaggtttgtgccaccacaccgggataatttttgtattttagcggagacaggattttgccatgttgggcaggctggtctcgaactcctgacctcaggtgatccacctaccttgacctcccaaagtgctgggattacaggcgtgagtcaccatgcctggccaagtatgtgttgatttttaattttcatactgcgccatgyttcatggatggtttgaggtagcttataagaataaaaactataaaacaacaacaaaaataggatcttaccagtatattggaaaatatttaaaaatgggatgatagcataagaaatgctgtttgatgatagaaagaccaaaacagtatgtgctgatcctcttaggttggtgcagattaggattattttgagcttgtacataccaaggacttgaatcaagaccaatagctttatgtgagtgaggtaaaattagctctggaactgggtaggtagataaaaacaatttgtttcttggttgattgttctttttttttttttttttccaaagagacggagtctcgctgtgtcatccaggctggagtgcagtggcgtgatcttggctcactgcaagctctgactcccaggttgacgccattctcctgcctcagtctcccgagtagctgggactacaggtgcccgccaccacgcctggctaatttttgtatttttagtggagatggggtttcaccggattgctttttctttatcttagacattagttgatattgaaatgtttgtatgtgttcctcacaccacccgcacgtaggatctcaatttgccagctctaggaaatgggagagacctatctaataggtatctagtatcttcaagaaggaggaggagctatggaggagaaggtgatagggagagaacaggggtgagtagaaagaaagaggaaggagaggagaaaggagtcctctaattcgcctagataatggtaatattaatgagatactctagttaatgaggcaattgtctggcagagggcgttgttcagtatttccagcccatttctgtgggcttgaggcaccattatgagaagctgaatcagatgtttagaaggaggaaaaattgggcttccaaaaggctgaggccagaaaacagtcaatccacaattgtctgtcatctgtttgatgcagatcagatggggacatggccctgccttggtttctccattgggactgagttctggcttcatatttcaactctcctgacacctgagagggttgtcatgaaatgagaggaaacttctccccttaatgtcattctcccatgccaacttggttttttgcttcttagtcactgtttctgttttccccagtacggtgaattcccccaggatggggaccagatatccagtattagattcagtcctcctccatgtggagtcaacatctttttgtcagactgggagctccctaaagacaggaatcaatgtattttatatcattttaggagcttctcaaagaaagcaattattcctctcctcctttctcctctaaattctatggttcccattggggatcatgcattactttattccacaaacatttataaagacctggtatgtgccaggtactgttctaggcactggagatacagatagactgagttcctgtccgaggagcttgcattttggggtggaagtggtaagagagacagataataagtagataaataaatatgtgtcaagcaggaggtcatgctgtgacatgtaggatgatcagagatggactttcagagaaggtgacatctcatgctaagtgatatacaattatttgggcaggtagatgagagttccaggcagagggaacagcaaatgcatcttctgtcatctctagtatctccaagggagtgtgagagaccaggagcagcatcccaggaggcccagggtcacctgatcaccttaagtctcagaatcagatgctcagacatctgctgcggcagattgtctcctgcttgggctgtgtccagtctcggtgccagcagcccttttaaacccatcggcaccttcaggtgttttccttcccctgcctgtctgtgaggtcttttaagactttggaactgggcaatctaggtacaaatcttgtccctgccacatgatggtcgtgtgacattagggaagtcacttaacttctttgtgtctctgtatatccttatctgtaaaatggagatgataattgtctctagttctctctagagattaaatgagttcatatatgaaaatgcttagaataaacctgcatataataaatgctatacaaatgttagccactattattgttgctgttgctgttaacttgttttagcaaatgaagcatctctcttacaatgcaaagccggcctctttcccagttcatcctcctacttacctacaaaatgagggatggagatgaacatgaacatgaactctaaggatttttttgttaggcttgcctttctgggttctactctaagccacattcagctcaccccaactctaaggctgcaaagctgattcggcatttagtagaccattttcctgctcatggtccatggagattagccttttctctttagctctaagttccttcagggcagggatgaaggttccacctctgttatgtctcctggatcatctaggatgatccgaaggattcccagatctgggcattttattctgtgcttattagggatttcagaaaaatgtgctctcctcatgtttggcatgcaatcttttcaacagtacaactcttcattctccatgctatcctctggtggaggcagcatagggcgctggctaacagacctcagacttgggatccacgtggtttgggattgaattctactgggtcagtgactttggggatattaatgatccctccttattaagaaggttaacaaggcaaggcacagtggctcatacctataatcctagtactttgggaggccaaggcagtcagattgagcccaggagtttgagaccaccctgggtaatatgactaaactttatttctaccaaaaaaaaaaaaaaaaattagccaggtatggcggctcacacctgcggtcccagctacttgggagactaaggtgggaggatcacctgagcctgggaggtcgaggctgcagtgagctgtgattgtgccactgcactccagcctgggcaacacagtgagaccgtgtctcagaacacaaaaacaaaaacraaacaagtcaatatatgtaaaacacagaaaggtgctgatgagtggtctacaaatggaaaccattgatactgttattgttgttagtgttcttccagtgtgctttatacataaaaggttctaaactgtaggttaggatagtccttctctgaatatatataatctgtgaaggaattctttcactcagaggtggatgtgaggcagcattctgcagcatctcakaaactggtgctcattaaggcacaggatcctggctgaggccagtggcaaagcttgcttaaagatactttgtcatctttccgtgtatctcaaactctgtgccatgttaggggatgcggcaaatatttgcagaatgaattaataactggttgaaggrtggatgggtgaaagatgagcctcttctgtcttattattactattaccaaagaggcaacagtgctttagcttgttccttcccctcccygatcttttcyctcccactccaccttttgaaacttttgttaatcttgctttcttctaccttgtctcatttccgccttgctttcctctctcctctgccacctctcccatcgtctctaggcccaaccatgactctctgtgtctactatttgtcgcttctgccatcggtatcaagtactaagtatccctcaaatccagagtattcacagtgcagtgacccagatgaaagggggttgggattttgctttcttcccttggtaactatttctcaggatgacccagaattcatttgcttaggtaacaagacaacgaggtccccctccttcactttgacaccatctgtgtcagtgttttgataacagtccttgccaagtgtatcatggctgaaattgatgctaccaggacacaggaaactcacaccttttctcaggctgcctttctttcctctacacttactgctgtttaaatgtcaccactcttgaacaaacagtggagtaatgtgtcagggacagctaatgctatattttggtatgttcttatcaaatcaaaatgcctctggcaagctatttgcctttgataaaaagaatcctggtcttcctggcagaactcaatagtaattgaaccaggccacacccttaggacttaggcccctgtgggtgtcctgaatccagccccttggccacacagtagggtttgggtcaatgcccttagcattaacaaggctcagtagtctgaattcttttcagatattgactgctccccacgtctctgagaaggactcgcttttggggcctcagtttcaccatttggacagtgaacttccatgctttgccagccgattccttaaataatctcaccaaccatctgcagataattgctttgtgggtagcttatgaacagcagctgggagctgcccagtccccatcatttttgtctcaaaagcagggtttgggggccatactgtcagtagagaaatgtgtgctataatcattattacttatgacatttctacttaactaagaaggcatttccaggaaatatcttttaaatcagtaactttaagaagctgacgctcaaaggggatttagaatctggattatttttctgattcaaattatcttttcttttggcctttgaagaagcaaatagatatttatttctcttgttccctcctctgcaaatgcttaattgattttattcctgtcagctgactgcaatagaaatcgctgtttccacttcttcctgttaacaccttttctgcaggggtggagggctagggggaagctgggacaggtgaatgtcttcttgcgttcggctgtgttgtgcatggagaagatttggagaattttcattcttccaaaattatccacaacactttgaaatgaggtgacctcctgttcggcaaaatgttgatatgatagtatttatgaggacagtttgctatgtttacagaatgtatatttggaagttgcatgtactaattggattttgaatatttttgtttctcattgtatcacacctgaaatgatgaaaggtcatttaataaaaaaaattgaaccattgatgcctgagtggctgcccagagtaaaattgcctaccatctgtcaaggcaggaaaccagagtacagtgaaggtagggggagaggctcccaaaaggtggggtctgtcacctagaggaggagggcgtgatggctggaaggggtagtctgggtttctggtgactgtgtcccacatcaggactgcatgcagctggagggacagagcttcaagcaagccatcccaagatgactgtctcgacctcctcagtttctgtgaagaggacatcactgtctactcacagagcataaacccagaatgttttgtctgtcctactcctgtagacaattcctcccctcaccagtggtgaaagagccaatacaaagtcctgactatatgttctgacttttcctagggggcttaaggaaaggcaggggagtaataagcctctgctttgagaagccacctccttttcccctttgttcttggatagctatggaatgcaattatgtgcatttaggacctttcattgggctttgacattcaaaccacacacatgcccttgcaggttgaagagagaggggatatcctgactaacacattcccggactgcctcagagatggagcttcatgagaaaagcctgctctaggacttgtgtggcctcgagagcattgaggttgttcatgatggagctggcttttccagttgcctctgaacctaggatctgctttctctctccttcccacatcatagattgaatactactctaatgtaatgactttggctttttgtttgtttgtttttattcacaattgcagatagygcataggcattctgcatatatcaatcttagggttctgtttgttttttcatgaaaacattgctttgttcagtgccctgtggtataacctgtggctgcaggaattatagaactgctggtaggattctttcagatagcaaggagaatattgcaatgaaatatagagaagaaagagtccgctcctgctggggtctttcatccagccaattgtttcccctctctccactgcctttctcctctctacatctgggcttctgtttctttttgtgtttctccacttctgtacccacactatcctttttccatcttgcaatacattttgttctttttgttgctccatgtaaggggcctcatggattgctgaccagcctattgcaggggttgcatttagctcaggctttcctctgagccatttagctgtgggcagaattgtggagttgcatgttaaaaaccacaagagagctgtggttatgacaggctctctgcatggaataagaaaagaacaatcttgggcaaaaggctctcagcattcttcctgatagcactgccaaccaaaaaccaccctaagcagattgtgctgaaggttggccacttctcagtccagatacctggctgaatgtttccctgaaattgagcctggggagcagattttgacttttcaggctacttgctcataaagccaaccatgtggatacaaaattgctcacataggaaatgccaagtggatgttcactgttgcagccattatgagcgctgacattgttgaggggacatcaggatcctgtatgcctgcctagccactgtggcttgtgcaagtagaaataaggtcattttttaattcatagcagagttgmcagatgatcttaatwagtatgttgtctcattatttaaataccatctcaaaaaatgcatatatgtgcgcaaatatttatacacatgcatgcatgcatacatgcacacacacattcatagtagaagcactcttaaccaacttgcatttcagcaacttggcgtattcacccacgccagccatcttcctgcgaaatatactggctgcagcacatcaccytacagatgcatggcagggcacttctgttcccaccaggtgaactgtatgtttaccaagtcagctgagcctgttcccaaacctacttatgttagttgtgtttatattgtaataatgtggtttaattaaatgttataaaaccaatgaaatgaaagagtgcagagttttttttttttcatgaaaactaaggtgaatgtttggcaagactcagtgtgttttagttttttgaatacactcaaccaagtgtagataaggcagttgtaaaagcttgggaggaaaaaaaaaatcataaaattctagaagaagtctgcactcagattgccttagragacttttaaagttctagttcctctttaaagaaaacaaaacaggaaattttagagctacatagtaagaatggtttgtacaaagtagtccatgctaagctttagtcaacagatccatatgcaaaagaaaagacctaagcctatatggaaagagcagcaaattaatttgattcacatgatttaaatcaaaatgtttacatatgaatgtagcattttaaccaacttaaaaaaaaacaacaacaacaaactagccaactactggttcagatcacagtgtataaagtgcttctgctcactaatacttgcccataaaatcaaagtctggtagttttgtttagaggtgaaaggagagaattggcaaagaaattaattctccaataacttgcctggattccatttttcttttgccatggaattcaggttctagatggtaacaggaaaagcaggcatttccaggtcgggaaaagcgggttctagatggcaacaggagaagcagaaggtgtgtgtgtggaggaaaatgagggttttcagaccctgggacagctcccaagtccgccgcagtgttcctgctggatgcaagccatgggggcagcacagatgggaaaccctgagttggtgtggatgggaacaatgaagagcaggaggctgaagttctgtcaatgcttttcaggtcaagagtgggaggtggctcaggaatgtggcccctgaygtcagcccgtgcaactcttgtcaacaaagagagctcccagttggagaaattaaaagcaaactttgactgggaatgtgtgggaagtggtagctcastgagtgaggccagatgccacatcagctcaaagtaaagccatgcacttggctttactgatggagatgatggatgtttatgatccccagtgtgaaaaatccttgcaatgagatccatccctgaactcctcttctcccatctgtgaagatgcccaaagactctagactggccttggagcagtccctgggcatagcatgccctagagtacaaggcgagggacctttttggttgacacaattccccactgtctagcccagagctcatcagggaggcaatcattaaagacgtgaaagcgttgagcaggatgtattctatctaaggcaaattcatgtgctagaggacctcctggctgtgttccaaggagcgtctaccttattctaacaattgtgagggatactcagtggagtccaattggagacttatctatcctaagtaaaataaaccctctgttgcacatatgaaagtgataaataatttaaatacaattttaaaatattggtgcttctcagcatctcccactcctcatggttctctctttgacacctccagagtcccctagaaagggtgactttattctcaagcatcattccagtgtgcttcctaaccaataccagcagtgccagggccatccaattgacaagtgaaccctgggctgctggcccacccattattgtcactcatctgtgggctgatacccccttcactttgctcaagctcccagcttggccattggtgctcctccatcctgcagtcctaccccttagcctgccacagcccttgacttttcaggcccaccttcagccaggcctcactctcctacttctggccaggctgttgcccaaattgccatctccagtgggtagaagactatttatagctcccactgcaaattggttcggagactgaacgctggtctcctgaaatagacctttagtgtggacagagctcatggcaaaccttcttgggcgtagggtactcagctctgtccccctctccctagaggatgtgcacatggctaatgctacaggagtgggggtgggttctaagaaatacccagaaccactgttcactcctaccctcaggtccttttgctaaaccaggcttgtttgtggatcttccttccctaggagtgggcctcttctcagtgtggggttccacagttctgctctttaccagtggggttctgtttctcacctttccccagcacccacacttgtatatacctacacacacaccccttccactgccatgccttccaatggtctgggaagtgttttagtgggaaatagtctaaagtagaagttcatagcaaggggtcttcaaccagactactgggattcaattcctagctcttctactctctggctttgctaccctgggtaaattacttaacctctctgatttcagtttcttcatatgtaaaatggggtaataaccatatttactttataaaggctattataaagaataaatgaggttttcttttgtattttgaggagtacctggcatgtagtaagcccttaataaatattaactattaatataatatctgaacaccagtcactgtggctgctcaaagttttttttttttttggacacttcttgactactgtgaatcagtagatacaaaagatactgggtgcaggacgagttcccagcttcatacccaatctccacttagactcatccagaatattttcttacacctctagccgtaaatattcaaaaattgctacatatgttgctagcccatcaagttattagtaaggaaccccatttgggtaggctactagtgtggaacctcacctctgttactctcagttactctttgtgtttaaaatgtcttagaattctttgtatctttaaattttaattagggattgataacaggttctgataacttgtaaatggagactgatcatttgttagcctgtgttttgatacgtagactttaaaaaaaagaaaaacttcttcggtcagaagctgttgttctgtgaaactagaccagactgtgttttggcttgtgtgagaagggaaagcatattgtttgtaggtgaacagtttgcacgactattgtgataatctatcctgtctccctgccttctgtgtctacccagcttagcctatctttttttttatgagacgaagtttcactcttgttacccaggctggagtgcaaaggtgcgatctcagctcactgcaacctctgcctcctgggtttaagcgattctcctgcctcggccttccaagtagctgggattacaggtgcccaccaccatgcccagctaatgttttgtatttttttagtagagacggggtttcaccatgttggccaggcttgtcttaaactcttgacctcaggtgatccactcgcctcggcctcccaaagtgctggaattacaggtgtgagccaccatgcctggccccacctagcctattgtatacaatgcaagtggagtaatcttccaagggcatgattttgattatgtattttttcattccggaaagcagcgagggccacccygttgcctaccaaaaatgcacatttatggtccatggcaacctgttgcaccttartgggtgagagagctgctctttccactgcccccttcaccatcttggtgcttccgccgaattggctgactcctgcttgtcacaaatgctttttgccttcttctgtctctgcctttttagttcccacccacccactttcctattgtatccttgtctggaacagcataccacattcctgtgcattgttcaggactcaatgtaaagccacttctcccaggaatctttccctaattcctctcagccaaacagaatcacccctgaggtgccatagcccttcatcccccatcacgtgggtatcatataccatttctagtgtgaggtataaggatattttcaatggacatttttatgtttgaatcttgtatatacctgcaatkatcactttaggaaatagtcttagaaatatttaagatctttgatgcatattgcaaaattgccttttaggcaatattattccatttattctctactgtctgtgtattggggcccattttcccatattctctataaccctgggtattattttcttgccaccttttgctattttgatgktttttttttttaaagaaaaacctttgttttaattcatattgcattgctctaatttctagtgagactgaacatttcaaaaatgtgcttattagccatgcacattctctctgaattgtccgttgacagggcacttgacactttatatcatagtagttttgtgaacttgtcagctaccaaggatctatacgacaaacagctatactgtcagcccagctactgtgcttagaacatgataggtatgtactaaacatttgttgaaaggttgagtgaatgaatatatatggctgatgatggttaatgttccttaagcatttaaaaatgtgtagactctaatttacctccagtacaacaattcaagatgcaaatcttgaatgcaccattcagtgtgatcatgacagtgcctttcacttagtaagtcttccacttgtgaggttggttaagaggagygtgaggttagatttgcaaacataaaaacctctggggtagggaggtcttttggtcactctctatgatcctggaacatcacgtgctctttatttatacttctggacttcaccaaaatagaggtggtgattttggagcccaagaagcaggaaggcagggtgagagcagacctgtgcttgagagatgtctgcttttcagaggagatggtgtagtgacaacttcagggactgatgcctggctattaggatcgagtcttcttagatgtcagctcatttccttgtagaaaatgaaatctaatgaaagctggtttatctggtattccatcaagcagaacattttttattacatcatattcatacgaatgaccctaaggcacagcaagatgatgttcagggtcacattggagttaaaggtcttataaattatattgtcattcttttgaaaattggtgattgtggcagatgtggtaattttccattcaccagaatgcctgagttaccaaaagcaaagatttctgcagactgggaaagttttgtgggagcgtgtatgtttacatgtgtaggtgagcgcatgagtacgagtatcggagtacgagtatcggaggaacaatgagctggagtccactagagagtgaaacttacagagtcttgaccattcatcattctgattctcagatttcaccagctgacaagcaccttcttttttggcggggggggtcagagtttcgctctgttgaccaggttggagtgcagtggcactatcttggctcactgcaagctccgcctcccaggttcacgccattctcccgcctcagcctcctgagtagctgggactacaggcatccaccaccacgcccggcttttttttttttttttttttttttttttgtatttttagtagagacagggtttcaccgtgttagccaggatggtctcaatctcctgacctcgtgatccgcccgcctcagcctcccaaagtgctgggattacaagcgtgagccactgagcccggccaacaagcaccttctaagggtgacttcactttggaattgtttggttgaagcaagggaagtaaggaaaccaaaacctcttcaacgctatgctaagtgttacttaatctcatttcataaaggaaatatgaggctggattatatttatttcgtgtgtgtgtgtgtgtgtaaattttcttaagaaagcagtaagtggttttttccttgtatgcaggtagcacctgccaacctgacctgttgacagataattgcttgacagcctggcctttgatgttaagcgtcacttaggcagaaagaaagtttccctgcacctccctaccagtcctgggtggtcttgtctgctttccttccccagaaccttgcccaggaaacccatgaattcaggcccccgggtgcaggtagggtcagcaaacgccagaccactccccaatgtgtggagagcgaggaggggcctgcaaactctgcttaaaacaaacaagtgctaaattaaaaagaatgttaaatacagatcagctgcctggctcctgacagcagatttaattcttccctcctctcacctgatggagcttcgcctgcagggtttgcatcaattactcgacgacatgtggaaaatgattgatgagctgcctgcggcactgaagtacactttgtcaaccgctcatcatttatacatcttatctctgccagaacaaaagataggacaacctcacactgaagttggggatgggaaggggggagatgaggatgggggtgagggaggcaagtcaggcaaagttgttgggtgcccacagggacgagcttgggtggtgaggcccctgctgttgcctcagaactgtctggtcagtcagctctgccacaggccctggctttgccaaagctctttgactgtcctcacctcccccacccccaacaaagtccaggaacagagaactgcatgctgttttaattacagcatcatctcagagagctttcgaggcactgcagccactctgcagctgaccctttgctttaatcaaccactcctaaggcagggtttgtaaccatccctgacaaagatgaatcacggcccgtggatccagtttctgagagaatttcggggggagctgcccaggcagcagcggctgttggggccagcttttgggaaattggggcatctgatgatggtgagacttggcggtgatattcatggttttatttcaagccatgttcccaaggccggaatgagacccaaatgtttttgttcagattgagatggaaggttggtggtgatgctgactccttgtttgttccccagctgtggccttaggactaagacccctcctaacatgggaacaaaaaatatcacctcgcatatggctgtcttctctttcctggggacactattatagccacaaatccaggtgatgacctaacaatcatttctaggcaataactgctgaaaatagctattttattatgagctgatctctattaattcactctctattaaaggcatcccatttattgatttttttttctttgaaagaaagggtactgacaaatataaagtcaagtgacctagttatataatttgagtgattgacccaacagattccttagtaattggtcagggggtggaaaggaattaagttagaaaacttcaaccttataatataataggatttccctccaataaaatttgatacattacttacaaattgctaaataataaataagaatgaaaaatgaacatacctactgaatgaattataaaagcaagtaatacaactatgaggcaaaatcatgccagaaaagaaatagctccacataagagaattatgaaatggaaaaaggactcaatacccaggagaatatttctgcggcctttgaaaatttaaaaacagtattttgaactcttccaccagtttagttggtattgttagaggaaaggttttacctatgctcaagaatttgtagatgagataacagtgacaggtaaataatcatcatgatatcaaatgtttttataaaaatttcatggagcatgaattatactatacagaaggaccctcttggaccagaagagaagggcagccactgaggatctcataatgcccacaaatgtgctagcgttggcagatcatccatagtgcgtctctgttctgaatgaaagaaagcccttgcaggcttgatgaactgcaaagggacagcaccaaatggaggcatgtggtccctttaaggtggaccttaagatttgatttcagatttaagtggtagtcctatgcaccacaatgaatggagttttacattttttgtgcttttgataacccttcaaggcttctatcttgggaaatggtcacctatttggtattcattttgaaaggtttgaaagctatttgtattattttcctaaaactgctgtaacaaagcacaaccaactaggtggtttaaacagcagaaatgtattgtcttacatttctggaggccagaagtctaaaatcaatgtgtctgcaagggttggttccttctgagcgctgtgagggagaatctattccattcctgtctcctagctcctgacagcctcaggtgctccttgacttgtagatggcatttttactctgtcttcaccttgtcttccctctatggatgtctgtccttgtgttcaaattttctttcttttttttttttttaaggacatcagtctcattggatttgggcccatcctaatgaccttatgttaaattgatcatctgcaaaggccctatttccaaataaggttacactcacacttacctggggttaggacttcaacatctttttgggagaacacaattcaacccataattgtattacccaagaactttaattcgagagattctaccttcagtgctttatcttgtagtttaaggcatagattgttatcttgaagcaggagtcgtgtcatgtctgatctaagagtgggcatatagtaactacttgataaatatttgttaaattaatgaatggatgagactttaatcttgaacttccttggaaaaggcatttttatatgacatttgtaccaggaaaatttactaatttacaatttatgaagtcaatgaactccagagggacacaaaagttttagcaaaaaaggctttctttcaaaaataatatgaagctcagagtgtggccatttatagggaatcttctttttgtgaatggcactttagagagaagaattccctagataattctgtttttgcagaagtcagtgccttgtgctggatttattttcttgccaatacattgtcacttggggaaaaaattccccatggaaactttatattataagtttgttaaaactggctcaatattgtttatattatctggttcacatgctgatatataagggagattcaatattatgagtaaactattacctaatatgtgcaaatgattgagtcttgagttagtaaggaggaaggttttgtgtcttccagaaacatatttacatacaagtgaacttttaaacatattaaaaaaaaagcagcaaaaatgactatatttgataaaaacttgtccaaaaaatgtagatatagcaagtttagagattaagatgtttatttgtataaaatagatgagcactttttgttcttaaactttctatatttatattttacataagtttttaaaatccgatacagtcaatatttgtttattaaaattatatgatggaccatataatataccaggctgaggaggaccaagcgtatcaataccccaaggaagcacgtccatgtgggtaatgttaaggatacctatatgtcaggccctaaccaaaggaggtttgtggaacttggagagatccaggaggtaacaccaaaaagctgcatttagcaatgcctgcctagccctcctgtacagctcatgttattttgttgccttaggccaccttacaccaaaccattcctatctccatgcttttgtttatgctgttgcctccttttagaagggccacgctccaccgctctgctgtgttgatactaccgacccttcctttagttcctgttcaattcccaagccttctgccaagccttcttggacattcccatcccatgctgactattccttaagctaaaacccttagagttaatatgatacacttggctacctcattgtttcatatcagtcattcctgtctctagctataatcggctcagccaaggaagatatatttatatggacaatgtctttgtgccttggctgtaaacagtgttgaataattaatctcacttgatgaggtcttacttaatgatagcctccaattattcaccaagacgaggggcaacgatgcttgtccattgtctgtgcaggctagactggaggaaagggccttggggaggaacttaaggtagatggaatttgctgatggaaatgttatttacttgatcaaattttccactggcattggtacatacttccctaaagagggttaaaaataagaaaggccctcctgggagtcaggagaagtgatgagatgtgctgtagctaggcccttcctttgtgaaatggagtttatgctatagccagatgtcacaatgctcaacaaatgactgaagtccatcgtaaacaacaccaaaaacaacgaaatgcatttattttaaaactactattttgaaaaaacacagtccctatggcaaaaaaaaamaaaacaaacaaaaaaccctaaactttgacttggggtgacaatgtgtcggaatcctggcaaggctgaatgtccctttaagagacttgatcagagagggatccatcaacatcccaggggttggctggggggactgtgattctaaaattaggaacagaaggaagaactgaggagcggtgagaactaaattaggagaatgttttaggaagattataatttcagggaggatagctcataggagttgtgtattgcccttttgcaactgtagacattttttaccttataattccctgtttaaacctggacaactttaattggggattaaaaaattatggctgaaacacagagccatgttctaatgatgaagggctgcaatttacagaccaattaggatggcatttgttttcattctgcagcaactttttccccccagtgtacccctcaataacagcaaaacagattcctgggtccaaaagtggttttccggagctgacagctgccatatgcctttggctgacaggtgggggacaggttctggacagcttccagagaaccactccttgaattttgcccattttgtagagccactctctctgcaaaacaatgccatttaacttcaagctctgacaccttgcctatttctacttcactataaataaacctactccccccatttgcttgcctcccccaggtcaggcattcctcaattatagtcttaaacctggccaagcgagaacaaatggtgaccttaagttatatcttaaagtcctgcctcatattgggacgcagagtaagtttttttggcattctctttgacaggctgcttgtagatagaacagttttccataaggaattgaaatcatacatcaaatgtattgttttatatgtaagccactggagaccaatgaaagcagttggtagagcccaaataccattacaaatagatttattgtagtgtgttttctcccacctttttctagaagttattactttaatcttaagaatttatgtaagtatgcttgtggcttttatatggtttatgcattcactttggagacttttagctatttagtggcgaggtgtttaaaacaagtgttatcaaggaaataattttggctttacatcattttttttatatttgcctctgaatgctacatatagaatagccaatcggcaatataaaagagttactgtggatgtcatggaaacttatctttccagtgccctttagtttggtgtgttcatctgcacctccaaaaagcaagcggagataaacatgctgtattcctttgctgccaaattagaaaaagctctgtgccttccttcctgaaccgtttcaaagacagacagagaacattagacttcacagcaattaaactcactgtagtgtacatttactaaaaggactggaaatctttttttcagccagccccacagtaacagagctgttagaaaatttaaaaagaaaaatcctgaatgatgctgttagtagataaattaagtgatcttgcaagacccttctcatttattatattaatacttcaactacatcatatttagttaaaaattttttgcatattatcctacaatttaacctgtttagtaatttttttttcacaaaccccttttaatttaccaccttcctctacacacgcacagacgcacatgcttacttactctggtttcaaatattatgcataaactgatgttttgatttggtagccataatttctaagtctgttgatagaaacttgtcaatcatttccaaggcaatatgttgccatctaactgttttgatatatgtgaagctcttgtggtttgtctagttcttataaaaatactgcgtatcccctttgatccttcgtgtactttcaaaacttgatactggtggggaacttgactcttcagtttcttttgaacttgttttagaattatgacagtgtttttctagtacagaaaagtagacacacctaggggacccaaagagacctgactgttatgtcaaactaagagtgcacgtgttattcttctgacagttattgagattaaaaagcaggttagcagttttcttagaccatatcaggccctgaagaggagacagtggcttttaaatctctctgtggagcatgtttaggagggacagtgcctctctggggatggaggtgccttccagttcaaatactgtttggaaagtggggtgactgaaatcaattttctgaccctgtttgtgtcatcttccagaacacaaaggactcttttcatagacttttaagtttaagctctgttccaatctgagccagtctccaccctttggaaaccagaatatgccaccccaaaatatgtctctctagcgtaaggattattttgagctgattatttggaggtctacagccataggagaagcgccgacaacagaataaaagttaccctgttaaaagggaaatttacatctctcaagggaatttccattcatgaaggtggcttctgtctgtaccaagaaaagaaggctgactgcakcaccagagactcctttcactggagaaggtgccagctgaaatctgcagaacaaaatctgaaatctgaaatctgtttttgtggaccatacttcacctgaatacctacccagtatatgtctccctccactcccacccaacatccttctttctctgtttcatttcaagatggtatttaagcctgaactcaagccacctttttaagatttgctcactttttttctgggtatctcccttgtataaatgagttatcactggagctcagaaaacagtaccccaaaggatggcactttggcagcatgggaactttgaaatgaagcaaatgaaaagatcttagaagcagcttcagaaccaaagactttctcaccttctgtttctctccccaagtacagggtggaactctctctctctctctgaagttctctcatttgaagcttctcgagaagaatgaacacaattgccttcaatctcctccctgaaatttcattagccagaaaagattaaactcatattgcaggaaggaagactaaggaatgccaccacacctagacagactttgtcacaagctgtttgctgttctttggtcccattcagtttccaaaaagaattatttagaaactattgcctatttacaaattattctttgrgtccaaccaactctcctaaaaatcatactcttttcaaaattgcctacattcccccatctccctctcccctaagaagagggcagtatttaagcttgaaccatctggtccttctttgagtcttgtattttgtatggctcccatgcacaccagcacattattaaatgtgtataccttttctgctaatctattatcagtttctttcmgcaggctcaaactttcagaagaggagggaaaaattctctttgctcytatatcacacatgttaataagcttctatttgttcttctctgttaatctgtcttttgttatgggggtccattccaactaagaacatgaagggtggagagaaaatgatttttcctctcctataaccctttttggcagcaatggattactaaaagattattttcaaagcacagttttaattaatactttgaaatacacctggtaatacatactagtagctggcgcagtgcccttcagttgagaacctcttttaatgtctagttaaagatcatgtgtaattaacatactgattgttatagaacaaatgaatttagatatgtatgtcaagtttgtacacctaagtaggttaagtactcccacctgatgtgtctcatgctattaatttgctgagtaaacactatttttatagttgaaagatcagttccattccagccattccaaattagttttgttcaaactaatgagaccttattaaattcgaaaggtgatctagattggggattatagtcttgtcacaaatctctctgaaattggacgtatatccagctttcaagccccttggtccatcagccccaaagcgtaattccttctaaggtttgcaaaccatagagttttacctgtacctttggtttttgctttttatcatcaacttgacttcaacataactgtcctcctagttattttctgtctcgttttaattgttttgtgcagaactttagtttctttgtcttttctaacttccactggatatcctgtttgaatcgtggatgcatttacatgttgcccccttacctagattctactcttgactcataatactgccccacttgggctagttttgggagaagcccttatctcaacttttcaccttgtctctatccatagcttctctgtggtcctaggctgcaagaaattttctacctcaaggtcaatactggaagacatctttttctgctttaagatttggctatcccctaatgtagatgatttttttctttcaatggatttcaggtgcatggaattgaattaatcataattcttggtttatgacacactatcaattggtttatgygtaacatttataattatatgtgtgcatttacatagtcttaaaaatgcaatgaatgaaccaacccaagaattagaatatagataataacttatgtttttctgtgtggtcctcttcagtgtaatcattatcttgaattttgtgtgtaatatgccatttcatttttaaaatatttaactacaaatacatttatgtacctaaataatatattgcttagtttggggctgtttaaaactttggtaaaaacaaagcttgtcacgcttgattttttttttctgggatttacttttttcactcaacattgtgttactaaacttcatctgtgttgatgctatagcagctgtttctgcattttcaatgctgtataatattccatcatattcaagtgcaacagtttattctccagaagatggtcattatgttattatctttattattattattattattatactttaagttttagggtacatgtgcacaatgtgcaggtttgttacatatgtatacatgtgccatgttggtgtgctgcacccattaactcgtcatttagcattagatatatctcctaatgctatccttcccccctccccctacccaacaacagtccccagtgtgtgatgttccccttcctgtgtccatgtgttctcattgttcaattcccacctatgagtgagaacatgcggtgtttggttttttgtccttgcgatagtttactgagaatgatggtttccagtttcatccatgtccctacaaaggacatgaacgcatcattttttatggctgcatagtattccatggtgtatatgtgccacattttcttaatccagtctatcgttattggacatttaggttggttccaagtctttgctattgtgaatagtgccactgtaaacatacgtgtgcatgtgtctttatagcagcatgatttattatcctttgggtatatacctagtaatrggatggctgggtcaaatggcatttctagttctagatccctgagaaatcgccacactgacttccacaagggttgaactagtttacagtcccaccaacagtgtaaaagtgttcctatttctccacattctctccagcacctgttgtttcctgactttttaatgattgccattctaactggtgtgagatgatatctcattgtggttttgatttgcatttctctgatggccagtgatgatgagcattttttcatgtgttttttggctgcataaatgtcttcttttgagaagtgtctgttcatatcctttgcccactttttgatggggttgtttgtttttttcttgtaaatttgtttgagttcattgtagattctggatattagccctttgtcagatgagtaggttgcaaaaattttctcccattctgtaggttgcctgttcactctgatggtagtttgttttgctgtgcagaagctgttgagtttaattagatcccatttgtcaattttggcttttgttgccattgcttttggkgttttaaacatgaagtccttgcccatgcctatgtcctgaatggtattgcctaggttttcttctagagtttttatggttttagktctaacatttaagtctttaatccatcttgaattaatttttgtataagttgtaaggaagggatccagtttcagcttctacatatggctagccagttttcccagcaccatttattaaatagggaatcctttccccattgcttgtttttgtcaggtttgttaaagatcagatagttgtagacatgcggcattatttctgagggctgtgttctgttctrttggtctatatctctgttttggtaccagtaccatgctgttttggttactgtagccttgtagtatagtttgaagttaggtagtgtgatgcctccagctttgttcttttggcttaggattgacttggcgatgcgggctcttttttggttccatatgaactttaaagtagttttttccaattctgtgaagaaagccattggtagcttgatggagatggcattgaatctataaattaccttgggcagtatggccattttcatgatattgatttttcctatccatgagcttggaatgttcttccatttgtttgtatcctcttttatttccttgagcagtggtttgtagttctccttgaagaggtccttcacatcccttgtaagttggattcctaggtattttattctctttgaaacaattgtgaatgggagttcactcatgatttggctctctgtttgtctgttattggtgtataagaatgcttgtgatttttgtacattgattttgtatcctgagactttgctgaagttgtttatcagcttgaggagattttgggctgagacagtggggttttctagatacacaatcatgtcatctgcaaagagggacaatttgacttcctcttttcctaattgaataccctttatttccttctcctgcctgattgccctggccagaacttccaacactatgttgaataggagtggtgagagagggcatccctgtcttgtgccygttttcaaagggaatgcttccagtttttgcccattcagtatgatattggctgtgggtttgtcayagatagctcttattattttgagatacgtcccatcaatacctaatttatygagagtttttagcatgaagtgttgttgaattttgtcaaaggcctcttctgcatctattgagataatcctgtggtttttgtctttggttctgtttatatgctggattacatttattgatttgcatatgttgaaccagccttgcatccagggatgaagcccagttgatcatggwggataagctttttgatgtgctgctggattyggtttgccagtattttattgagaatttttgcatcaatgttcgtcaaggatattggtctaaaattctcttttttggttgtctctgccagactttggtatcaggatgaggctggcctcataaaatgagttagggaggattccctctttttctattgattggaatagtttcagaaggaatggtaccagctcctcttttcacctctggtagaatttggctgtgaatccatctggtcctggactttttttggttggtaagctattgattattgcctcaatttcagagcctgtttttggtctattaagagattcaacttctttctggtttagtcttgggagggtgtatgtgtcaaggaatttatctatttcttctagattttctagtttatttgcgtagaggtgtttatagtattctctgatagtagtttgtatttctgtgggatcggtggtgatatcccctttgtcattttttattgcgtctatttgattcttctctcttttcttctttagtagtcttgctaacagtctatcagttttgttgatcttttcgaaaaaccagctcctggattcattaattttttgaaggkwtttttgtgtctctatttccttcagttctgctctgatcttagttatttcttgccttctgctagcttttgaatgtgtttggtcttgcttttctagttcttttaattgtgatgttagggtgtcacttttagatctttcctgstttctcttgtgggcatttagtgctataaatttccctctacacactgctttgaatgtgtcccagagattctggtatgttgtgtctttgttctcgttggtttcaaagaacatctttatttctgccttcattttgttatgtacccagtagtcattcagaagcaggttgttcagtttccatgtagttgagcggttttgagtgagtttcttaatcctgagytctagtttgattgcactgtggtctgagagacagtttgttataatttctgttcttttacatttgctgaggagtgctttacttccaactatgtggtcaattttggagtagrtgtggtgtggtgctgaaaagaatgtatattccgttgatttggggtggagagttctgtagatttctattaggtccacttggtgcagagctgagatcaattcctgggtatgcttgttgactttctgtctcgttgatctgtctaatgttgacagtggggtgttaaagtctcccattattaatgtgtgggagtctaagtctctttgtaggtcactcaggacttgctatatgaatctgggtgctcctgtattgggtgcatatatatttaggatagttagctcttcttgttgaattgatccctttaccattatgtaatggccttctttgtctcttttgatctttgttggtttaaagtctgttttatcagagactaggattgcaaccactgcctttttttgttttccatttgcttgrtagatcttcctccatccctttattttgagcctatatgtctctgcacgtgagatgggtttcctgaatgcagcacaccgatgggtcttgactatccaatttgccagtctgtgtcttttaattggagcttttagcccatttacatttaaagttaatattgttatgtgtgaatttgatcctgtcattatgatgttagctggttattttgcttgttagttgatgcagtttcttcctagccttgatagtctttacaatttggcatgtttttgcagtggctggtaccggtcgttcctttccatgtttagtgcttccttcaggagctcwtttagggcaggcctgctggtgacaaaatctctcagcatttgcttgtctgtaaagtattttatttctccttcacttatgaagcttagtttggcaggatatgaaattctgggttgaaaattcttttcttaagaatgttgaatattggtccccactctcttctggcttgcagagtttctgctgagagatcmgctgttagtctgatgggcttccctttgtgggtaacccgacctttctctctggctgcccttaacgttttttccttcatttcaactttggtgaatctgacaattatgtgtcttggagttgctcctcttgaggagtatctttgtggcgttctctgtatttcctgaatctgaatgttggcctgccttgctagattggggaagttctcctggataatatcctgcagagtgttttccaacttggttccattctccccgtcactttcaggtacaccaatcagacgtagatttggtcttttcacatagtcccatatttcttggaggctttgbtcatttctttttattcttttttctctaaacttctcttctcgcttcatttcattcatttcatcttccatcactgataccctttcttccagttgatggcatcggctactgaggcttctgcattcgtcacgtagctctcgtgccttggttttcagctccatcaggtcctttaaggacttctctgcattggttattctagttatccattcgtctaattttttttcaaaacttttaacttctttgccattggttcgaatttcctcctgtagctcggagtagtttgatcgtctgaagccttcttctctcaactcgtcaaagtcattctccgtccagctttgttccgttgctggtgaggagctgcgttccttcggaggaggagaggcactctgctttttagagtttccagtttttctggtctgtttttttcccatctttgtggttttatctacctttggtctttgatgatggtgacgtacagatgcactttttgtgtggatgtcctttctgtttgttagttttccttctaacagactggaccctcagctgcaggtctgttggagtttgctagaggtccactctagaccctgtttgcctgggtatcaccagtggtggctgcagaacagcggatattggtgaactgcaaatgctgctgcctggttgttcctctggaagttttgtctcagaggagtactcggccgtgtgaggtgtcagtctgcccctactggggggtgcctccccgttaggctactcggaagtcagggacccacttgaggaggcagtctgtctgttctcagatctcaagctgcgtgctgggagaaccactactctcttcaaagctgtcagagagggacatttaagtctgcagaggttactgctatctttttgtttgtctgtgccctgcccccagaggtggagcctacagaggcaggcaggcctccttgagctgtggtgagctccacccagttctagcttcccggctgctttgtttacctaatcaaacaactaactgggcaatggcgggmacccctcccccaacctcgctgccgccttgcagtttgatctcagactgctgtgctagcaatgagcgacacacggtgggcataggaccctcygagccatgtgtgggatataatctcctggtgtgccattttttaagcccattggaaaagcacagtattagggtgggagtgacccgattttctaggtgccatctgtcacccctttctttgactaggaaagggaattccctgaccccttgcacttcctgggtgaggcgatgccttcccctgctactgctcrtgcacagtgcrctgcacccactgtcctgcacctactctctggcactccccagtgagatgaacccggtacctcagttggaaatgcagaaatcacccatcttctgtgttgctcacgctcggagctgtagatcggaggtgttccttttcggccatcttggctcctccgttattatctttactgttgcttattttgaacaggcctacaagcatctcctggtgcacatgacctagagtttctcttggaatagagtcgctgagtctttagttatgcatacttttaactttactagaaaataccaatctgttttccaaacagttgttctagtttaacattcccaccagcaaaatagtagagtttctgtgtatatacattttctccagcacttcttattgtccaatttattatttttgaggacaattaagtgggtgtaaagtggtatcccctagaattttggtttgaatgttcatcttyccttaggtgatttttccagaactggaattctgtatctcctttgcactaacaaagcagtagattactgtaaagctataaaacacaaattaaataatatgatcatctgtaatgcagcagtcaaggagtgattaggatgtgctgtgaggacggaagagaagtcattcttacagtgcagtagaaaaagccttggtcttgaatcaggagagtcagtgcctggtcctagctctgtaagtgattggctgagtgactcacatgaaaacctcatttttcagtgtttccatttcctcatctgttatttaagggtgttgatcacagagagtatgctctggtctacatttttktcatttagtaaatcataatcatcacattcttttgggtgtttctttaaagcatttggcctccattttctcaggtgatatttccaatacctaagtaatgtaggcagagaaaagatgaaataaaarcctacaaattttggcaggggtctccgtagtgtgactgtggggagaccaggaagctcctcaagcccataaatatctctgttctggcctcccttagagcctaaaactccacaattactgtttcactgctatagttcttgaatgcctttgggtctgttggagtcttccattaaaatgcaaatgtccctggagggggtggggagagcctttaagctcattatcacctaaatcttccacagggattaattgatcagatccttccccatcagacacctggttggaaacagagcctgtgggaatgggcacctggttgatgaggggaagccctgggagggagaagaaaggttataaagagagaggtggaccaaccagggctccctagggtttggccatttgctgcttcccacaggctcatctctagccagaagctcaaaatccagctkgtcaaacacactgggctactgctgtctccttggggggaagtttcctcttagaactaactaaaggctgccaaccagcggcaaaccctcctgtgtctgcaaatggctgccaaaagcccctccgcgctacacacttctgtggcagatgcctctgagcagccttctttatgagtcagtgctaaagcctagcccaggttctaatgtggccactctgaggcgtggacaggccttgtcaaaggctgggcatgcgtgtgggtgcctcatctgctttgtttgacatccaaacaactcttttaaaatgtggctctagccccacctcacaaagggggcctgaagggtgttgtggaatgtgcttggacctgctctgttttctttcggtcacccacacaaaaatgtgccttcccctcccctgccaggaaactccctcagcaatgcatggttttgcctccgctgaccctggccccttaacatgtcagaatgttaataaaacactacggctgtcataacgcaaggttaaatgaagtcttcacaacctgtccattaagcggatgtttgtgtgtgtggctttctgcagcttctctctggatacagcctgtctcagtttgtgggcagtcgatcgagccttgggcctttgtctttgttcactgttgtgtttaaatcccccccattcattaatcatccctttgcctatttataccggtggcaaggatagcgaacacacttaacgtctgcttttgttttggtggcaccctttgtgaggaccaaggcagagctaattattaactgcgaaaagacgttaaaacttttagataagcgccaaatgctgcatccactgagacgcagttttgtttaaaccttcgagagcttgcggccaagcaactggggtggctttatttagctttgagtccaggggagtgatgccagtgctcagataattaatagaggctctccattaagacccagccgggcagcagaatccaagcgccctgtatgcacctctgaacacccagctgggtcatccagacctgagcaggcacaggcaggggtggcagcttcagacgtagggctcaagggggctcctccaacctatatgtttacatttcctgtgtacatttcctgtgaagatcttcgttgtcagcttttggtgacttttacaccctccagtaggatcctgattttcctttgctgttggacattttgtggagccaactattttaggtacagctatttcagcttattaaacagttatgcggcttgctactgttcttctgaaagaggtctccccgaccacgttttctaaagcagttgcctaagcccacagccatccctcagttacctctattccattacccagtttttttttcccctccaaggcatctgtcrctatttgaaataatcgtatttgtttgtatttcttgtctgtttgatactagaatgtaaacctcttgtatcctttgcacttagctcttgatcgtcgcctggcacatatcaggggccaaacagatatttattttatgtgtgggggaggaaaaaaatatatttccctctacccattctaggctcattggccagggccctgtaaattagattgccaaaagataggttaacaagagaaaagtattttttgttgttgttgtaaattttatttttgaattgcattttttcctgctgatacatgaaaaagcaattttttgttttcatattatacacaacatcctaacttaacttttgtttatttactagtttgcatttcttaagtagacagtcatattatctacaagcaaaagatttgtttcttcctttccaatccttatagtttttattgctttttcttatcttattacactatataggacctccagtgtaatgtaggataaagtagtaatggaattatatcccaaaagttttcttaaaaataaagaaagcccacattactagtttacccacataataaaatttcttagaaccacataataaaatttcttagaacataaaattcttcgtttttaagtatccaattcattggtttttagcatatccacaaggttgtgcaactgtcaccactattcartcaaaaacatttccgtcwttccaaagagacaccccttaaccatttatacttactcccaatctgcctcttccttcagcccctgataaccttaatcaactttctgtctctatagatttgcctattcttggcattttatacaaatgtagtcatacaacatgtagcctttcatgtctggcttctttcatttggcatagtgttttcaaggatgattcttattgtatcataaatcagaacttcctttcctttttatgggtaaataatattccattgtatagatataccatattttatctatccattaatcagttgatggacattttggttatttctacattttggctatgatgaataatgaataatgctgctattaatattttttgtatacgtttttgtgtgaatatgtttttcagtatcttgattatatacttaggagtggaatttctgggtcatatggtaactctatgtttaattttttggggaaccacccagctgttttccataggtagtgccattttacacatttccactagcaatacatgagrgtttcaatttctctacatcttcaccactacttgttattttttcttacagtgatcctgtgggtgtgaaacagtatctcttttggctttcatttgtactactctaaagactaatgaagttgagcatcttttcatgtgctctttgaytatttgtatatcttctttaaaaaactgtctattcacattttttggcttttttttttgagacagagtatcactctgtagtccaggctggtgtgcagtggcgtgatctcggctcactgcaacctccayctcctggattcaagcaattcttctgcctcagcctcccaagtagctgggattataggcatccgccaccacgtccagctaatttttgtatttttagtagagacrgggtttcaccatgttggtcatgctggtctcgaactcctgacctcgtgatctgcccacctcggcctcccaaagtgctgggattacaggcatgagccaccacgcctggccttttttggctatttttaaattgagttatttgtctttatattgttgwgttacaagagttctttatatattctggatactaaacctttatcagataaatggtttctaaatattttcacccattctataggttgtatttttggtttcttggtagtatttctgataaacaaaatttttaattttgatgaaattcaatgtatttattgttttctttgatggcttgtacttttggtgttacatctaagaaactattgactaatccaaggtcatgaagatacacacctgtgtgctcctctaagaattttgtatctttggcttattcatttaggtcttttattaagtttggattttgtatatggtgtgaggtagggtgggtccaaatgtagtcttttgcatgtggatatccagttctcccagtattatatgttgaagagactggagagtgggcattcttgtcaggttcttgattttaaaaggaatgtatgctgttagattttttaaatgtaatatttatcagataaaagtattctatataattatgataatctaagagtttaaatcacatactagcctcttcactggaatgtgagaaccaatgtcattcccttcattaggggtgcagtcctgggatataaccttggcaatagaaatttagtgcttcctgtacctagaacagtcacgaaacaagataaagagaaggtacctattgctagtcctgttcagcagagtgactattcctgagacttggctagctcatagatcttaacttttgtgcctgcttcaaatgttggcagtggccatatggactgttgtgtttagaagtcttaggttgctctgatatcacagcgattgattaatgatatctgaaacctgcatgaaaagagataggcaatatagatatgacacatttgccattcttgtattggtccctctttctctgtcagatctgtcgtacttgaccctttttacattaaattgctctgtggatagaaccccttttctttcttgatcattggatttggccatttttctcttgttcagcttaatgcttagttctgactccttctgatggatacatcctgtttaatacttatgtatcagagaacaaagtcacaagctttgctaaggtagacacatgtgtttgacagtcctggccccaggtattctgttttgttgtcagattacgtrtcagaagaatatatccccataaggagtgagaaaatgagataaaaaatacaatattcagaatgacaattagagcatctagaccaaacaatatcataggcaacctctatgtctttttgaaaaatacaatataaaagatgacttgcagtgaaggaggtagtcctctttcatgagacatgtagggaataaggttgaatgatcaactaatgtcccaaagtctcacatgccatatggaatcagtatcatgttgatggtttggagaatttcctaggaatgcagtctgtggtaccaatattgccctttccgaaggcttaggggtctgcctttatgatcaaggcttttatctgcattacagttcctggcacttgaaagcttctgatatattggattatttgggattaacattcagcatcaaatagtatagaacttcatacctctctcatggcatggtccggacattagcaaggcgggacttgtgcagtggctccattgtggcagggagtcagctcattctagctcattcatgtaccatgtttatagtccctgtggcaaagaagactcatctccccattgttgtatcacattaagcaaaaatgcaaaaagaaggagaaagcatgctcattcttcttaaggacattgcctggatgttgtataagtcatttcggctctcattcccttttgccagaacttaagttacatgaccacacctctttgcatgttcccatcaaaaaaaacctagcagtgtatttcctagagaagaatgagacaatagattttggagaacaaccagcagtctctgctgaataacaatattttgttaaataaatgagaaaagctaaatcaaaataaaacagtgtagaaatatattacccttaagatcaccagatccaagcctttaatgatcttaatggaaaagaacacagatctagtattccagacatccatgaacttttatttcaaggatgtgttgctatggggcacccttcatttgctggcagtaacctgaaacctgggatgaaatgaacatacctgaaatctctgwcactcttstccctaaaggtmatcagaggagttgcttctacaacctaagaggaaggatcattaatttcttaatctgtctaagggtagatcgtcacttacctggaagctgttttataaagggaatatgttagaatggtagacaatattagcatttttcaatatatgattttcatttcctttctgagctgagrtatgaaatgcccctgtgcaacttcctatttaacttacatcccagctgaggtcatcttagagggtaccttgtattttgggatggtggaatcacaacatccatctagtaactagcttactagacagctgccctagagagtcattcacatccacgttgatattgtttaagcgcctaaacttttgctgtattagggtgataagatttagggatttctggttcctgcatatgacgcagtctatcctgactatcacattttgcaagtacttatcagcytccaggtgtaaacagagtcattgattatggagtcctggaattgactagaaataggaaaagtatttactctcaaatatcttaaaatgtggctaactcatccaattatagcaactcaaggtctaattgtaagccaagtcttacagaattgtgttcttaaaacaaaagagtgattagtgttggatatggttcatctgggaagacttcctttaacaggaaaaaaaaatcactttctccatctgtgctggaagaaagtaactcaaacacagtcaggaacagagaatgtatgcaatgtaaatggctaaacctgacagcctctggctaattggaagtgtcggtgttattgtgcttaggttaatggggctctttagtttaccatctgagctgcttctcccaaggaatcacagcaaccagcagtctccaagggctcaaaaaccctggaggmcttctctttggtccctgggagctgcaccctgggcacttacagcaagctcacaggtgatgagaactcatagttcagcattttgcttctcttctatgaaaaaaaccgactgttttcttcataaattagacccagccaaagatcttgattcttccattattctttccaaacagtgtcataaaagagaagaacaagagggtggactagggacctctgacttctgacccttcctccttaagcagcctgatatactctgcaggctgcccttctgatggccacagatgacaggaagagttgctgaaaaaaaaaatatgggcttaaccaacattcacagaccaactccatgcctggcagtccctgagccacatctttgacttatgatattagaggagtattatgggccattggtttagattctttatgatagcattgacatgtcatagaatgtcagctggggacttaaggctcrtgatagctcaagatgacataccattaggcttagactaggcaacaagtggctattggaatgatgggacatttataggagagcaggtaagatcagatttcttccaagatacattctttctcctgtagaggcttttgtcatttcacttatcccactgaattactttccctgttgtgttaggtatgcctcaggggcagagaacgtaatacatttcacttttaggttcttggtgcctggaggagtgtgtaatrcatagttgctgctcagttaataatgtttgtattgaatggaaataaccaagagtctttggtctagagaggaggagaatgaagtgtcatgatcaagatctgttaaatcctacatggggaagactaggttgaaaggggagttagttgctaagtcctaaatacagagttgggagactcccttttgaaaatggatcaaggtaaatttaggaccaatacaaagatgatccagtttccacgtcaggaaataagcttctagatctcattttccaaaagatgatagtggaaagaagcaaatgaatttttgccatagtatatttcaaattgaagaatggcacagcttttaatagcttagaactgggtgcagtggctcacacctgcaatctgagctacttgggagtctgagtcaggaagatcacttgaggctaggagtttsagaccagctgagcaacatagccagaccctgttgccaaaaaagttttttaaaaaattagccaggtgtgatagcatgcacctatagtctcagctactcagagggctgaggcaggaagattgcttgagcccaggagttcaaggctgcaatgagctatgagtgtgccactgcactgcagcctgggtgacagagtgaaatactgtctcttaaaaacaaaaaaaaagaccctaaatgaaggcttaatgtagacctccgagatggacagcctgagcctccaatgactcattttttagcattagtgacaataaaaaaaattatgtgtatgtgtgtataggcatgtgtcacttagcaatggggatacattctgagaaatgatagatgaaattaggtgattttgtcattgtgtgaacatcatagtatatgcttaatacaaacctagatggtatagcatgcaatacacctaggccatatggtatagcctattgctcctgagctgcaaacctgtacrgcatgttcctgtacagaatactgtaggcarttgtaacacaatggtaagtatttgtgtatctaaacaaaaaaaaagttacagtaaaatacgatattataatcctatgggaccaccatcttatatgtggtccattgttgactgaaatatcattatgtgatatttgactgtatatgggactggtcaaatatgttttccttttctatgatggcctcagagccatcatagactatctataacttcatctctaaccattctttcatgtgaatcttatgtcctagggactttgatctacacattgtactttagacagaccatttaacctgcatttattctcttttccttttcctaccccctttgcctccttcttcctggtaaccttcatttttgctttcctatataaaaccttctaaaccaggcccctttgacctctctcttcttacrtactaatggcaggtgtagactttactgatggtttgctgatagctgcctttaattattatttatgtttttaggcacttattctacttctccaaacttaagactagtgaatacatggtcctttgtgatttagctwgagtagaaagctcagtcttatgaaatgaaarctgatatattttttaaagagaacgtactacgaagaaacaacaaagaattaataaaaatgttaaaatcagtaacatatcactaacaatattactaaagatgcaaccattagattttaaaaatctaatttaatggattgacttgttgaatatcagaactgcaagaaaccttaaagatcatcatgctgaattcttatctcatactggtagatgtacaactccaggacaattaatttagtggtagagttaaaaatgttattccttctaataacctagaaattctcatacatatgtatatgtcctaaagaagcttggatatattcataaartaacattacagagatatctactaatagcattgttttgtgataatgaaaaatttgaagcaaaataaatgttcattaataggaaattagatagataaaatgcattctattcatgagatagaattctagacagaggttaaatggatcaaaaggaataaaacttaaagaaaatcatatggtaagtagaatatgtacaagctcatatccattattatcaaaacaatgttatttctggatgcacatagatgttgaactttaaaaactgattcgtgttctttattttttaatttggaaaaatataccttaaagtgattatgctgaataaaacaaccatctaacattcttattttcaaataaggaaatgcacatcaagagttgtgcttggtgtatggaccatgtttggaccctattttgaaccaaatgaatattaaaaactttatgagtgccacatcttctgtcatcagggaaatgcaaattaaaataatgagataccactgtgcacctattagaatagccaaaatctagaacactgacaacaccaaatgcggatgaggatgtagagccttagggactctcattcatctctggaggggaaacaaaatgagacagccactttggaagatagtttggtggtttcttagaaaactgaacataacttagcttatgatccagccatcacactccttggtatttactcaaatgagttgaagacttatgtccacatagaaacttgcgttcaggtgcttatggcaactttattcataactgccaaaacttggaggcaaccaagaggtccttcagtaggtggatgggaaataaactggggtacatgcagacaatggaatgctattcaacactaaaaagacatgagctatcaaaccatgcaaagacatggaagaaacttaaatgcatattcataagtgaaagaagccaacctgagttatatgctgtatgattctagctatatgtcattctagaaaaggcaaaactatagagagagcacaaagagcagtggttgtcagstgttatgggggaggaaaggatgaataggcagagaacagaggatttggggggcagtaaaaatactctgtatgatagtgtgatgactgatacatgtcatgtatctgtctaaacccatggaatgtacaacaccaagcgaactctaatgtaaactatgagctttgagtaataacgatgggttgatgtaggttcatcagtgtaacaattgtgccactctggtgggggatgttgataaggggggaggctatgtatgtatccccccatttcccaggggtatatgggaaatctctgtaccttcttctcaattttgctttcgaatttaaaactgctctaagagaagtctttttttttttttttaaagggaaatctgaagcaaatattagaaacatattagggtggtagattcacatgtgtcattttatcttgtctctggaccttaaatattttataattgaaagtaaaaagttcttaatgtaaaaaaaaagactgaaatgatcagggaaatctgacactgactggatatttgataacagtaattataagcttttttaggtatgacarttgtggttatatttaaaattttttttcttagaggtacctaagagtatgtatggaagaaattatttgatgtctgggattcattcaaaaaaaatttgcttgggagaagagggaatagatgtgagtagatatagttgaaactagattagctgtgtgttgatttatagatacaagagggctcattatactgtagtctctatacttacaatttttttgaaatactcccgccaaatttaaaaaattggccttaaaatatagttttagaaccaatgctccttatccagtgctgtttacaatctatctcattgagaccatgataggttggactctctacactggccagagcaagaaagggtacataagcaggttttgcttacaattattttcttactggaggaagtttcgtacaaagagtaatttttatttatgaaaagcagtcccccgttgagccatcagttctagttgaggtgtatctaagatttctttttctttccaaacatgtcaaagcaaccaagccacgtgattgagagtgtgggggcctgaaacacccgcaagcaaccgcaaggggtgggaggttactcattccaacttttatgatgtcccgagaaacggttgcgataagagaaaagactaaaaaataaacgagagataactgagataatgggaaaaacagagggaaacaagacaacactctccagtctttggcttgagatatttattatgccaagggagataaattggagaaacatgaaaagggaaagagatcttgtctctgactcacgtatttctctttaagtgaatgagcaataacaccggaataaaagagctcaaaacagagccatgtgctcagccaaaatcatggttcctaatgaatttcaacgttggcagaagcctcacacgttgtacttgaacagctttcttgattttgaattatacatgtaattcatcctgaccagaatgtagcctgagagccgagatccgaatgtgagtgggaaatgagaatgctggtcacgtgctagagccggtctttcttcttcacgtcagaaatgtctgtgctgtcatcagtttggacagttctgggaaacaaacaaacaaacaaaacttaggaaatcaattgtttggagtcatcttggcaaatacattgtcatatgacatattttcttttcctaccaggctgttctgtattagaaagacacagcccaagatagtcagactacaacgcatgaaacaaatgttgatgaacagaaagggtcaccgatgaggccaacagtccaaaactgtccacctggccttcctgccctgtcttttaacaggacagaggaggatgaaggggaacaagatagacctagatgtggtggcaccttagaaaatttaaccaaaagaagggctgttgttttgctgattctactcagtgaatgcagtggaaagaaaatcagattcagtgggaagaaaatcagattctgctcgctctgtttttaaatagtgggtgagctttagctcacatttcatagagcaaacttttttagggtataaaataatattctttagtaactaaatttacagtctttgttcactgtaactttgactttacttctgaataactgcagctgacaggtcatttctgactattacatgtgttttttcttgagttcaagctaataacccaaaatgttagtcaatcctgcaagtgttatttgcatgtccttaggttttgttaaggtacttcgtgctgtggtgtttactttgggatagaattaaactgttgtgggaaggtgctttcaagaaagtgcttacgagaacaaaagttgttttgaaggtaggtaggtaggtggagggaagaagaaaggagagagagaagggaaaagatcgctggcagagttggaaaaaccagtaggttccaatcccaaatctaccatttactagccctatgaatttgggcaatttatttaacaagcctctttgatcctgtattagtcaattctcgcattgctacagagaaatactggagactgtctaatttacgaagaaaagacatttaattggctcacagtcctgcagcctgtaccagaagcataacacagccatcggcttctggggaggcctcaggaagctttcaatcatgacagaaagtgaaaggggagcaggtggatagtgggagcaggagcaagagagagggagatgctacacacttttaaacagccagatctcatgagaagtcacttgttattgcaaaaacagtaccaagaagatggtgctgaggcatttgtgagaaatccatcaccgtgatccaataacctcccaccaggccccacctctaatcctgggattacaattcaacatgagatttggggaggacacgcatccaaactatatcagcccctcagattatttatgtagaaaatgcaggtgatcactacctaccttgttgtgttgttatgatgattatagataatggcattatttttaaaagaaaggaatgaaagggaaagatacatattctaaaaatgaaaaatctcccaaagcaaatcatatttataggtctgttgctataattccagattttaattttattaaatgttcagaaaagaacaaatcacagatccttggttccaaataagcacatgggaaattatgtgaatattattaaaacgtgagcttcttgtgacartmgtgacattattggaacataaatggcagctcagtcagcgtctccttgtaactatatcaaagaaaagacagttgcagctttgttctctgtgtgacccacttggggtttggctgcttgttgatggatattatcatttttaatgtcagtaaataatgtgatgtcagataaatgacctgtttcctttctgtggtataaagctcatttatctttagggagcttgagtgtgtagagaaatctgagtgggaccaagggtttctgactatgcaggatgggactttttttattaatcctgcttaacatgagtcccaggcagtcacattcaattctaaatgtatgtgtggtaaatcaatggaagtgatatgcatttaccatagactgttttactgattggagaaaaacagaaagtaaactttttttttcaacttgaagaaaatgatgctatacataaagcattactgtgcacgtgcatgtagtagacagaagacatctttctatgtaattcatacttggcttagctagacccttgttgctttaaggaattacggtggtataaaattaaggatcaggaagatgcattttaattaactttactgctaatagctttggagatcacaaaaatgtgaactatggtagagtcaaaaagattctgagatcacaggaaattatgattttgatttctgggctgtagtatctgcttccttcctaagatgaccactgaaaagtccacatcttttatttctgaagatgagtctcatgaatccattgtctctgtttttcatgactgcacatttagccaaagtcactggaatgccatattctctgatgggagatttagtcagggcaaaaaagggccatttgcttttctggaaacctttagacagggtgacaattattccaatgagtttttcttaatattgtgagctcattttgaaacacttccttaaacaaccctctgaagtttcctaggaaaattcatggactctcagagaaccaagtctggaagcctctttagaaatcatttaattaaaatgtttgatttttttttccratgagaaatcagaggtaaggaatttgctctaggtcccaaggtgagtttcctgcataggagactgaacacaaaggctttgtgtttttactaaaacattattgttttgtcagatattgaaatgtccactgatgatttaatgattaaaactgagaattttktagatttacttttctcagttccatcatattatagagctggcagagagggtagagtaggtatttattttactacccaatgagtagtctcgagaaagacagtgtccacctgttttttctagaataggggttggcaaattacagcccataaaccaaatatggccagtggcttgttttttgtttgtttgtttttrcatatgagctacgaatgctttttacatttgtaaaaggtggcaaaaaaccacccaaaaaacaaagaatatttgagatatgtggtgaaggccatgtgtggtctgcaaagaatgaaatatttcctatctggccctttacaggaaaagtttgccaatctgtgatctaaaatattcagagaaaggttctgtgaccttccttgtagatcccacaatacttttgtgtttatattttttaaatgagcatcacagattgcaggaaaataggaaacaatttaatttaatttaatttttagccttgaaaaaaattccttttattgaatttatttatttttccagctgtaaaattggaggcaccactcagaccttgtttggctctatcattttatgagtttatggattacaacagtgaacaaagggcacgtgtatcagtcctttctcatgtgagactacgtaatttataaagaaaagagggtttgtttgtttatttgtttttgtttttgtttattgagacgaagtcttgctcttgtcccccaggctagagtgcaatggcacartcttgtttcactgcaaactcygcctcccaggttcaagcaattctcctgcctcagtttcccaagtagctgggattacaggcacctgccaccatgcccacctaatttctgtattttaagtagagatggggtttcactatgttggccaggctggtctcgaactcttgacctcagatgatccatccgcctcggcctcccaaagtactgggattacaggcgtgagacgccatgcccagccaaaaagagagttttttttgagacagagtcttgctctgtcacccaggctggagtacagtggtgtgatcttggcttactgtaacctctgccttygggttcaagcaattctcctgcttcagtctcccaagtagctgggactacaggcatgcacgtccatacctgactagcttttgtatttttagtagagacggggtttcaccattttggccaggctggcctcaaatgcctgacttcaagtgatctgccagccccagcctctcaaagtgctgggattacaggcgtgagccattgcacccagccaagaaaagaggtttaattgactcacagttcctcattggctgaggaagactcaggaaacctaccatcatggcagaagaggatgcaaacatatccttcttcacatggcagcaggagagagaagaatgagtgaaggaggggaatagccccttataaaaccaccagatatcrtgagaactcatgatcatgagaacaatatgagggtagccgcccccattatttaattatctcttaccaagtcccccccacaacacgtgtggatagtgggagctacaattcaagatgagatttgggtgggaacacaaacaaaccatatcagcacactcattcagcacatattcagtgggtatcgagaggctatgctggatgctttgggtaggttggtgaacaaacagtatggttcttgcccttctagaccaatattcagtgggaatacagagggaaagaagaaataatgaagtaaacaatgatgggcatttgtagcggttaggcaggattcagtgtcagataactgtcaaggggaaattcctgagagactccacccactgatcatttgtccgatgtgaagggcaatttatcctaacttccacacatatttatgggtcattttctatgtaccaggcatgaggctrtctgttargttgagttctcagtcaaaaccatggacaaaggcctccttttggacattttcccaaacctgcttggttctttgttaaaatggtacttgttccaaccttcttttgtttgtttttaacttttattttaagttcaggggtacatgtgcaggtttgttatataggtaaacttctgtcatggatgtttgttgtacagattattttgtcacccaggtactgagcctagtatccattagttacttytcctgatcctctccctcctctcaacctctaccctccagtaggccccagtgtctgttcttcctctcttatgtgtccrtgtgttctcatcatttagctcctacttatcagtaagaacatgtgatatttggttttctgttcctgtgttagtttgctaaggataatggcctccagcttcatccatgttcctgcagaggacatgatcttgttcttttttatggctgcgtagtattccatggtatatatgtaccacattttctttatctagtctaccattcatgggcattagggttgattccatgtctttgctattgtgaatagtgctgcagtgaacacatgaatgtgtatgtcttgatgactgaacaacttatattcctcctaggtcgaatggtagctctatttttagctctttgagaaatcaccacactgctttccacaatggttgaactaatctagactcccaccaacagtatttaagcattcccttttctctgcaaccttgccagcatctgtcttattttttgtttgttcgtttgactttttataatagatagccattctgactggtgtgagatggtatctcattgtggttttaatttgcatttctctaattatcagtgatgttgagctttttttcatatgcttgctggccacatgtatgtcttcttttgaaaagtgtctgtgtttcttgcccactttttgatagggttgtttgtttttttcttgtacatttgtttaagttccttatagatgctggatattagaccttcgtcagatgcatagttttgcaaatatcttctcccattctgtaggttgtctgtttactctgttgatagtttcttttgctgtgcagaagctctttagtttaattagatcccatttgtcaatttttgcttttgttgcaattgcttttggcatctttgtcatgaaatctttgcctgttcctatgtgcagaatagtattgcctatcttgagttaatttttgcatatgatgtacggaaggggtccagtttcaatctttggcatatggctggccagttatctcagcaccatttattaaatagagaatcgtttccccattgcttgttttgtccratttgtcaaagatcagatagttgtagatatgtggccttgtttctgagttctttattctgttccattggtctatgtatctgtttttgtactagtgctaggctgttttcrttactgtagccctgtagtatagtttgaagttgggtagtatgatgcctccagctttgttcttttttgcttaggattcccttggctatttgggctcttttttggttccatatgaattttaaaatagtttcttgtagttctttgactaatgtcaatggtagtttaatgggactagcattgaatttataaattgctttgaacagtatggccattttcatgatattgatttttcccatccatgagcatggaatgtttttccatttgtttgtgtcatttctgatttttttgagcagtgttttgtagttatccttttagaggtctttcacttccctggttacctgtatttctaggtattttattctttttgtggcaattgtgaatgggattgtagggaatccaatttcaaaagaggcctacttgggaccaattttaggaatagtttttgtcctcaggaataatccacctgctttataaattatacattaagccctgagctaaaatatgggcaaatctgtctctctcctcttccatagaacttttgctgacttgttagccacaggactttgaattatataatttctcatcaaaaccacatctatttcctgaaacacttcaaaatagctttgactcctaggaaagtctggttaaggagttcagacaccaccttagtggaagcccatctcagtgacaccagatttcctatgttgattgggaagccatgctctgtgttgggagagaaaaaaacatgccttgtagctagaattatgcccaggggtcctcatggcttctgtttccagagctgggcaatggccatcctcagctttgccactactgttttgaacaactttgctcaaacagaagcattgttctggaacttggcgaacttggtgatgatctgaatcatcaatttcagtttgttttaatctggtactgagtttaaagtttaggtagttcaagggtaaagatagcaaaaaaaggaaaggaaaggggatgatgagtagatgaaactgtatgatgagtagatgaaaggggatgatgagtagatgaaactgtatgatgagtagatgaaaggggatgatgagtagatgaaagatgttttactaaaaacaattggtaaaagttgtcagatctatttccatatatctcttccacacattcttttgctttatgttcttaaaattacaatagatctcattttatccttgacattggaattctgaaacatacatgcattccatgaagtccactgtttattgttgaagccaataagtaagacagaacaaaagcraagtgaagttagaaaggtatccactgtataggtactttacaaattgtgggtaacaaggtggggagaaaagaaggacattctaggagggaaaaagataatatgtattaaggaaaccatattatggggagttaagaactatgaaaatcagtctttctttccttagaatagctcttttcagcctgccccatagtaattctaaaattattggcaggaaaatttggtgcaggcacagcaattagattgaatctgttgctgataggattcttcggcataaaactggatctttttgctacaactaaccattcattccacagtgctttcagttcccagaataattcagctcaagggaatattgacatttttgtctgaatccattctgagtttcatcctataaggaaaacatttttaaatactcttttagccatggtcttgggagcccctgaaatattctttccctcacagatggcagtgccttttcctgctgcctctcgtgttggatcttctctatcccacaggagcagacgggatgttggagcccttctgttagagcagatgggaagttggtatcagggctgatggttaaatcactgagaccctacattagcatgtctgaggaagacagatttgaggctgtcttcctaagaattttctttagtggtcattaaggaagactcagaagaaagattgggttaatctctgtaataagcccatagtggaggcctaatgacagtcagaatattttctggtctcatgggtcttcaaagaaagcaaactcaaggtcctaccaagttcagtgttttcaaggttctaaaaaattcaaggttctcaagggtttaaaagctagtgaaaaaagattacagcccagcttagtagaaatggtagactccaacacattgggtgtgataggagaattcttcattgtcatttgggataggacagctgtttactgtgaggctgccccatgcattmtaagaggtttacctctcagaggtttatcctcccatcacccaagggtatggccttacccttggatgatggccatttctccagtgaagtttcctgtagcctgtgtcctagagtatgcagagaggaagctgaaaggtaaaataatcggaggattggactacagactttgagccagttgtttaaaagattctggtctccacacatattgcaggtcacattcttgctgtacagaattcaggagcggatcagggctggaaaagtaggaacagtctcctcaccagtcacccaagaaggtataaactggccgctcaatgtgttttagactcatataaactcagaattggtagaaaaycaaaactagctcatctaaccaactgctcagtagagatgcctttgccaaatgggcatgtctttaagatataaccrtaggtatatggtgaagtctgtgccagagatttatgttaaattcttgcagattcttgtgtaggtgctctcagactggtctctaggaaatatggtaaatttgtttacagtaaatattggctaattgactaaaagtaaggcttctagagtttagttcctgcttcaaccactaactagctctttgacyttaagcaagtccgtttgcttctctgagtctagctcagtttctcatacgtaaagcagagataatactgctaccaattttggagatttaactaattctgccctaaaactcttcccttcaaaagcaayggtaaaaattattactggagcataagtaaatgtttatcatataaakgaaactatatctctagaaatgttatacrtgtaaaattttaaaattctataaaatggttggtttcttttagaccttttagttttgtgatattttaatccagaaattgaactctggactgaagttcaccttctcttatttgaaaatttatatgaggttagagaggrggaaaataaactaaaaaatattatctgttactactaatcttgcaaggtatttgtggtattggtattcaaggagttaataaatatgaaatgcttagaagaatacctagcacttggtaaatgtacaataaatatcaactattatgagtatatgtactaaacacagcactaggttaatatctagttttgtctcatagatggatgtgcattgcttcctatgaagaggcaaaagtttgtactgatctgagcagctatatctgtgcctagagaaagaagctggttttaaaaccccttgtccctaagtttgtagtggaatgggataagtcatctggctcttatgctatgcctacccttcagatgacactatctcgctgcaacctctgcctcctgggttcaagcaattctcctgcctcagcctcccaggtagctgggattacaggcatgcaccaccatgcctggctaattttttttgtatatttaatagagatggggtttcaccgtgtcagccaggctggtcttgaactcctgaactcagttgacacacccgccttggcctcccaaagtgctgggattacaggcgtgagccaccacacccagcctatctttgatacattcagaaaggaaagggaaggaggcctttctcctcctacctcctgtgagtggttaggctgggttcataggaagctggccaagctcattagcatggcaagcccctccactacccactgctctggcctttagttgcatactggtcagtaagtggaaaaagggaagggggaggatttgaaacgtaaccacagcagggattcctggaggctgtgggtgattctttaagttggtgcttctctttagggcatagcaccaacgtcttcttgtgagtgtatcctaaaaagtgagcaggtggatttctgctccaagccatgatataatgacaaagactggatttaccttcctgccttatacagttaagaaccagacaaaatatatgaaacaacagtgtcttagtctggttagtgtcgctctaacagaacacctgaggctgagtagtttataaagcaaagaggtttatttggctcacaattctggtggctcagaagtccaagactgggcagctgcatctagtgaaggcctccctcatactgctcccactcatgatggaaagcagaaagggagctgggaatatgcaaagagatcacatgcgagagaggaagcaaggaccccagactctttctagcaacccacggctctcaaggggactaatctcttcccaccagagtgagaactcactcaccactgtaggaaggcactgggcattaatctattcatgagggatctgcccccatgactcaaacacctgctactaggtcccatctctcaacactgccacattggggatcaaatttcaacatgagttttgtcagggacacaccccatccaaaccatagcaaacaggttgcaaatattggacaataggtagcacagaacattgatcctcaagagaagaacaaacagggtgagccctacaattgctccagcccaccatctacagagtatatctagactgcagtgcagggagggccaactcaaacagtcctctggtctccctgagttgagatgaagttgagaattaggggagaccaaagtggctagaattcccagggaagaataccagaaaggagagcattaatggagaggagagaatattttataaggggtatctgagtgcttactgatcagagcatgatgtgaggaaactccctgaagcttggggaagaaactctctaaaggagcagatggagcacccyttggagctcacacaggaccagaagtagtgctgttgccaccagctggagcagaaaatcagaatatacagggcatccagtagactactcaggagagtattgtctcaatagtagggcaagattaaagagtgctgtggtcctgcctaacaaaacctaaaaacaagcttcaaattgtttacaaacacttttctttgtcccagaaataaaacacttcacaaatatttaaatgaatatcagatttataatatctgacatcaaagaaacatgagaaatatgacccaaaatggggagaaaaatttgatcaatagaaacatacacagatgatagaattagtaaacaaagacattaaaatagctattataactctatcctgtatgctcaagaaggtaaaggaaagcatgaaagtgttaagaagataaaaaaaaagataatgagcatcagacccaaagcaaaattctagaggtgaaaaatgccatgtctagaccaaaagcactctaggtggaattagtggaagattagacactagcagaagaaaagattagtgaacctgaaactatcgcaatagaaatcattcagaatgaatcagaaaaatcactgaagaaaatgaacaaagaaactgtgagctacaggacaacttcaagctgatggatatgtttgtaattagagttccaaagttatcagaagaagaaaaaaaataaaggtacaaacagaaatcagtgaaacagaaaagagaaaagcaaaagagaaaaatcaatgaaaacaaaaccttgttctttgagactattaataaaattgataaacctctagcttaccagagtgataaggaaccagatagaaggcacagattaccaatatcaagaataaaagagtaaatatcaatgatgttgaaaatgtaattaggaaatattatgaacaactttatgccaataagtttgacaacttggataaaatggacagatttcttcaaagatacaaactatcaaactcctgacaagaagaaataggtaaactcaatagccatttataattttttttttgagacggagtctcactctgtcacccaggctggagtgcagtggygccatctcggctcactacaacctccgcctcctgggttcaagcaattctcctgcctcagcctcccgagtagctgggactacaggcacgtgccaccacacttggctaactttttggatttttagtggagatggggtttcaccgtgttagctaggatggtctcaatcttctgacctcgtaatctgcctgacttagcctcccaaagtgctgggattacaggtgcgagccactgcatctggcctgccatatgtcatttttgaaaattgaatttgtagttaagaatcttcccacaaacaaaaccacagatctaagatggcttcactgatgaattctaagaaagatttaatgagggactaattctgattcctcattaacttttctagattattggagagaaacatacactttccgtttcattctgtgatgttagcattatcctgatatcaaaactagaataagattttatgagatacctcagtctccatgaagtgcttatttcacattgcatgcctgtatcaaaacatatcatgtaccccataaatatatacacctaccattacccacaaaaattttaaaaaattaatttaattaaaaaatttttaaaaaattatgagaaaattaaattctttccaatatctcttatgaacaaagatgcaaaaaagttttaaagatttttttgtaagtcagattcaataatatgtagaaataataatgtatcatgaccaagttgggttaattctaggactacaaagttattttaacattctaaatgtaaatagggaccttttcctaaaaggaaaacattattcttctccatcttatcctcattgttgtagagcactgggttttctttcttactgtgatgggtaaggaaaggcctcaggtcttaggggatctgctaatgagctaagcagaaggtccctattcatatggcctcatatttgtcacccagagggtagcaacaatctaggacccagcgaccctcagaagtgtgtgagacttgggactagyggaaacagaatgggttttggagtcagaccttggttcaaatacaagtttcaccatttgttgaacaaattatttaatgtttctgagctttagagaaattatgaggattaaggccgggtgcggtggctcacgcctgtaatcctagcactttgctaggccgaggcaggggggattgcctgagctcaggagttcgagactagcctgggcaacacagggaaacccaatctctactaaaatacaaaaaattagctgggcatagtggcgtgcgcctgtagtcccagctactcaggaggctaaggcaggagaatcgcttcaacctggggaggcagagattgcagtgagccaagatcgcaccactgcactctagcctgggtgacagagcgagacttcatctccaaaaaaaaagaagattgttctgaagctcagaggtgagacacataaagcccttggcacatagcaagcatgcagtgcatggtggctgtggtggtagttcattttgttgagaccctgtagcatgaggtttaagagctgtgggtctggatgaggatagcttggattcgaacaccagctctgttacatttctgtttgtgagaccttgcctagtttcctagtctgtgaaataggattaacagtactatctatctcaacagagttgtgttgtagtgaagttcttttgatacatgagtagctcttagaatgatgcctggcccactttcaagtaagtgctcgcattaactattattttaatgctattatcgtttctctggccactggtgtggtcattactgttgttaacaggccagataagggtctgatattctagcaagaaatggtcctagcaagaaggattcacaaaccaargtgaggacaccaggtaacagagtcactgagtgctcgagtttgctcagcctccagattttatttggctccgttgaaagcagacctgcctggccctgactcatcagagaaagctgaattgctgcacctgggaagagtgaagccttggcgggcaagggcagggcagaccctgcaaacaatctatctcggagacaggaatattttgttagagatgcgcccagttggggttgggccttcctgaatggtgatgggatgcagtgtgaatggagacctgggctataattgagaaccatgtggccatgtcagcaggtgatggcacttgagtgacagtatgacagagaacagaaacagggccacagctagccgctctgcctgccatagcgatgtacactgtgcagatttctacccagccaggaatgagccgggcctggagaggcctgccagacggtgggctgcatgctaccaatttctttcagcacctcctattttgccattcatagactcttgccattaagcagacagaacagctcatatcctgtggacagatgatagatatgtcatatcactgaaaaattgtttgtcttccacaggtgtatgggcttcttctaaagcaggcagctcacatgacacttttcaacactctgtcctgtaccagcttggcatccggcgtctatcaaaaggggaatctttcatatgcaattatggcagaaaataaaggtgatgaagtgttgtgtaccaagaagggataagatcaaagggcggtaatgaataccgattacaatagaagggcagcttcaactgcagaagttgtgtgtgactgtgtagaggctggcgctgcttgggggcatgcactggcacacaccagagtacatgcagaaataatacagtaaaatcataggcactgctgtcataaaattataaattgccggctgggcgcggtggctcacgcctgcaatctcagcactttgcgagattgaggcgggcggatcacctgagttcaggagttcgagaccggcctggccaacatggtgaaaccccgtctctactaaaaatacaaaattagccgggtgtggtggcaggcacctgtaatcccagttaatcaggaggctggggcaggagaattgcttgaacctgggaggcggaggttgcagtgagccaagatcgtaccactgcactccagcctgggcaacagagcgagactccgtctcaaaaagagaaaaattataaattgccraggtagaccgtaacccaagaggggttacaggtaatgtgtaattgtatcaaggtgatggtaagacacttgtatcctgataattcacgtaatacskgtttcttccagcaccatccaattagtggcaccatttcagacctccaaaagtctagtttatacccattgaggctgattttccaatagagtcttccagagcacaggacctgggcacccaatggtgtgttgtttatttatttttttattgcactctgggaggccaaggggaaaagcacagcctgttcaagtttaggaacagggctgcgtatcattggagacttcacagccatgcagtgtcgccatcccagcagcacgctttttaatcggagaagaatttctctacctgccaagtacttttccttgcagctgctatcatcttgaaaggtacatcacatgatgacatttcaaatcccacaaaatggcttgcccaagtcaattcagcagaggctttaactttaatatctgatcactttctttggaatgctatatgaaaagctgacaattttcaactaatttgtgagtacaccagtttgagttggttaaaaaagacaaaaaaaaaacaacaaaaaaacctcttcattatagattacttaaaattcctttctaattgtattagtttcagtaatgatgactgcagtaatttaaaggaagctagcaaagttttgtcaaatgcctttcagggttcttgctttaatgggaaaattaaatcttctttatcagttgtagtaaatagatgctcaactctttgaaaatggctcctttttctaagtagataaaaaaaatcctgctttgtcttattttaatattggctggattagtaaccattttgctccttttgcaaatataaaaatatattgagagacctcccaattttacaagtaagaaggcctacatcaatgaggattgaggggagagggaaagagaaccagcataggttgaatgtctgctatcttatttaacttcatcttcacaaaagctgtttgttggagatgatagagccattttccagatgagaaaactgaaatgaagtaagctggtctggtctgtccagtggtgttagagctgaattgaaatcctgctttatagagcccccagattggcattccactacctttgctcccccatgctgcttagctcacattggctgtttgccataggctgtctttctctaaccagaagctgctggtcttgtagcacccagagacttgtgcaaatgtcttctgtgagcaattgtaattgagatttccaaatgaaatgtcagtctgctcaccaggggaatagtattacaaagccagtggcccttgcgataccctgtgttttcacagccctcagggccttgtgttgaaaatgtaagcaggcattgctaagaggtctcagtggggctgagtgagcaatgcttcttgcggggaactttatggtagaccaggccaaccatgatgaggactacctggccagctcagaaaggcttcttggtgcaaatctcactcttaagttcccagtgaagtcctctttgtgtcttcgtaggtatggtacatggctgtaattgaatacattaatcctgtggcattttcacccattagcactgcagcataagtccttagaaagaaccatgttttgaggaaaagtgggcacrgggaagacaaattccaatataagaaggaaaggagagcagtctgcagtcaaagaggcattccagagggcactggatggtggtagggaaacagggatcctctgaactcagttggggtgaggaataggagaaacttccctacttgacaattttgcctaaggccagctctactcagtaagcctcctgggatcagcttgctcacttcaaaggatctagaccatcagaagaacaaaacaatatttccctctgtggcaatgtggcattgcagctgtcatcacaattgtatccagaaaagcagcgtattcaagtggcagcttgttccttgaggcttgtctcatctttgagaaatacccagtgacacctctcagaggaaatccctcattccagctctgtgtgatcgtttctgcaggcagcaagcactttaggaatatgttcctgggcataatgagccctccgatggtgttcaccgtgtttgttcacaagagaacccagccagagttttgtgagagaccagacagagcttcttgagcccagcaacaggaggcacagaagaatttctggttgtttccttagacttgtaagaactgttatttgaggacttcattgaaaccagtctttatgtccccaccctttccatttccttttccttttaacccacagactgctgttcactgttgtagaatggagttgatgactgattaaaaaaaagtttctgcaaccttccattgcatgaaaagaataggatgcaatcaaggaggggggggtggtggaggagtagaggacatttccctgttctctgctctccccaccttggacttacagaatcctagacctgaaaggagctttttttcaagcatgtagctggcctaattctcaaactgaacagatgaggaaacggaggcctagagagtggaggtgtttgcctcaagtgacactgatggctgatgascagttccatagctggcatactttgttcagctctgcagacgatagtttaaggcaaggacacatgacaggaggatggctgggaggatcgggagcttatgacgatgttttgaagaacccaggactgtcttgtcggtaagaaagaaaatgcttcaagggattataaagaccatcctcaaacatttgaaccgtttccacactgcagcatagggagatttattctttgtaattgctaagggcacagctagaatccayggacatatttatatgaagagcgagtttgactcaagatgaggaagatgttgatctgccttcaatatgagcctggaatgcctgaaagagtagtgagtccactgccttggaagaaccaactgtccctcaaaaaagaggacatgttcaaagaggtttctacatggggaatctccttttcaaagctaaagtgaatcaacaagattctcatcagagtccctaagagtccccatcaaatagggaggtaagtggaattaatgaaaaacgctgaaggtatcagtttctgcaaagccagtcatctccagagcagtgtatgaatctagatctaccacaggctttggggtcgttagctttcgctgttgtggagcccagataggggatagctttgaaagtaagggctgctgctacttataggatgaaagtggaaatgcgttagtttcgattttgggtaaacttgakgatagggaaaaaaaaggcacccatggctgggatctctagttttagtccaaaggtggtaaatcagtcccaggatagaaagactcctgtgagcccagtagagaccaggcctcagaaaaagccatggccactgctttggaaaaaacttttttttttttttttttttttttttgagacagagtctcacactgtcaccccggctggagtgcaatggcgtgatctctgctcactgcaacctcccaggttcaaacaattttcctccctcagcctcccaagtggctgggattacaggtgcccgccaccacacccggctaattttttgtatttttagtagagatggggtttcaccatgttggccaagctggtctcaaactcctgacctcgtgatcctcctgcctcggcctcccatagtgctgggattacagacatgagccactgcacctggcctggaaggaacctttaacagagacttttatagatacctctgaggtttaaaggccactaaggagaagatccagggcactggaatgcctgaaccccagaatgggctgatgaaataaagtcccctttacccctggttccatcacactggcctgccctttgcctgttgtggcctctaacctgtctatcctttaaggttcagactcttgattctaacttgttatggctatgtatcttatttggaatctctaatgcttgaatctactgcttccagaaagctttcctggccttatcaatctaccctagagtctcctgcttctgagtttaggggtgggaacaggtgacaggcagtatatcaggacacaaggaggtctcaggggttaccctgtcactctgggtcgatgcttgggctgggtgctgtcagcttccctccctagttgctataagagtgccactgtgagtcttctcaaagtgtctcccgctttgctccctctcttttactgtcatgctcccttctaggatggacctggatccccagcccattggaataggctgttcccaagtttgggtaaacaccatgtccaagacacccttctccctttttgcagacatttcttctatatacatttctcaagggcccactgacctcttccaggctgatgatgkgtaacccaaagccttgagctcattctcactgggtcattcagtccatcctcccagaggactgcttcatcaattgctttgtttgtgcttttccccaggatctcagttggctttgagatgtttgactcatcgtcagtacttcccaatttcctcctgaaggtaccaaccatgtttgctaatttaaccatcagatatcccgtccgagttgctcatgagcatgagaaaacactaacgccttttttcccgtgggtggtatttgttggcttgtaaatctgaacaggaagagtacatttatttggagaaactatgaaatgcctacccttgaagagtgtttttgttgggggcagcaagagagtctgtatgcccataagtaccgggattcaggacttgagatcaggctagaggccagagataaggacctctttctaatctttgctgcaaatgaaaatggtcaataaatcagaactatttatggaatgcctaccatgttcagataacaggagaatgagaagttataaaaacaggcaaaaccatcttgactgaaaacttaacctaccacttgttggaggcctttgggactaaatctcacaggggtgcttgttgtctagaaattgagaacataatttagctcctgcttgagactgagaagtcctttgttatgtttattagatggggctgagttttaggatggcagaaatgcaaccttaactttctattcagcacctttaatgtatttctgctgaatacagaagacagttaatgtctctgaccccatttttttatttggagaaaagatctagcaatacctacctcaggctgtagttctgagaagtatattaagttcgttttcacactgctatgaagaagtacttgagactgggtaatttataaaggaaggaggtttaattgactcacagttccatgtggctggggaggcctcaggaaatcatggtggaaggcaaagggaagcaaggcatatcttacatggtggcaggatagagagagtgagggaaagtgccacacttttaaaccaccagatcttgtgagaactccctcactatcatgagaacagtgtgaggaaaaacactcccatgatccaatcacctcccaccaagttcttccctcgacatgtggggattacagttcaaggtgagatttgggtggggacgcagagacaaaccacatcaagaagtaaacaaaacattgtatgtcaggcactttgcaatgtacttggcacccaataggcaccaatgaacagacgatgctattgtagctggaccatcattgccggtgcctcctgggaagcagatgggaaacagtgttcatgttgtgtcctaccttgtcccatggaaaatcctgattttgagttctcttatctctcagattttatagtgttaagttagcacactgtagacagggtacatggaaaaatgtctggtgtccctgacacaagaaaagggacaaatctctctaagagagccatctggggtcttgtattgatgaaagcagtaaagaactgtggaaggagagaaaagctaagtgtctaaatgaagagtttgctacacacattctcaagggtgaagactggacaagacagactggcagaaggagaggagctaaggggtgatggtcccaggaragaatggtgagcagcatcaagggtagtcraagttgaaatagagaaggacaagccagttataaaatgagttgactggggcagcaaggctccaccttcttcccagtcagacatcagaacccatagcccagactctgcatgtatttaaagggactagaagacaatatggacccaaaagaggacagtctgcccakctttaggaaggagtcccctctcattttccttgtggatgctgtccatggaagtagacagccctcaactttcttcacagagcaaacttaccttcacctcagttgtgtgcctcacacttacatcagctcaaatagcatgaattctttaaaactacagaaattgttattgttacagcagtttgttcccaaggaacaaaggccacagcaggctggtattattttaatttttccatgacccatttatcaaaaataatgataagatttgaaatagatttcaacatggttaatgagatatttgcaatgcagtttatccgaagtggaagggcctagacatctaaactggttgtctggcaagattaaccttgtgtactttgccccatcttttgagagaaagatctctctaaatttcaaagaaaaaggcatcatttatttgcaccygaatggtacatttctgttcagaaaactgaaatcagctgcatacacagaacccggttgggacaacgtcaccactggggagagggtgagacaggccagatttatgaatacccaaggagggaataagcagatcaagatccatgtgggtacagaaggagatctaaatatgctacacttgtgaaaatttcatttgaataaggaatcaaattgcatcattttattttatttcttattttttagagatggggtattgctctgtcacccaggctggagtacagtggcctgatcatagctgactgcagcttcaaacatctgggtgcaattgttcctcctacctaagcctcccaagtagctggggctacaagtgtgtaccacaatgcctggctatttaaaagaaaaatttgtagagacctgggtcttgctctgttgcccctaggctggtcccaaactcctggcctcaagtgatgctccaccttggccttccaaagtgctgggattacaagtgtgagccaccccacccggccctactttatttatttttttttttttttggagacggagtcttactctgttgcccaggctggagtgcagtggcacaatctcagctcactgcaacctctgcctcctgggttcaagtgattctcctgcctcagcttgccatgtagctgggattacaggctcgcaccaccacayctggctaatttttgtatttttagtagagacggggtttcaccgtgttggccaggctggtttcgagctcctgacctcaagtgagatgccctcctcagcctcccaaagtgctgggattacaggcatgagccaatgtacccggacccggccctacatctttttaatgttatgtctattctccttaagactgaagttctgtgtcttgctcttctggtgtatccaattagaagttgaagcaagagatgatcaattccatttaacaaaagaatagagaaaaatgtgtccgacacagcagttgctctcttaaaacaaagtgctatctcatgccttgccctgtagctttcataaaagtattttcaaagtctgcaaaaatgggcaggaaaaagtaatattctggaaaaagtgtatgaagtgggtaaggatgttggcctggtgggtctgggtatagagctaacactgtatagagtagaattttctaagttttaaagtttccccaattgccagagctcaagtatgtgttgtggattgcatttttccagattcaaagctattccctcctttaacattcccgctgtcttcttttcccccagtacgtgtattaatgacccaaacaagaaagacttcatgatggatggtgcttatttaattggccaaaatggaacgatgtgcactttcggaatccctttaattcttgagactaatctacatattggcaacttgtcataagaaatgggtagcaaacgctgaatcaaaactttttaggcttggcagcagtaaaatggcaatgtattaaatattctcttaggagactggagagtaaccattgtataagtgtaatgcagtcatggtaagataatggattaaatggcctcctttaggatattggctttgtatatctcatgtattaaaaaaaatactctttctgattttaatgtgtctctttaagcacacacaaaatggacaatggtcagtaatgagttactgcgttcaggatgaggggatgtttgcaacctgttctgtgcatccaaattccagcctgcctgtaggtttcctgctagagttcacaaggcttcatggctaaacttcctggtggggcttggaatgaaattttcccaggagaccacatggtgatttggaaccagaagagcttgtttacataagatcttctgcatgtaccagttgagagagattgggaaggccactgaaatttgtctctaagaaatatgaatgataatacttggtatttttctttcaaagagattgtgaggactggacaaagtggtggtttgaaaatatttcatatactgcaaagccttgcacaaatattgttattatgattataaaggctcttcctggtctgtaaaaaaaacattttcccaagtcctcccctatcttctatcagccatagtgaatccctgtctattcttagcatgtttgtgcgagggatatgtgaaagcgttggtgtcctcttgtccctctgttaaggactcagacaggatgccgggcacatttgtatccagacatcgttgagatgttttgaaatcggtctggtaagaaccaaagctatgtttccaattaattttctaagtacaaatatgctcaaagtacatttttttttaaaaaagaattcaacaataaagtatggcttgttgctgttcgactgccagaaactcgggatctctatgagtttcactgatatcaaaggcttctgtttaatataactttgtattaaagtgggccttactgtcaacctagcaaaacctcatgtttaatctcaagtttagtgtagtttttttattaatccaatgtgcatctgttaaaaataactccagataatgcaacatttgattaaatggaacttaatacagccattagctggtgggattttttttttccatttacgcattccaagctgagcctgataagatggcactaacatttagcctgaggtgtggaatgttaatagtgggatcttggacagtttgtttattttttatttatttcctgaatgtgccactcacagcaatgtgccagatgggcggcctggaaggcagaaattctctgtttagcctcggagccccaagaaactggcagattagcccccacccccagggcagccccagcttggtagaaaaaggcagaggggtaacattaaatcagagctgcagtatgtttttgttcttttgtcaaaggactgtgcaagtaacatgcttttcagggttggccatgcaaataacatgtcaagtgaaactttaccacctttttacttaggctatatagaaggaaggcctaaaaaatgccctggtcctcttgagcattttgagcccaggctgtcctggtggcaataggtttcctctgttgagaagtcctgcagctctggtgggttaggaccaccctccgcctggcactgagtgggtactctgtcacttcttggagccattaggctgaacagtagccagagaatacagaggccccattcattttgtcggtgcacatttattgggtagttactgtgtgctaggtaggatactaagccctgaagacagggcagtaaaaaagatagactcagtccctgccctcatggaactgacattctatctaacatctagctgctagttgaggatgctgcccatctctgctggtttgtaaaatttggtttctactctattaactgaatttcagctcactgaattagacttatgttccatggaccagttggtcttttgcaataattcttatactggtatttttagtgattttatgttagttttaatttcttcaagataaggattttggtttgatttgattcaacagttatttacaaacttcctattgtgtgtaagacttgacattcttcactactyccagcctctcccagggtgaagaggcaaaatgtacccccttccctcttgcctagcccatccaggaaggccgtcaagaaagggcaagttatataccacacgatgctgtcacatctaaaaggacactatccacatcacagagactgtaaatgtgtatttttatagtggtttcctgacagatgatgtgtcttgttctaagaaaatcattgtatgttaaggatattaagaaaatgtcccccatagcaaatgaaccttgaatcagattctttaaaaagaatcacattctttttaaaattagtataaagacactctgtaagccagtgggccccttgctcctttcctttcccttgtatcagggaccaggaccattcttctagttcattactgcaacagaggggaaaaatagtggagtcagagtggattccagttttaaccatgcaaatcaaccagctgtgtagcttcaagcacaacctataatcattttgagcttcaatttcctcatcagtaaaatggggattatccccatacctcatggagttgttaagaagatcaaatagagtaattctgggaatatgctctgctccatgtgcttgaactcaatggatgttatttcaatctggttgctggtatggggacagaggtaaggaagggaagtggggcatgaacctgccaagagacttgatgggagacagatcttacttctgtgtcctctgagtgactgggtgagttcgggggaccattttgtcctgggaaggctcatcactgaagacttgaaaacctctttcatttttagcaattcagagaaaggcattcaatttttttttattttcatcctggggattgcagtttacatgtgcaagaaaatgagggtgtcattctcctagttcccaggcacctaggctgattcattgcagcattaggagtggttaatggcaattgaagtagcagcagtttttggcagcaagcaggaccccaccagagaccctgggtaactcccaggtgttattgcaacctgtctggctttcgatggagctcactggttttcccatcaagctatctgccagtctcctgctttcatttcctgggcagagattcagaggtcagccggaaacccctttgcattgctgcagaggggctgatgcatccattgattctcatatttggttttgatcacagattgaaattagattgcttcctttcctggctgggattatgatagcactctgtagtttaagaaaatttattcactgtgcgttttgtttcttgaaaagccagataatttgtttctgtcctctactcaaagaaactcagtgaggactggccagactccaggagtaatgaggtgatggtgagaaaaacaccacccaaagacatgaatctttattagacccttcttgttgtgttggtggcaatattgcagtgcacaaggtgatgggtcttgatttccttctggcttgactggggtcggctagttccctcttgcggggcctttgtatcccagatggtggaatgtgtctaagtttggcaacccatattcacctgatggaataacacttccaaagtgtacatacaactgagaagatggagggggtttagcactcagttctgggccatgtgtagatttgtgttttcattttcaagttgtcttcaagctcctctagggaggatgagtggatggaagggaatgttttatctgtatttgtagggagcttcctgagactccaaaggctggaatcctgtgactgaaacttgttacaaagaataaagtaatagagaggtgttcaaacccaagaggaggaggatggttcccaaaatttctcagttcwtcataccctttgtttctcagtcattttttttcacaatgcctctaggcgaatgattgcatgtacacacacacacacacacacacacacacacacacmgttctgtttattaagtagttagatcccaataagttaatttatgtcttaacagcttagtagccatttgaaaaaataggtatacattgaaagaaaatgtttttattaggccaggcgtggtgactcatgcctgtaatgccagcacttttggaagctgaggcgggtggatcacttgaggttgggagtttgagaccagcctgcccaagatggtgaaaccccatctctactaaaaatacaaaattagctgggcatggtggtgtgtgcctgtcatcccagctacttgggaggctgaggcaggagaatcgctttgacgctggagtcggaagtttcagtgagctaagattgtgcgactgcactccagcctgggtgacagagcgagattctgtctcaaaaaaaaaaaagtttttattcttaaataaccaaattagttaccagtgagatgtgtgtacctgttgggtactgcacagcatcacaaatcttggaatcaggttggacagtaccaccctgtttttgtgttccccactgattttcatgcagtacttgctttttatcacagcaaccactgaaatctcacttttgaaaagatatggcataatcagaaggaatgtagcatgatctaaygttgacactgagaactacattgacctactggtttgcagagtgacagatgtcatgtattgctgtattttccttgaaaatttaacatatttcaaaattaagttcaaattaatttaaatgtcccacagtgttcctatgtgtttgctgtggtgacccagggcccttcagcatacagctgggagcctagatcctgagcacaagatgctctcagataatccaaaacctggaggaaaggagtgcttgtctagtctcctgtccttatagtggctttcaggctcacctctgacccaccactaaaggaagatgcgccctgcacacagtgcatcaaattttatgattctagagggtgaagtgaaatctggctacgcaccgcaactagtagccctgcactgggttcctccttggtagccagctccaacaggtactgtgggacttgtttcttgtgctagcatagcctcgacctcaaggaagaagcartcttggggagactgtcacaagctcaaggtggacaaagattctctgtctgaaggctcacaattcaaactggtcatttttgcagaatgcttctctttcctcggcacaaatgagagaaattgaactggattaagtaattaaacaatgattacatttaattaaattaggatttaaaaaaaaaatttccactcggatttttctaaagtggcatcattttcaagctgaacaagaatacgccctggaagtacaggaaaagacttctgtgcaaaattggcaacagaatccctaaatgcaagttctgggggtctagggattaaatgagaataatttaaatgggaaaaggccactttgcctccagtggaatgaaaacctttttcaaggtttacatttctgacaattttggtaaatcttcatgttttgatttgactgccagtgactggacattttcctttggaggcctagggcctgaacacattctgtcaagtttattatccaaggaggagattcctttcagtcccagatgggtgtgtggtagcaggtgggaattgccattgaaaagttgggagaccctaaatctcttttcatcagatctgaatgttggtggcaatatagaaatgcattgaagtgtttctaacaaagctgccctccctgcctagcattcagagggggaaagagggtattttgcaccatgacaacaggtgacctctatttggaattgtcaacaaacattaataggccttccaaaacacatacgctgtaatataagggattggttgcctgaagggagggcygggtattcagcagcactggggcagctcttacaggatgtcagcagacgtggttaattggtaatgattagggctgtctgcaagctgattccctaagtttggtgaacacataattgttgtatgtaaccccgagcggctttgctctttcatctatatgaagagatcagaaaagagagatttacggcttaggttgccccaagccacacatagcaggcttaattttcctttccaagggaatttgaagactgctgttgtgactagttctctgtggcttatatggtatgttgaggtcacctgcgagtttttgttaaatgattgattgactgaaattaattattctgtcagagctgtaatggcggtaagatggggtgcactgataaatacaaaagctaaagtgattcttataaatgcactatgtctctttctatttaaataaatcagacagaatacmtagatcctggatggtgttgagtgtcccctccccattttcctctatagccctgagctgttttctttccaaatctgaagctttgaaatgagcggctatttactcaatttaactgcaggatatttgaatcctttgtcacttcattccttctaacctttccccaaacacctcagcccctgataagaggctgatgcccatgactgccttagattaaatcaactgaattgagagtctgtgtttgagctaatggctaggcaacttggggaatgtggctggtgagttggagagtggatagaaggcaggtgtttgcttctaaatgtcagatttctgaggcatggaaaccaccctgtagggcccttttaggagggcagtgaaagcagctgtttagtgacagactgtctgcagtttgggtccttaaatcccatgaagggattccagtggctggttaaggaaatgccaaaatgactctttcgattaccttgcaaagggcatgagattatttataagtgatgtatccaacttacttccaagtcactggaaacgatcgttagaaaaagccttttcccacacaggccctgatcatgacaaaggttccaggacatcttctgggagtggcaccaggttcaaaatgagcaagaacacaygggaggtacagaaaaagacttgtgggcaaattggccaagacagcagaataacaaacccaggtctcgcgtgcggtatgcctgtggggaaaacatctatggagtagggtcgtctagtcctttgtgtaagtgtgaaaaacttgttggcattggatagggtgatatgcttcccaagtctgttaccaacactcctaagttaaaagtaaacagcagtcacttgcttccttggttcttagattctagtgtgctcttttagaatattctagagtgcttgttaaatatgcagattcctgggaaccacctccagtgagtctaatttcttagatatgacacagagcttgggactcttcattttcttcagtaagttccatggtgattttggtgcagattgtcccaactgtccagttctttatttaacaattgatcagaccaggggccaagagaagaaactacagctgttccatttgacaaaaatagccctccaaaaggcctgcgactagtcaacatgcagatggaacttcttgagtttgagtaattttacgcatcttaagatcagccctggctatttcaatgccaatcatcttgaggtataccagctattgaatgcatggctccctgaatatctcagaaaatgaaatggttaaaataggaggggtattgaaaattgctgtttcttgttgatagttaaaatttcattggctggatgtgatttaagcagcaacataagattcatttaaactgtcataaattaagacatcctattatggagggaaattttttagaaatctttcccagcaatttctaaaaagagtaggactaacttggaactctttgtagtcattcctgctaaaggtaagaatgggcgtgctctctctagtctattaccctgtgatttagttaggtagagctcagacttgcactgctccgaacaatgtgttgtgaagttaaattgaaggcctgaaaaggtatgcatatatcccactactttatgaactctgtgactcataatgccttacaatatatttgaaagcaaattaaagactttataaaatgtttttaagtatgcccctcctcttttaaaacatttatggcttctataaatgctatataaaatgctttggagagtggtcatcgctggactaaggctaggttgcataaatatttagttagagatatgagcgtgtttcttgaagctgtacatgtgtcggagtttccttgctgttcctgcaaagtcaggcctgttagcaatgtgatggaagataaaggaagcggggagccaagatggaaatgcatatttgccatcgcaggggatagtgctccattaaagtatcactgtttttgtttctgtacttaaaaaatttaaacatgtctttgattgcagactgttttcattgtgtcattttaaataataattaggctccctgcttcaatcattctcttttaaagtgatttcggaagtccatgactggaaagatccggtatttaaaggaaaggcacctctgaggctaacaactggtggtgtcatttgaccaagaactttcccagaaaattcatctggggatccttaggctcttttagaatattgagttttgttttattgttatttttaatcccaaatacaccagatgttattattatcgcatatctctgggaagagaagaagctaagatgaatgtgcccttattttttatgtacttctagtagctgtgcaatcttcaatgacagtgaacagaatatatgcccatgaaactgaccagaaaacaaaaatgtgttgctgtctgcaatgtgccagtcactgtgataggcagtgagcttcaaaaatgagtaaagcatggccctagggagtcagagatccaagcagaaaattatagtaaaatgtgataaaatgtgtataaggagaggcctgcagcaggagaagctaattctaactggagctttcaggagaaatgatgactgtaaagtgaggaggtagaatctgtgtattcattatttagcttgaaagcactaacttgcgtcaacccatacttgatattttgatggkggacaaataatggcatttattcaggcagggagtagagccagtgcaaaggtacagagacttgaagggacaggatatagcagaaaattagtggtgtgcagtattgcttgagcaacatttgcaaggaggttggggttaccactgggctaagaggtatacagggactagagtatgaagaattttgagtctgttgcagaagtgcttagatttggcctgtttgtagtaggggaaccactgagttatttcggatggacaagaacaggataagatttgtgttttgagaaaaagtttttggaatcaggagcatctcaattgcatcccatgcccttggaaaatggaagggaaaatctgaggctcctaacacttctttcytgacatctgcttccattatttttttgtcatggggcagtcagggatgcctgggctctaacactgtttgggtatccggrtacacaaggtaggatgaagagagaaaggaatgaagagtagaaaaatgaacataatagaattatgagcttgaatctcacataggctcacatgtccaggcattattttgctgctttgataatacttgtggcacacatgggaatcctgaaaggtgcaaagtctcatgttggatctgtaagatgtagcttcttagcttatgaggcagttggaaaacgttaggctttgttctctccagtgcttaagttattcactggaagtgctctagctaccatatcaacctgtctctgcagacagaccatgggtcagacacttggatggaaagtccaatatgtgcttgatgatccagaaaggagttatatgaaaaaggaattttttatcaaaaggccacaaaatactctatcaaacaaagtcaagcaagcttcctttctttgcagcttctcaagcctttaatgttccaaagtacaatatgaatctccaagacaatgatggaatgtgtcctaattttatataatttcctaaaattatttgtgaaaacttatttttttctacaaagcatcttgtgaaacttgtgtttcctgggatgctctttggtcaaagccactcttgagattcatttttacaggcctcctaattgtacattgaatggaattcccttcatcaaaagttgtgcctactcagttcctaaaatgccagagggagtgaaaaccagaccattcagcaaaaacaaaaggtgccccctactaataatttgacatcatgttggtgaaacaaaggcttgcattcctcccattctaactggttgcttttgcaaagacacaacttccggttctggtgggcagaatggggtctgttgggaaggttccagcaaaaggcaactcttcttgaccttgtaccattgaaagtcamagagctattaaagtagcgaccagggcattcagaagagctgtgactaggcataatgtgccttttgagggtgaccattcatttgtccatctaattagcactcagcacctttgattgccccatacatctttaaaaaattcaaataggtagtgaaaactgcttggattgcagggctcagatgaaaattgaggcctggccttgtatttatggaggtttcttctttccaggacgtcttacctgtttccttagccctgttctcagtaatgcctgccacaaagaaccccataaatttagcatttgcagctataagtttgtcattcttttcttgaaataagataagggtactattataaaacagcagaaggctgaatgtgagagcagccracatattgttgactgattcatctggggcatttagttcttcaaaatggaaaaacaaaatagggtctaaaaagcaaacacagtaaattaaaggaatgttattctatgcatagaacagctgttttaatacttgcttggtagggtcatgtgactgacccacttcttttaggataaaatatgtcttcctctaaggttattattaaagacacatggagacatttactttggtctccttgtcagcattgtgccacattacaagaaaatacaaaacaccatttaaattgggtttagatccttcatttgcatgaaaacgatagttaattgtgtccctgtgatgataattagtgttcagctaagaggaccttttcattgttggcccgaggtgaggcctgagttactaagaattrtactggtggtagctgttttcttttaagtaactgcacagctctgtctgttttgccaactggcaaaatgaattaacaggaagtgaaacatttagtgtttacatgagctaggacattgttacccaacacaaggagaaagctcactttgggccttctttggttatgggatgcttattgtctaatttcttyagcaaacatggagtacctactcaatattaggacctggtgtgccctgcacaattagaagctctcagagagcagggactccacagtagcataattgaaatctctgttcactttgaatcctgaactagaaatgttctcacccacctgaggcttgaccatgttttcagagctgccacgtggcaggaaaagagtccaaatctgctccttctgcagtgatctctccctgygctacttccttacactgctttgctctgtaccagccattcaggaagatttatcaagtggctagttattatagaacaggacagaatactgggccagatcccccctccatcccacttaactgtgccttaatcattaagtgttctccagttgacctctctgtgaactcctaaaaggtcaagaccaattctgtttcaccttagaacatgcaattctgtagtgcattacatgcatgcaattgcattatatccaacgtgtaataaatatgtgctgaatgcatgaatgagagaatgaatgaatgatcttgccrtatttcaacttagcacagggtccattctctacctttgtgacatctagctacatcttgcgttgtcttctggtggtagggtcctggctaccttatggtgcaacccttttctctatgggcaactctgactgtaaaatggtcctttctctttttaatatccagtcagctgtaacatcacggggtctacctcctgaagccatgtggagtttggtctgattcctctttcacataattcttcagctattggaagacacctggtatatgtttctcatctccatatttaacataacagtttcctcagttggtcctcatatgacatggttccccaatacatctctatctttaatgctttcatatcaacatagtaatttaaccagtggtttaaaaaaattattttattttgttttaatgagcgtggagccagaactgagcatagtatttcatgaaggaatgatcagggcagaatagatacagatcattgccttcctccatctgaccttctgcttatactatttttataattggggactgtacaattcattattttattgcatttcattttcagcagtcatgccattgaattgattcatacaaactagcggttatctaaaccagtggttctcaagtgggggtgatttttatctccctggagacagttggcaatgtttggagaccttattgattttcagtactggcggttggttgtgacactaatatttagtgggtagaagccgtggatatggctaaacatcctacaatgcacagggcagcccttccacaataaagaattagctgtttaaaatgttagtagtggccgggtgcattggttcacacctgtaatcttaacactttgggaggccaaggaaggcggatcacttgaagtcaggagtttgagacccgcctggtcaatatagtgaaaccccatctctactaaaaaatacaaaaattagccgggcatgatgacatgcacctgtaatcccagctactcgggagtctgaggcagaagaatcgcttgaacccaggaggcagaggctgcggtgagtcgagatcgcgccaccacactccagcctgggcaacagagagatactccatttcaaaaaaaaaaaaaattgttagtagttccactgctgagaaattctggtctaaactacacagtctttgtccttggggcctcctgaagtagaccttgatcccaggctacatgagatcttgcaaatctttaaaagtgattcagtaggaccatgtccttgtaggtgaagcttttccaggccctctgtcaaccatttcttccaagacttctactttcttaactttctggtcacccaccttgcagttagagcagtgctcctgggatggaatgctttggttgtcatctgaagcctaggacagtgcttctcaaactttactgtgcctagaaaccacctggagattttgttaaaatcacattctgattcagtgggtctagggtggaggaagactgcatttctaaaaagctcacaggtggtgcctggggcagaaggccagtgggccgcactttgaggaggaagagtcttagcatgttttctcttggcattgtttggacaaaggctttttccattcccttggagcagagtgcaagcctcttatgctgggaacctttgactgtcacactcagccctggccatgtgtcaggacagagtagttgagcaccatgatgttataatgctgaagaagactaatggcctgcttaattgctgagcagtgtttataacttacaggtctttgcatcgccctattctaggttaaggagaaacaataacaaagcgatattactctcctaattgaaagttggagggtggaatgaaggaggagctgcccccagtcacagacttggaggaatgaactatccagttgtgagctggtttctccagattatgcatatgtttataaattatcctaggtgttctttttcctcattccttttattgtagagtgtatttctttaaagtgacaggttttatttttttccccactctgtgcagatttcgaggatgatgtagcttaataaatcaaactgatttctactattgtatgaagactccttaatcagttctttgaattaatgcaatcaaatggttgaattcttacattcatctctgtatttatggctctgttgtgcttttttattgaattggaagaggaatatcttcattcacagccaaaataaaataaatctaggcagsttatctagtaaaatgactaagrtatagggtatgggatgtgtatgtgtgtgwgcacttgtgtgtgaatgtgtgcctaaaaatacagatgtcatctgtgtcgttctaatattaaattttgttttggaacttcatattcatgaagccagcattatgtcaaactctrtgataatggtcctgtttttaccaggtcatgaatccaggggttctcaaacatgttcaagaagcagggcatttgaaaattatggtgtttcttgagtgataccatggatttcrtatgccccggkttaagggcacaggctctagagttaggcaacctagaggaattcccgtttcctccatggactggctatgtgaccttgttacttaacttctctattcctcctttcccttatccttaaagtagggataatactgaagtgtctatcttgcagaaccatgctgaggcttagarccacaggcatttacttgtatccttgacacccatgcagcaagtatgtgctacgtggagaccattattagtattaacccaaacttaaaacggctaaatatagcattttctgccaaatcagaaatgctatcttatggcacattctctcagagacaatagtcacaggcactgaggatgtaagaaaaatgattagaggacaataataaaattgaaatagtgctatcctttaacaaattgggaagctatctccattattgagttttaatccaggatcttggcagacacaggagtttggctgagagagtttgtgcattagccctaccctgctttttcacgtgctctgaagcatcctgaatctacaacatgtgatgcacattgaaacctctttctttctgattttacaatatcagtatggtacaccgatcaattaaaaatactttgtaaacatatgtggagtaagactccacttcaaaaaaaatttttttgagacagagtgtcactctgtcacccaggctggagtgcagtggcacaatcttgccttactgcagccttgacctcccaggctcaagtgatcctcctgcctcagcctcccaagtagctgggactataggcgtgtgccaccaagcctggctaatttttttttatttttagtagagatgatgtttcatgatgtttcccaggctggtcttgaactcctgaactgaagcaatcctcctgcctctgcctactcaagtgctgggatgacaggcatgagccactgcatccagcttagacctcatttttaaaatatggcaggcatacatctgaatgtatgcatgtttaatggagctaatgatagaaacgttagagagtgattattctaattactaaacaattcacaggatttcttaccacagcaaatgcctttcatgtctactttttgccagtttataatatggttcacaaacataaaagttctctgtcttaaaattctgatgccattcatcgatctagttggatgagtttttattacttgcataagaggggattggggtgggatggtcatatgggtttgtaggcatctacaaacagcatgctgtaaagtcttatttcttgagttttcaccagkagcaatagtcttattgctaatcgacttcatcataaaaattgtacttgatattggatagcatgccacatattaccaaccactttcacgtgtatattttttctttttctttttcttttttttttttttctttctgagacagggcttagctcttgttgctcaggctggagtgcagtggcacaatctcggctcactgcagcgcctgcctcccaggttcaagctattctcctgcctcagcctcctgagtagctgggattacaggygcctgccaccacgcccagctaatttttgtatttcagtagagatggggtttcgccatgttggccaggctggtctcaaattcctgacctcaggtgatctgcctgccttggcctcccaaagtgctgggattacaggcgtgagccaccatgcctggccaattttttttatttcgtaacgcttagtgaccccatattattagtattattatttttatttatttatttatttatttatttatttatttatatttagacggagtttcgctcttgctgcccaggctggagtgcaatagtgtgatctcggctccccgtaacctctacctcctgggtacaagcgattctcctgcctcagcctcccaagtagctgggattacaggcatgcaccaccacgccagctaactttgtatttttagtagagatggagtttcaccatattgtctgggctggtctcaaactcttgacctcatgatccgcctgtcttggcctcccaaagtgcagggattacaggcgtgagccccacgcccggagtggccctatattattattgaagaaagatacagagagctgaaatgatttgtcgaatgtcacatgacttgtaagcaccagagctaggtctcataccaagttctgcttcttccaaatccgttgtccagcttgttgggtatgtctgagtccctgttagccacaatgccataattgttatagtgttcttagagtagagctcagagcctattatgttgcatctgtatctcatcctcacctcttcttttgttggatacatttttcatgatttgctgaggatattgtggacttagtgtcaaatatttttcaggtcagaagttttgtagcccttggaaatcaaccaataacctatgtaaaactggtgccgatgtttctgctgagagcttcagaactgctatatcaattagcttttgctgggtaaaaaactactccccacaattagtgacttaaaacagcaaatatttctttagttcccagttgtgcagattggcagtttggactcrgttggatggttctttgcaatcagagcggtcctggctcttcttggctggtctttctcacaggtctttggtctcagctggggaccctaggatggcttatatggctggggtctctcttcatgtggcctttcctttttcagcaggttagtctcagtgttgttcacatggtggcttcagagttccatgagcagcaaagaacaagccccgtacctttcaagtctgattctgtcacgttggctacttttttattgctcaaagctagttatgtggccaagcccagagtcaacataagaagggattgttttggcgagaaatcaccagggacacagatacagggagatctgaacaaattgagagccattaccgcaacagtctgttacactgccacatcaagttttcctttccttccaaactttttgagtgaagttctaatgccctgaaaacccaggagatactttctcttcactgaggcatttccttccctgacttcctccatgggacagcttggcattaatgaattgaaagattgtccttagtcagggcttttctgacttcttaatggtgtgcatgtaacttctccttgtcaggtttccctttagaaatgcatgcatttatttggaatccggatgctggagttttctgtttggaaaagaattttaatgaaactttatcaggtgtgtgttcaccaaaatgaagaggactcttttgtgyccagagaaagctatctggcagtcaggagccctttagaaaaaggactgcagaatgaaggaaagctaaacctctctttaatgattttctctttttaaaacatattactttgcatgaaaatttgtgtcaaggagtttagctcatggaaggggaacttgatgtgcaatctggaggaaggagcggacactagatgataattctcaagcagatgaaagagaatatttcacattgctgagacacatgtgacttctttggatgcaaataacagaaaggttgatgacagttatccctgttccctgctctgcggagaaatcaccagcttagcaacactaaatggcaaggcatttgtggctgagttctttctctgactaattggaaacacatctctctattttcctgccattgagaaagagctactctttggtaaatggtattcagtggtttacttttctaaaaactcagccctgtgctgagcttttggtcagaagaatggaaatgctttctaatgccagagagcatgagtactttttgtggagacagtgggatccattagaaagtgactggacattttggagtcccaacttggtagaatctcacaagttctgctccctgtgagttcaacaacttgaacaaatcccttctcttctctggcctcagcttcttcacttgtaaaatgagaagaatggagcaaataatttcaaagggtttaaaaaaaatgtttttgaatagagactgcgtctcactcactgtgttgcccaggctgctctcaacctcctgggctcaagtgatcctcctgccttggtctcccgaagtgctaggattacaggcatgagccactgtccctggcccaaagtattttttaatctctgtcaggtcagactataatttggaaaaatatatatttaatttttggttataaatttaggattttgagatttggtgattcggagaagacattgtgaaatacttactgggtttatggcagaggacactttgtaaaacaaaacaaagcaaatctctattcttgccctgatagggattgtgccacccatctctccatgtgcccgtccacccatctctattccatgtgcccgtccacccatctctattccatgtacttgtccacccatctctccatgtgcctgtccacccatctctattccatgtgcccatctacccatctctatttcatgtgcccatccacccatctctatttcatgtgcccatccacccatctctccatgtgtctgtccacccatttctccatgttcccatccacccatctctatctcatgtggccatctacccatctctccatgtgcccgtccacccatccctattccatgtgcccatctacccatctctattccatgtgcccatcccacccatctctattccatgtgcccatccacccatctctatttcatgtgcctgtccacccatctctattccatgtgcctgtccacccgtctctattccatgtgcctgtccacccatctctattttatgtatccatcaacccatctctccatgtgcccgtccacccatctctattccatgtgcccatccacccatctctccatgtgcccatctacccatctctattccatgtgcctgtccacccatctctattccatgtgcccgtccacccatctctattccatgtgcccatccacccatctttatttcatgtgcctgtccacccatctctattccatgtgcccatccacccatctctccatgtgcccatccacccatctctattccatgtgcccatctacccatctctattccatatgcctgtccactcatctctccatgtgcccattcacccacatatccactaccttcttattttcttcatttgttccagacattagtgttaaggtgcttaacttctttaatttatccagctcttgcagggaaacaagacacagtttttaaatagcaaatgaggaaagtgaggccacaaggttatatcatttacccaatgtcctcagatggtataggggaaaattacgactaatccccaattgtaggtccagggctctttccctaagatacaacacttcttttgtgcctcttctaaaatgtcctagaaaagccagaacctgacatctgtttcttaagtttggggtggcccaaggtcccaatctagggcttaattgttgaatgagaaagaaatagggttatttcctttccggaagaatgttatttgagctgccatcctccaccataaatgaagatggtaggtttttgagcactctgtggctagaagaatgatgaacattatgagagatccagaaaaatcaggagaatccctggcttctggagtttactggcagagtctgatatgacagtgacatactcatgacatcacccatgacagtgatatatttgacaaatgagggccccacataataagtagtcattttcatagtacttaagaaaagggagacagaggcccctagcaaccgtgggatcctctaactgccagaggtagtagaggatgcctaggtcccaagagcgcacttaaaaaagagaggaaaagccacttcttcctaagtaactttctctggaaagctgtgatgtccctccagaggggcttaggacagaggttgttggacccggaagagcatatttcacctaaatcttggggtgaaaacacagaccagatggggtgcctcttctgtgtctctccatataaagaaggatatatcctgggtttcgaggtggattcaattcttaaaacagaccccatcatccaccccaggcaattttgtttgatcccaagttcagtaatgtgaagtaaagtttcccagactttaatggcttaaaatgaaagagaatcatgtttttctgtctgaaactggaaatccaaagagttgctcagtgagaatgttcagacttctaccttgaggctcagctacaggaaattgggaaatttgggtcagatgtctcattcacattccaaattgataaagggtgggaacgtttggagaattgtctgaatcataatgctactgagaaagttagaaaatataggattattattccctaaattacttttctttgtgggggtgyggggtgaaggggaggaggttgaggagaaattgtcagtatgctctagatggcagagagtggtgtttcatttagctattccagtgggtggattgtaccagtgtagagatgctgggccttcctgttgtgaagtaactcttgggggaagttggctggtggtaggatatgcagatctttgctactgaaaatggggtctttgggccagcaacattggcatcaccagggagcctgtcagaaatgcagaatcgttgaggccaccatcccagacctactgaattagcatccaccttttaacaaaacctcccagtgacccatacgcatgggaaactcgagaagcattggcctagataatcatccactgggacgatgaaaggcacacatcctctccttcctcccgtcgatcaaaagacgcatctggattggtttcttgattttgtcgatgatgacctaagagaaagggagtttaacctccaggagctgaactcagcagtgggactgtgctgcctcatctccagctactaaccgttctatccaccctgaccctctcactgttctcagaacaggttggaacctcttacgacgttgtgcttgtcccactgcctggaatgctttttctctctttcctcacacatcaaactcctgtcacctttcataagcttgctcacatggcatcttttctgggaaacattcctcattttccccaggtaggattagrtactgtaccttctgtttacttatgcctctaataaattacagtagtacaggaaagtatgcatgtctgttttcctttctggactgggaactcctggaggatcttacaccccttgtgatcacctctgtgtcctcagcccctaacacagagcaggcatgtaatccatatctgttgcatggctgcatgaaaatacaggtgaactggctgtgaatgccttttgtgggactctgggaagttctcgttcttccaggcagctgtgtgggctgtgttaatcataaatttctggatccatgaggctcccaagttaaagactgggtcagcactgagcaaaattgtcaagggagatgggactrtccagtaaccactttcccctctcatgcctggcatacctccgattgccccagactytcatgcagcccctgcactgaggttggttccctgtggctaaattccacccctcccaaatcagagcctacctatctccttaaagagtcagtgcccatttgtccggggcttgctatgcgccaaacgctctacagaaactgctttgtgcacatcatcgcattcagtggccacaacaattctgtaaacataggcgtcatcatttccatttcatatggaggaaactgcagtttgtggtggttaagtaatttgctcacagcaaggtggtcaggcagagctgggattcaaactcaagcctgtctgacttactaattggcactttgaaatgctactctgtgccacaacaggggtaatgaatcagccggggaaacccatgaaggtgctaacctaccattgtacataattgatcaaaacacttgctctgaacagtgagctgttttagatacactttaccagggggaagagaataattacaagtgaccgcagtagatgcctctatctggtcgattctgactttctcaagctctgactagcctttaagacattctgtttctaagactgaggaccactgccacaagtctcagctagttcagggatcctacgtctgtgaagccctgggaagggggctgggagtgtgagctgccattttgcctttaactttgtcctgttagttgagaaacatgccacattattactgacttamgtatttatttttggttgggggatggggtgattttttaaaaaacaatgcccagtgtgtgtgacttcygcacatagtcatgtgagtcacttcctgtttagtggaagccctctttatccacccctacctatccaatgggatcatctcgccttttccacctcctctgtcccctccataaaatatgctcactggtggtcgggtgtggtggctcatgcctgtaatcccagcactttgggaggccaaggcaggcagctcacctgaggtcaggagatcgagaccagcctggccatcatggtggaacctcatttctactaaaaacacaaaarttagctgggcgtggtggcacatacctgtaatcccagctacttggaagcctgagacaggagaatcacttgaacccgggaggcagaggttgcagtgagccgagatcaggccactgcactccagcatgggtgacagaacgagactccatctcaaaaaaaaaagtatgtccactggtgttcctgttcccagtgagaaggcacctccctctagaccttccatactcagctgctctcaccaagatgcagttacgtttattcccaaacttgtttatgccagtttttcttgtacaagattggtaaacatagttcaattaaatattatataaaccaacgaactatgggtacaagactaaagagctgtcattttatgatcactgagttaaatgctttggaaaaatttcataaagcaaatgttaccgagtttttttaaaaaaaggaagccaacaaattatatgagagcaggccaagagagcttaaaacaagaaaggcagaactttatcatctaaagtagcctgtgctcagtttgcctttcaagggtctttatactctgctccattttaaagaaaccctaaactggaaattggcggggggcaacagtttatgagtattttgggataaaaactatgaagtgggactaatcacagggcagccagcaaggaaacatggacctcaatcccggagcccagtgkaactgaattctaccagcaacctgactggggctaagaagggacagattctaccccagagcctggtccagccagcaacttgattttggccttgtcagactcaatgcggggaaaccagctgtgcccactggcttttgaccttcagaaataggaggaaacacatgtgcattgcattcagcagygaagcccagggtaatctgttagagcagccatggaaaaccaacccagcaagcatgtcctcccctctgcttgtgcctatccagaccaccaatcccatatttttcccaggccctttcaccacactctgctcagtatggctttccaggccctcggcactggtgttgcctcagctttgcttttaaaacttgcctttccgctgggtgcggtggctcacacttgtaatcctagcactttgggaggccgaggagggcggatcacctgaggtcaggagttcaagaccagcctggccaatgtggtgaaaccttgtctctactaaaaatacaaaaatcagccaggtgtggtggtgggcacctataattccagctacgcagcaggctgargcaggagaatcacttgaacccaggaggcagaggctacagtgagctgagatcacacccactgcactccagcctaggcaacaagagtgaaactccatctgaaaaataaatgaataaaataaaaaaaaacttgcctttcacacaaactgtctcccctaataagctaaggagagtcactctcacctaaaaacagactgtgcttccrtgcctctgagcatttgctcagtcmtgttcccctcctcacagcctcctagatacatctgactcatctttccaggcccagctgagacccaggcttccctatgcaggtcgcctccttgtgtgactgctgtggcctgctgagaacttgctgctcatgtttccctctgggccttcgtcttctgttgggggtgttttcttctctctctggattgacggcataagaattagtatattgtacgtgatccatggctcctgtgagggactggatgttaccatgatccatacaaacacctgcagagctcttttgtatgtagtggttgatttctggggtccttgctttgagttatctctccttcartatcaagataaggatttgatctcttctaaagtgtcttgtaaatgacttctttaaatgatttttgttccaaagaagggtgtctctctgaacatggagccagcccctcggatttgtggctgcttccattgctgatgtrtcacgtacaatcctgtatgaacatccattgtgtgtactctgagagagtgtcctatagcaccagcacatggggacactatccagggagagatggcaggatgctggggtggggagtaggagccagggaatattttgaaagcatttgacttattttccactgtagctatctattcttcattccatgctaatgggataatttgatcaatgaatgaactgggaaaaggcaggagatgcataaaaagtgtaaaagcgcatagctacaaatgagtgggcagatttaccaccttctccccagaatcagatctgtctgccatccgcaccgggaatgagacaggcagatccgagctttggcttaattacacataatttgggtgacagctgaaatgcaaacctaaacattcaatcagttaaaaatacacaaaattaagcatttcacacagtgtccaaccccttcaatctttattaatactttaattatgttaattataccatggtttcaagccctgctactacaacaagcagggggtggaggtggggaagaggcagtcctcgagctaaataatgattgcattcgaattaaaagtaggaatggaatgcaaagtagcaaagaatcacaaatacataattcagcagtttacccaccctgttcacacttctttttttcctgcctggcagtgtttctgaagggtgggtccaagtctgactcatcctctgagtgtactgtacatagtaagtgctcagtaaacatctgttgaattaatttttcatcaaggatgctgaaattgtatccatagatataaaaagatgtgagcagatgtttgggatatatatattgaaatggcggtggccaatattatggctgacagttatttgtgggttagtgggaacagtggtggtgcagggggtaggggcgagaggaagaaagagaggaacagaaaatgaccaggattgcagagattcatcacccttctatgaagtcacttgatttctttggactcagtttctccgcatctctaacaaatgaggaggaggagattagaccttaatggttatcaaactttgttctcctggattcctcaaaggaacatcagggactccactgcgtatgtgtgttggagggacatctggaggataaggttctgctttaatttatttattggatgtctaagagttttattctaaaagttgcttaaaaatggtttggaaacttctgcatgtgatagcctttttaacctctaactcacccactcacagacagtctcctgtgctctggttggagggtttccattggtccaacacttcacctgtcttgtcctttgtcctgggtatgtgggtcccycttactcatctgcttttctagcccccatgtgattttacttttcaccttccatgtctttgctcatcttgggctgaaatgtccttcctctctgtctgcacctatcaacatcctacagttcactaagcctggtacccagttgcctcctctggaaagacttcctggactgcacttgtcattggtgctctctcctctttccagattcctttgattcacagtgcctgactcacattcctcctttttttcatatgtgctagtcttgtcttattgactagataatcartttctcaaatgagaaacattcagccttctcttgagtctttcttccactctgccttagactggacacmtaggtgactactcaagaagtcttactacacatccaatagcatttgacagggagttagccacataaaatccaatgagcctctagccagagagaattcagttgctgaaactacaacaatgaatgactgtactttagattttttactttatagtttgctgagctgaaaccaaaatgtcacttgggtgacttgcacaagataggtttttaggttttgctaggctgacatgtacagaatcatcagttgttgggagtgtctttttaatatcaacagagaaaaccttgaagattcataaatctgaaatagaaatgcagtgtttgcttcaaagagcaattccttagtttgttgttggtgagaactggctctgtgactgtaccttttgcccaagtatccttagctaagctaaatgtcttcagagtctcacaaatagttctcatattctgtggttatcactactgagattctccctggtgcacagaattgacattggagctctccatgtagtttttggtggccggctcaagttgctgtctcatcactccttaactctacatcctacaagtcaccaatgtgggggcaaaggttcaaaaaggaaccaattcactagcttcttggttcagcaacaagactctcagcatcacagaatcttatagattatcaaaaggaaacatagcccaagtccattaacctacaaatgttgactattatttaaaaccaaactttattacaatggagaatacagaattaacataggatacagattttgcactacagatttttctttttgtatggtgtgaaaattaaaacacacacacacacacacacacacacacacacacataaaaaaaaaaaactatagagaaatataaaaaatgaccaagtgctaactatggttcccaggtactatgagaatttggaaagaagaaaaatcattatggaaaagtagaaacagctaagttgttgggtccatttttcacactcaaaagattttttttctaattattgcttctactcctgggcctcccttttttttggaaggaagtgtctgccaaggtacatctgctgaacaataattcattcacaccccaataaaagtatgaatattaccaatcagccctcttgcaaacaagaaagagataaccggatgtccacactgaactaatgataatttcagccaaaaggcaaagaagcttcatgtttttatcagcctttgtatcttattgcaagtggatgcattatttgttgtcatttgttggtttcagatattgaaattagctttcagaaaatctgtgtactacattgtggggacmactaagaatcttccacatggattgggaatcctgtgccaaggagtttgctcataatcatggaagaagatcaagatcagtgtaggtggaagtgacttggatcttgcaataactagggcttggtcaagcaatgtgggggtggggggatgtgccaaggaatcaggcaatgtccataaattcagtcccttttgtgcaccattgctgactgttccaaggccacacatctgacttcccattcctcctaattttgtgagctcgtactccatgagtgggagaagatggatcaccattttgtgaactgtgctgttttgcatctcaccccaaaaacgcatcccaaattgagcatatgtgatcttcagtaacattcaggaatttcccatcacttgwagtctttagttacagccacaccttttaaaaacaaaatagatgattttgaggatgtcattggctaatttgcagacctgctttgcattggcatctagaccagtgttcgttactggaggcacatctctctgtcgggtgattcagactgtatatgagattggggggtgtaccttgaccacatcaagttgtgaatggaagatgctgccttggtaattttacccaagaccctggttgtatccatttaataaaattagaacatgtatcatttgagaagggaaagtaattatctctgttagttgtaatctcctcaaattcaaatgcatgacatagagatttctcttcaatggcacagttatagacttggtggttaattaaacatcttttctaatcaaattagctttcatttcstaagtggaggtttttaacctggaagtggctttgaaacattgtttctttcagccatcacctatgaaaggaaagataatgtcccttcaaaggactcctctaacagtgaataattattctttgtttgactgcaaatgcacattcttgaaataatatattcgtaaagtttcataaattatttcaagacatattaaagagcattggaaatagttctactccctccaggaggttgccaagaaaaagttttgtcctttaaaatttgaaacaaattattattcactggggggacatcattggagcttcccctagctccagctgacaggaacaatttgagctaacctgttaatggtaatgcttttaaaatttagagatactcttaagtggagcaatttttaaaaattaaaactatagctagggggaattgcctttggaggtcatgcaatgttagggacactgcacatctacctggatcagggcctggattccagctgcctgggttgcatgttacatcatggcccatggaggtgagggagacaggagtgtctctggttgaatttcaactaaatgctcccaggcataattctcctgagacttgcagcttggctataaaatacagcataatatagcacaaaagctactgtaattggggttgggaaaacggagttccagtcccagaagtcacataacgttgtaaaaaatccactattttctcatctgcacaatgaaagaattggcttaaataatctcccatatcccttctaactccaacattttgtgcttttactgtaagatgtcacttgaaccaaatttttttttttttttttttttttttttgagacggagtctcctctgtcgcccaggccggactgcgtccgcagtggcgcaatctcggctcactgtaagctccgcttcccaggttcacgccattctcctgcctcagcctcccgagtagctgggactacaggcgcccaccaccgcgcccggctaattttttgtatttttagtagagacggggtttcaccttgttagccaggatggtctcgatctcctgacctcatgatccacccacctcggcctcccaaagtgctgggattacaggtgtgagccaccgcgcccggccgcaacatcatttcttaatagctcattttgtagcttacctggtaagtgataactacatttctgaagacttattgactagatagttatggcatggaacaagccttatatcctcatctgaactgaaatctctgaggaaaacaagaaaacaagaaagcaaaggagaccagcacttgcttgggcactcacaatgtggcaggagctgtacttggtgattttggggcttttgttttctgctattggagttgaatgaagtgctgggaacagcagaactctccataaattctgcctggattaaatgcaaccacctgccacataactaatggggcccaagtttagaaagaaaatcagtttctttgcagctgttcttacaacctgcctgttgttcttcagaaaccaaattccgaaatatcatctcacaggcagttaaaatgctaaatgaggagcactsggttgagaatggtgtagtaaggtgatggttgggggatgtcagcaggactcaaagacctgggcctcagctgtttctctcatcagtttgctattttacacattgacttgagcatggacgagagtgttcaggagcaaataccttttaggtagcagactgagcatgtgcaggtttgactcttcttgtgctcctaggacagagcaagtttcattttgagggatgggaggaggtgtaccttgctgtatctgagatggcaaatgcaaggcacgtgttcagctatccccatatctggcagacattgctaatctatgatggctctctttctgagctccaatagcctcagaatcctttcaacagagctttctggacagccattatcaaatggcaggtgttggcacaggagatgaagtctgtttgtcaagatttgggctaagtagtagattctttcttgaaaaaaaaaaaagtgtgcatccgtcacatttgtgggtaatccaaagcccttttttagtttaagtgcaggacaggacttgactttatagaaggacacagtggggatcatttttcttctacatctgaagttatccatgtcccaattctacttaaccacgttgttcttgaaaaaagagaaattgggaggaatttcttgtgaattgatctgtagttgcctgatttataaaatgggtgtaagtgagaatagattgataaaatgtggtggataccatggactatctacagtgactagaatcagcaaagcagaggtttatatcacagcacaatgaatctcagaaataggggactggatgaaagaagaaagaggatgacacaataacaatatgacttgcataaatttaaaatgtacaaacagcaaaaagatttccttaaaaagacataaagagggttgactataaaagattgctaattctggtccatttaaatgaagaaacttgctcatcaaaaatcagctttaagaacagaaaaggcaggggccaaatgtggtggctcatgccttttatcccaacattttgggaggccaacacaggaagattgcttaaggccaggagttagagaccagtctgggcaacaagcaagaccccatctgtacaaaaaataaaaataaaaatagctggacatggtggcatgtgcctgttgtcccagctacttgggaggctgaaacaggaggatcacctgagctcagtagtttcaggttacagtgaggtaggatcatgccactgtactccagcctgggcaacagagtgagaccttgtctctaagaaaaacaaaaaacaaaaaactgaaaaggcacattgtaaagtagattttttcattatatgcaaatgataatggatcagtattaagagtatgtaaagaactcctataaaccagtaagaaaactacagataactcaatagagaagtaggcacaagatggagacattttgcagagatggaaatatttatagccaattaatttgtgaagagatattcccaacattagtgactagggaattaaaaaggaaatgtaagatatttttcatagacaagactggcaaaatttttttcaaaatcaaatgttggagagtatgtatatctacaggaaccctgctatgttgctgatgagagtacaaattggcacaatactttgcaaaatttctcttttaaagttgaacattaatgtagctcatgacaccagcaattccactgtacaacaggaggcatgtaaatgttcgataggacgcatgtaaagaaagtctttagaatactctttttcgtacctaaaaaccaaaggtctaccaatgagtgaatgaatgaattgctgtatgtattttcaatggactattatacaccagttaaaacaagtgaagtggcatatgacaatattgtatatcttgtaataggtagaaagtgaaaaacaaatatatttggtaaaaattaagataatagacatatccataccagatgcatttaaacaattgcttgtgagggggcaaatgagaatggaaatgaggagaaaaggaaaaattttaaaatacaaatgtattattatatacatacattttatatatgtgaatgtgtatgtatcgatacaaatatgtatgtatgtatatggtataataatatttttccatcttcctcattgttaagttgcatggctcaactgcaatatagtgacatgattgaagagatttcatggcttcattcccccaaactgtattccatacacatagcagctataccttcagcttcaacattaacaatcctttgaagccaagacattgtatctctaggagcgacctcctgatttgctattaaactagaccataaccaattcttcttgtgtgacatgagttatttggtgacaatagaacctggctgggggggaatggttatgagagtgatgagttctgatgtgaggcaaatccagagttccttgtagatacagaatattagtgctagggggacacagcacaacttgggaacttctggggaccaggagggtactcacactgtgatggggaagaagaagagaatgttattttctattacgttcacactgctttacgatgagtcaaggggaaacgcgttgggaaagggatatgggtaaggttggagaatatggagaagtaattttactttttgaacagtttctccctcatgtgctgtgtgagattcatatcctcaataggagcctcatctgtttttacttcccatattaaatacaaacagtgcattaccctcttctcttacttttgtcacctgttcctgtaggatatgtggtgtctagagttcttagggagtcctttggctctcccaatattgctatttcctgtacaagaatttcaagcttctaccagaatccataagaagccccatccaggtgtaatggatagaaggaagatctgaaaacatgaatctgctgccatctttgtgaccttcccttctccctgcgtaccctgtagtttttcatcctgatgcaatccaatccagggacattcagtggcaatggcttctagagtggaaggcctggcgggagcatggaacgtgtgtatttggagtggagttggctattgtaatacttagtgaatggaatttcattaggtccttatctgtgtgcactgaggaaaagaggtccttttacacagtgcttgtaatggagtggaaaattgcatttccctcttgcccgaacagtgccattagtggggaggcagactgtctgctgagtgcaggaagccacctcgggcagtgcagggctgacagcccaaatgatggcagtgccgagagacccggaagatattaaaataaaaacagcttgtggtgttctttttgtcctgtagcagttcttccctgcaatgcagggagtgattggatttgaagcactgagaaaaacatgttaagtaagaaattgtttaaataaagttgtttgaggttgaaactctcccccaggcatggagggaaatgtagttagctgcgtgcaacttacagatatccaagaggcaccatggtttttttgagtcaggcaagtatgcagtacacttaaaaaatgaaatggacaatgagatctcttctttggtcatccaggtgggttccagccccacctgggaggtgtgtaggccctctgatggcctgttggtggatcaaatcaccatttttactttccttggttctcagaattgcaggtgagaatagctgtgagtctcactgcaaaaaacagcaagagaattactcagctctggggaaattgttgtttctaacctgatagggttcctttcttgtgggttggtgttagacacagtcccatggggagcagccagtgtgatagcagaggaggtgcacagcctgtccttgccgaggaaacagaatctatgcagctcctgggcccaaatacatccaaatacaaagtggtgcagactaggaatgttgggaggaactatgagtgcaagagcctttcatgattgcccaaaggcactgggagaatgcaattaaagattttgtcaccaccaggcctgccctaaaagaactcctgaaggaagcactaaacatggaaaggaacaaccggtaccagccacggcaaaatcatgccaaattgtaaagaccatcgaggctaggaagaaactgcatcaactaacgagcaaaataaccagctaacatcataatgacaggataaaattcacacataacaatattaactttaaatgtaaatggactaaatgctccaattaaaagacacagactggcaaattggataaaaattcgagacccatcagtgtgctgtattcaggaaacccatctcacgtgcagagacacacataggctcaaaataaaaggatggaggaagatctaccaagcaaatggaaaacaaaaaaaaggcaggggttgcaatcctagtctctgataaaacagactttaaaccaacaaagatcaaaagaggcaaagaaggccattacataatggtaaagggatcaattcaacaagaagagctaactatcctaaatatatatgcacctaatacaggagcacccagattcatatagcaagtcctgagtgacctacaaagagacttagactcccacacgttaataatgggagactttaacaccccactgtcaacattagacagatcaacgagacagaaagttaacaaggatacccaggaattgaactcagctctgcaccaagtggacctaatagacatctacagaactctccaccccaaatcaacagagtatacattttttttcagcaccacaccacacctattccaaaattgaccacatagttggaagtaaagcactcctcagcaaatgtaaaagatcagaaattatagcaaactgtctctcagaccacagtgcaatcaaactagaactcaggattcagaaactcactcaaaactgctcaactacatggaaactgaacaacctgctcctgaataactactgggtacttaacgaaatgaaggcagaaataaagatgttctttgaaaccaatgagaacaaagacacaacataccagaatctctgggaaacattcaaagcagtgtgtacagggaaatttatagcactaaatgcccacaagagaaagcaggaaagatccaaaattgacaccctaacatcacaattaaaagaactagaaaagcaagagcaaacacattcaaaagctagcagaaggcaagaaataactaagatcagagcagaactgaaggaaatagagacacaaaaataccttcaaaaaattaatgaatccaggagctggttttttttgaaaggatcaacaaaattgatagaccactagcaagactaataaagaagaaaagagagaagaatcaaatagacgcaataaaaaatgataaaggggatatcaccaccgatcccacagaaatacaaactacgatcagagaatactacaaacacctctatgcaaataaactacaaaaatctagaagaaatgggtaaattccttgacacatacaccctcccaagactaaaccagaaagaagttgaatctctgaatagaccaataacaggctctgaaattgtggcaataatcaataacttaccaaccaaaaagagtccaggaccagatggattcatagccgaattctaccagaggtacaaggaggaactggtaccattccttctgaaactattccaatcaatagaaaaagagggaatcctccctaactcattttatgaggccagcatcatcctgataccaaagccgagcagagacacaaccaaaaaagagaactttagaccaatatccttgatgaacwttgatgcaaaaatcctcaataaaatactggcaaaccgaatccagcagcacatcaagargcttatccaccatgatcaagtgggcttcatccctgggatgcaaggctggttcaatataygcaaatcaataaatgtaatccagcatataaaaagaaccaaagacaaaaaccacatgattatctcaatagatgcagaaaaggcgtttgacaaaattcaacaacccttcatgctaaaaactctcaataaattaggtattgatgggacgtatctcaaaataataagagctatctatgacaaacccacagccaatatcatactgaatgggcaaaaactggaagcattccctttgaaaactggcacaagacagggatgccctctctcaccactcctattcaacatagtgttggaagttctggccagggccattaggcaggagaaggaaataaagggtattcaattaggaaaagaggaagtcaaattgtccctgattgcagatgacatgattgtacatctagaaaaccccattgtctcagcccaaaatctacttaagctgataagcaacttcagcaaagtctcaggatacaaaaccaatgtacaaaaatcacaagcattcttatacaccaataacagacagagagctaaatcgtgagtgaactcccattcacaattgtttcaaagagaataaaatacctaggaatccagcttacaagggatgtgaaggacctcttcaaggagaactacaaaccactgctcaattaaataaaagaggatacaaacaaatggaagagcattccatgctcatgggtaggaagaatcaatatcatgaaaatggccatactgcccaaggtaatttatagattcaatgccatccccatcaagctaccaatgactttcttcacagaattggaaaaaactactttaaagctcatatggaaccaaaaaagagcccacatcgccaagtcaatcctaagccaaaagaacaaagctggaggcatcacactacctgamttcaaactatactacaaggctacagtaaccaaaacagcatggtactggtaccaaaacagagatatagatcagtggaacagaacagagccctcagaaataacgccrcrtatctacaactatctgatctttgacaaacctgagaaaaacaaacaatggagaaaggattccctatttaataaatggtgctgggraaactggctagccatatgtagaaagctgaaactggatcccttccttacaccttatacaaaaattaattcaagatggattaaagacttaaacattagacctaaaaccataaaaaccctagaagaaaacctaggcattaccattcaggacataggcatgggcaaggacttcatgtctaaaacaccaaaagcagtggcaacaaaagccacaattgacaaatgggatctaattaaactaaagagcttctgcacagcaaaagaaactaccatcagagtgaacaggcaacctacaaaatgggagaaaatttttgcaacctactcatctgacaaagggctaatatccagagtctacaatgaactccaacaaatttacaagaaaaaaacaaacaaccccatcaaaaagtgggtgaaggacatgaacagacacttctcaaaagaagacagttatgcagccaaaaaaacacatgaaaaaatgctcaccatcactggccatcagagaaatgcaaatcaaagccacagtgagatatcatctcacaccagttaggatggcaatcattaaaaagtcaggaaacaggtgctagagaggatgtggagaaataggaacacttttacactgttggtgggactgtaaactagttcaacccttgtggaagtcagtgtggcgattccttggatctagaactagaaataccatttgacccagccatcccattactgggtatatacccaaaggactatatatcatgctgctataaagacacatgcacatgtatgtttattgcggcactattcacaatagcaaagacttggaaccaacccaaatgtccaacaatgatagactggattaagaaaatgtggcacatatacaccatggaatactatgcagccataaaaaatgatgagttcatgtcctttgtagggacatagatgaaattggaaatcatcattctcagtaaactattgcaagaacaaaaaaccaaacaccgcatattctcactcataggtgggaattgaacaacgagaacacatggacacaggaaggggaacatcacactgtggggactgttgtggggtggggggagtggggagggatagctttaggagatatacytaatgctaaatgacgagttaatgggtgcagcacaccagcatggcacatgtatacatatgtagctaacctgcacattgtgcacatgtaccctaaaacttaaagtataataataataataataaaaaagagtctccttaaatactgaatagagaaaccattaggaaatttcatattcaagctacagaagaattacctggtccagccatttcttgtagagatgaggaatttctttctctgaaggtgcaagtatcaaagcagactcccttgaggctcctacctctctctaatggatgtgtctataatgttatagactgaatcatgtgttcccccaaaattcatatgctgaaatcttaaactgcaatgtgatggtaataggaagaggggtcctcaggaagtgattaagtcatgagggtggagccctcataaatgggattaatgcccttacctgtgggctcccagagagctttcctgctctcttttggccctgtgaggatgcaatgagaagtaggcagtgcagctccagagagggctcccaccagaaccaaccatgctgacacctgatttgtgactttagcctccagaactgtgagaaaattcctattgtttcagccacccagtctgtggtcctttgttatatcacctcatttgactgtgacagcatctcttcgtggtcttttctctgttttcttgtccactctttcctccagctactcttctttcacttcctctttgggagaattgtctttctacttggtctatcccttggcctcagccttctgttcttgcctgccggatatggaaggttgactgggatcagctacctgccaaccattctgttctctagtttccccaggtattccttatgtctacataagttagggttgggaagttgtggctgtgcctcagtagggcccctcagcatcacagtggttgctaagccctgtcctaggacattataattttctaaaaatttatatgactctcaaattctatatgaacacatatatcattatgttaaaattattaatatatttaaattagtaatgagggaaccagtgatgtggtaaagctggttctaagagcacttgaggaactgggtatgtataagcactgaaaaaaaaaaaagaatgggggccaggcatgatggctcagcctataatcccagcacttttggagaccaaggcaggcagattgcttgagcccaggagttcgagaccagcctggaggaaatggagaaatcccatctctacaaaaaatacaaaagttagccaggcatggtagcatgcacctgtggtcccacctactcaggaggctatagtaggaggatcacttgagcctgggaagttgaggctgcagtgagccaaggtcatgccactacactccagcctgggcaacagagccagaccctgtctcaaaaaagaaaaaaaaaatgttaggcaaggattgctaggttagattcaaagctggtcagtattctacagagcaataaaataataatgtctaggactctttttttttttttttttttttttaccggacaaaaatctacaatttaacatgtaacttcattgtatctaggttgtgatcaagtaatgagcagtgaagtcaaatataggtatgatctaggaagaattaactaacccttgggaagacctgttcacaaagataaaatatgccattgaagggatattgtgtccttccttgtccccctacccctttacatccaagttttggatgctttttcttaacaatataaacccagcatttgagtctatatttctttgtaaatgtaccagatatggtatatctggttctgttatgactccatcttgaagtaaagtcccagctagtatgtcaggtatccactaattaattaaacgtttaacacatttattgagttgtctctgtgtgctatggtttggaaatatttgacgccgccaaatctcatgctgaaatttgatccccaggccgggcacagtggatggctcacacctgtaataccagcactttgggaggctgagctgggtagaccacctgaggtcaggagttcgagaccagcctggccaacatggtgaaaccccaactcaactaaaaatataaaaactagctgggcgtggtggtgggcgcctgtaatcccagctactcaggaggcagaggcaggagaattgcttgaacccaggagacggaggtttcagtgagctgacgatgacacgatgccaccgcactccagcctcagtgacagagtgagactccgtctcaaaaaaaaaaagaaaagatatttgatccccagtgttggaggtggggcctaatgggaccactttttgggtgatggggatggatgcttcataaatggattggtaatgaatgaggtattgctctattataagttcctgtaacagctggttgttaaaaagagcctggaacttcctcacttctctctcttttcttctctctccatgtgatctgtacatacattggctcctgtattagtccatgttcacactgctgtaaagaaatatctgagactgggtaatttattttatttatttatttatttatttatttatttattattatatatatatttttattatattttaagttctagcatacatgtgcacaacatgcaggtttgctacatatgtatacatgtgccatgttggtgtgctgcacccattaactggtcatttacattaggtatatctcctaatgctatccctcccccctccccccaccccacaacagcccccggtgtgtgatgttccccttcctgtgtccaaatgttcctattgttcaattcccgcctacgaatgagaacatgtggtgtttggttttttgtccttgcgatactttgctgagaatgatggtttccagcttcatccatgtccctacaaaggacatgaactcatcattttttatggctgcatagtattccatggtgtatatgtgccacattttcttaatccagagactggataatttataaaggaaagagatttaattgactcacagttccagaaggctggggagacctcaggaaacttacagtcatagtggaagggaaagcaaacacattcttcacaaggcagcaggagagagaagtgtgagtgaaggaggaacttgcctaacacctataaaaccatcagatcaggccgggcgtggtggcttatacctgtaatcccagcactttgggaggctgaagcgggtggatcacctgaggtcgggagttcaagaccagcctggccaacacagtgaaactccgtctctactaataatacaaaaattagccgggcatggtggcacgtgcctgcaatcccagctacttgggaggctgaggcaggagaattgcttgaactcaggaggcagaggttgcagtgacccgagatcacgccattgcactccagccttggcgacaagagcaaaactccatctgcaaaaaagaaaagaaaacaaaacaaaacaaaaatcagatcttgtgataaatcactatcacaagaacagcatggtgaaaaccgcccccataatccagtcacttccctccctcaacatgtggggattacagtttaagatgagatttgggtggtgacacagagccaaaccatatcaggtccccttcaccttcctccatgagtggaatcagcctgaagccctcaccagattcagatgttgtgacatgcatcttgtacagcatgcagagctgtgagacaaataaatctcttttctttataaattacccagcctcaggtactcccttatagcaacacaaattcactaagacattgtgtcagattttaacgtatactgatgaataaaacaagcaatgttgtgaggttcatgataagagaaatacatggcatatactttagaaaaaaatattatggaaagcctgtcaaagtgcctctacctgttatctgaatcacatgatggagtgaattccccatgcctgtttgcctgaattagttcagataagcaggagttggttatgttctatcaaattctgtgaggtatgaatggaaaaaaggaatttagaatggtttttcatgttggtgtgaccttgtttactgtgttcctccttggattcaaagtctacccaataagtaatatcagtaaatatatcggtaaagtatattgaagcactagctgtggacttttttttgtttatttattttaagatttttgataatcatcctaaatctattcttatgcaagagtcttaaagtagaaagtttctctgttttttcttccttcctaaactccttcaatgtgattgacaactggctccatgaacgtggggcattgtacctaccaactgtaatttttccatcagtggaaatcttgcaagtctttgacagacagagtagaatgcagaggttgtggatagtagtgaatttcccaaggccctgatagttttagggtgatttttgtttctcaagattcttttagccaaattgtaaagccattcttgtaatcaactgaatttcccctttgatattatccccaaggaagagtaactacattagtgttaagaccagagaatcacagggcatatcctatagtctctcatagtatgtcctattactggctctctgagaaagggagacaggttggttttaatatcgcatcagtatgtacagtattttttattaaatactggccaagtataagtcacttttaggccataagagggatatagaggtataagaagagaaactcacagagtagttgaggagatgagatacccacagaccacatagatacttatataagaaaatgtgtgcagaattttgactcagcattccaggctacagtgctcacagagttcaaccagtggggactgtggagggcatggaaggttcttaatggaaattgttagtcttttttttttttttttagacagagtctcgctctgttgctaggctggaatgcagtggtgtgatctttgctcactgcaaygtccgcctcccgggttcaagtgattctcctgcctcagcctcccragtagctgggactataggcacacgccaccacgcccagctaatttttatatttttagtagagacggggtttcaccatgttggccaggatggtctccatctcttgaccttgtgatctgcccacctcagcctcccaaagtgctaggtatgagctaccacgcccggcaggaaattgttggtcatttaatctattttaaccacccaaggggttccttggtgccctctgcataaacaaagaccatggcattgtaatagacggagtttaatagacaccaggccaggcatgccatgtgggagatgaagttcatactcaaatcatcttgtccagaattcataggattggcgtttttcagacagtttggggtaaaggggtaaaggtgatcaggtaacagacacttgccgctgattggttggggcaaagatgaaatcatagggggttgaatcggtcctcctatgcactgaatcaattcagggtggggccacaggagtggggttggcgagtccaggtggagccatgggtgtcagacatgcaaaaaacctggaaagatatctcaaaaggccaacctacaatagttgtgttatttgcaggagtaattggggacattgcacatcttataacctccagaataatggctgacaatcatttatgcctgcaccttagcaggactcaggttctcctctgcatagcctgataggctcccactagctttacaaaaagcacttgagttttgggcaaggcctattatttaaactatagcttaaatgttttccaaagttagcttggcctaataactcaggaataactaagggaaaggcaagatgtggggaaggttagcttagcttactgttataatttttctcactgatacagtttttgcaaacatggtttctctatgaaggataaatgcaatctggattatagtagaagcaggagatgttgaaattctaaggagaatggagctgggacaatggaatgcgaaggtttggacaataatataccaagtatgtctttgttgggcgagaacgtctgttgaggtttggtatttgagtctgagaattgaaatgacaatagaccaatcaacaggagaaaaggtacataaatttactacaggcatgggrcatcacaagagacagagtgcccaataaccccgtgagattcgaagcttatatgcccttctccatgggagagagtagtgggggtctgcaggcacttttagaggaaaaagtaaatgatgtttaggagagaagaatgggcatcaagaacagatgatgtcctgggacgaagtctgtctgggctctgagtgtgctgtgtactctagtcttcatttctgcaagttaatcttccctgtttgatgagattatagagaggtgatgcaagacaattgcattccttctagaggaacttcccttagtcagatgagggaacttcagaaaaagccgccctctgtgcttggcaagaggtagaggggtgagagagggtgggcagaagaaggtcagactctggttctgagactgcttctttagttcaaaatactcagcatatcaacacccccacactttgaggtatctcttccgagcccgtgtctttgcgggtgggaggttggggaggatccagtctgggcttgggagttggtggcatccttttttatagctgctccaggagcacccaacctgggtgtgtttactgaagttgtacgcatgctcctttgagccattttygacttcaccattttgccccttagttcactttcttaagcccattcacccaactcctgagatcttttcaggaagctgctgataaccagtttcaggtatttctatctattggtaggctgcctttccctggagccccctgggaccaattattattttagcgaggcagtgtaataactgcctgaccatcacctgatggttgcctgacattcctggtggggtaggggtgggtctctcctgccctgctgatgtctgactgcctacctactgtaacaccctaactaaaagttgagttaactctgaaatcaagcaacaccaagcagaaagcagagagggaaacttgtccctttcaaaacagattaaatgtttcttattaattcagttgcttccacacatattcaagtttgtatccagaattaagcgagtcagtagttttaaatcaaattacaaatacagcatccttcatatctgaaataattgtgtatctgtatgtaaatgctgggagaatatacttttttggatattattctgactgtagtttcaaaaaaaagtagatagaaatctggaaaaatgagtaaacactattaattagatgagatatttatccttggcttaaattagaaaacttactaagagaaactatgaaaatatcaattaaaacaactagcatgattttatttttcactgttaagagggcaaaaaaaaaaaaaaccccaaaaatcccatgcatgaataaaataaatatatatttggggatgacaccatcttggcatttccaggcattcttttctaaacatattctttatctgagctgtcttgcaatacttttaatataattaaaagcacataatgagtgccagacttgtcaatttcaacaacaaagtgctgaaatttgcagtgaaactgagagatccatctcccatacattgtaatgaataggttcataaaaggaaaatagtttaattacattttagttcatggattgttaataggctggagtatctaaattgaataatgtgattctggtaataattatgtgtaaatgaacttgtttaaatgatattttacagcttctttataaaattacagctagaggcaatccagtgatagacagacaaaggccatgcaaaaattatcataaactattagcttgtttgcaaagggttttatgttaatcttttagtacttaaagcaatctgcaattaacatatcatggggagctgcctcygagcaaaggcatgcaaattgaagtgcttagataaaaagccattcatgttgkgggggaaagagaaagaaagaaaaaagaaaaagaaaaaaaaatcaaagaaagggtggcaaagtactcagagggtgctggtttttatatttgagattaaggaggtgtaatgattgtgttatctaactatggctgtaattaaagcttttctccagcagacatgacaatagatactgcattgatttcggtgttttaattgtgaaagtcattttatttcagggcagaagatatgaatagcctgaatcaaagggctagaagattgctttgttgatagtacttgttcaacagctgcctggctgcttaatacacaagtgtggagaatgcagagagacccaaggaggtgctgggtattgtgattctcctgctggtttcctttccttttatgaaaaaggcaaggatcttggtgctgactgtaaacaaacagccttttcatacctcatcgatgtttttcctccccaactttgcagaacaaaagaagtcataaagggccttgaactaactttactactgctccttttaagctacagaagtttatgcaaagtaataaaaaccatctttgctagtggagatatcacccctctaatgatgaaaaaaagtctctragtgactgtggtagttattatcacaaatagccttgtgacagaaacagtttgtaggagagaggttggattatttacattaagggcatatccacaaaatctcacacacagttagtttgagattagtgctttcttatcagtttctatatacaaaccacaggagggaaattaagtgaggggaaaacatatacaatcccagagcaaagagaattctaaagagaattttagggagatcagggtagacttaaaataaaaatcacattcttggctatttcttctataacacttcagtgtaaatggaggtgaaacccagtgatttccagtaattcctattctattgatttatctcttctttgttcctagaaatatcaaatagcatgtttaaaggagtctgaataataataaacttggttttagggaacactgtttctttaagtgatatgatttaaaataaccagacaccaagatattacaaacataacaataataacataatcatttactgagtgttgtgctatttttatttatatttctgatgatataagggagtgaaaattttccctctgccctctgagagtttgataattgaatctatggaataaatggacattagaccaattaataggagaaaggacacataaatttattacatgcataggagcatcatataaaacaaaggtgaacacccagtgagatctagaagtttttataccctcttcataggggagaagagagggggaatgcagacaacttagggaaggtacaagcataccttggagatattgaaatctcaattctagactgatgcaggattttcttcttggtcaccgtgcaagctggagacctctggccagcgatgccctaccctggccttgctcgaccacactagctgctgcaggagatggcctctacctgctgtaggagacggcctaagtctggcttacacactggttcccgagttcttgtcttgcacccaagaaaaataaggatgtactgacaatggaagagtgagccagatggggagttttattggtgatgaaacagctttcagtggagaggggacacaggggtggtccccctacccaaaggtgggaaagtcccctgtgtgtctgggcctggggccttttatggactcagaatggggagtgtgtgctgattggtttgggggtatgcaaaaaagtttaaaccaaagacaccactcaaaggtgggcatgacagtgaagaaaaccaattacgaaagggtaggtatatgtaaaataggtgaaaggtggggacagtcagagaaaagtgcgccaaatgggaagacaagttctcagtctggtccaagaatttaacttgtagcttggctttcaggcttcaaactgtaatcagcttggaggtgggatttcaccggggacccccactgtctgcctaggcatttggctgcctcctttcactatcaagactgccccaataaaacaaaaattgcaataaagcaagtaacatgaatgtttggttttcccagtgtgtataaaagctatacaatactgtagtctgtgaggtgtatgataacattatgtctaaataaacaatatacataccttaattttaaaatactttattgttaaaaatgctaataactatctgcattttcagttagttaccatctttttgctggtgaagggtattgtttcagagttgctggctgctgactgatcagggaggttgttgctgaaggttgggatggctgtgacaatttcttaaaagaagacaacaatgaggtttgccacattgattgactcaygaaagatttctctgtagcatgtgatgctgtgtgatagcattttactcacattagaacttcttttaaaattagagtaaatcctctcaaaccctgcctatgctttatcatctaagtttagtaatattctaaatcctttgtggtcatttcaagaatgttcacagcatcttcaccaggagtagattccatctcaaaacaaacaaacaaacaaacaaaaaacactttctttgctcatctataaggagcaactcctcatctttaaaagctttatcatgaagttgcagcaattcagtcctatcttcaggcttctcttctaattctggttctcttgctatttctaccacatctgctgttatttcctctactgaagtcttgagcccctcaaaatcatccgtgagggttggaattcacttctttcaaactcctgttaatgttgatactttgacctcctcccatgaatcacaaatgttcttagtaacatctagaatggtgaatcctttccagaagattttcaatttctattgcccagatccatcagaggaatcactatctatggcagcgatagccttactaaatatatttcttaaataagaggacttgaaacttgaaattactccttgatacatgggctacagaatggctgttgtgtgaggaggcattaaaacagcattgatctccttgtatatcttcatcagagctcttgggtgaccaggtatattgtcaatgagcagtaatattttgaaagaaatcttttttttctgagcagtaggtctcaatagtgggcttaaattaatatttaagtaaatcatgctgtgaacggatgtgctgtcatccaggctttgttgtttcattgatagcacacaggcagagtagatttagcgtaattcttaagggccctagaatttttggaatgataaatgaacattggcttcaacttaaagtcgccagatacattagctcttatcaagagagtcagcctgtcctttgaagctttgaagccaggcattgacttctctctagctataaaagccccaaatggcatcttcttcccatgtaaggctgttttgtctacattggaaatctgttgtttagtgtagtcaccttcatcaaatcttagctggatctcctggataatttgctgcaatttttccatcagcacttgttgcttcaccttgcccttttatgaagacagcgtctttccttaaaccttatgaaccaacctctcttagcttcaaacttttcttctgtagcttctttacctctcagcctttacataaatgaggagagttaaggccttgctctggattaggctttggcttaaggaaatgtcatggttggtttgatcttctatccataccgctaaaactttctccatatcagcaataaggctgtttcactttcttatcattcatgtgctcactggagtagcacttttaatctccttcaagaacttttcctttgcattcactgtttggctaatcgtttggtataagaggcctagctttcagcctatcttggcttttgaaatgccttcctcactaagcttaatcatttctagcttttgatttaagtgtgcctctttctttcacctgaacacttagaagccattgtagagttataaattggcctaatttcaatatcgttgtgtctcagggaatagggaagcctggggagagagagagagatggggaaacagtcagttggtggagcagtcagaacacacacaacacttattaagcttgccatcttctatgagcatgattcatggtaccccaaaacaattaggataatgaaatcaaagatcactgatcacagatcaccataacagatataataataatgaaaaagtttgaaatgttacccaaattaccaaaatgtaacccagagacgtaagataagcacatgctgtgggaaaaatggtgttggtagacttactagatgcagggttgccacaaatccttcagtttgtagaaaaaatagtatctgtgaagtgcagtggaatgaggtatacctgcagaggatttctgggaaagatgaatgggccctcagaataggtgacagcctgcgacagggtctttctgggtgtggtgtcacctctattctcctctcttgtgatatagataattgtccctggctgataagattctacgggagggaattcatgactattgagttacaggagtagaagcttggaatttctgggggctggcagggacatgagttttgggaagatggggttagaaactgtatgacgaataagggttgtcttcttatacagattaaaagactctcaggtcataacagttttctgcagctagcagactttttctgatccagatagtttactaatgtagatttcctttacagatgtaagtttcttttacaaaaggacaagttttcagagctacttccgtgtgtgcagttcctcagagtaaccagctcgaaatatgccaaagaaatatagtttggggtggtacattctgtttggcgagcccaaaaaatgacctccaataaccatcccaaagaagtcgatgggatgatccattttctaaaacgagtgaacttagcctcaggccaaatatattgttcaaggtcacatagcaagggaggggcagaggcaggttagaacccagacagtctagctagatctctaggaaagcctgatgccatcctcacagggttaacaagaattctggacagaaatgtagttataattaagcattaattaagcaggctgcactttgacccagttccttgtaactgaaagtcaggtaacaccagatcctgactatttgcatccccattgttcctatagacaggatttctggagttacatcaggcttttaagatagataggatctctgacactacaatcataaggtttatgtttgagaattgcagatgcagattctgaattccagtggaacagctaatgctaaccattttgaagaccccaacagaggaactgaatcagcatgagaatggtttcttcatctccctgtcccatgacttactctgcactctttaaccaatcaatggtctccacactttggcccgctcccagacctttaaaaaccctagccccaaactccttggggagatggatttgaggtttccttctgtctcctcgtttagtggcctatgaccaaacttctttttctgctgcaacccagcatcttggtgtattgacttgccatgaacatcaggcagcaaacctattatggtcacaagcccttagacttcttctctgattaatgttttctaagtgcacaaaataaagtacaaagggttacaaagcaaatgtagtatattgaaatactgttatcaaaatatttaaaaataaaatttatgacttagtaatttatgtgcttacagccagcagcaactataatttcaaagctatgctaacatctactataatttcaaagtgttgataagcataaacagtgttttggatttctgcaataatgtgacatgaaaatacctgattttttatcaatgataaagtcacagatactccttaaactccagtcattttgttgcctacatttataataaaagaaaatggggctgaggccagaggattgcttgagtcttggagttggagattgcagtgagctatgactgcactactgcattcgagcctgggcaacagagggagaccctgtctcttaaaaaatagcaaaaacagaaagaaagaaaatgttaagttccccataaacattactgaaaataaaactatatttttatatatgtcagatattatacaaaaatacatgtgtagataattatacataaaaataatttttcccaccaaaattcacagacctctaaattctataggtgtacaaggcttaggttaagaacatttttggttttacagatgaggaactgaggcccagagaagggaatttagtgacccaaggttatcagtaatcagtgataagatgtagattagagctgattacactaagagaacataaggaaaacttaaaatactgtatgttgatcttttccctttctcctgtgactttggtggcttttgctgacatgctcttggaatgttgaacctttctttgtctttgcaatgttgtctttttcaaagtgggagcagcaagcaatttccccagccctgagatcagttgttggcaattcctgctttcagtggcagggctgggaggatcccagaaagcgcagccatagggactccagggaagcttcctgtgattgcaacctaaatttgaaaactttctatttaaagggacaagagtgcttttttttttttttttttttttttttaagatggagtcttgctctgttgcccaggctggagtgcaatgatgtgatcttggctcactgcaacctctgcccctgggttcaagcaattctgctgcctcagcctcytaagtagctgggattacaagcacgtgccaccacgcctggctaatttttgtgtttttagtagagatggggttttgccatattggccaggctggtcttgaactcctgacctcaggtgatccaccctccttggcctcccaaactgctgggattataggcatgagccacggcacctggctaagagtgcatattcattatgtgtctcctctacgcgaggtctttgtatatcctcttccagttaatattcagagaggmctaataaatagtccccatccttgttctagaggggaagagagaaactcagagattgccatggcacatggtgcttgtggtgagccggggttgagttagactttagctatgtcctcacagcctaatgacgcaggcaatttggtcctctatttacttattaggaaactgaggataaaagacttttagcaagatggccaagttcatgacttattaagtgacagagccacgaatttaactgaagtctgttgcctgtaatactcatctttgttccccagactctgttgcccttacattgaaggaataaggacccccccgccctcccatcttctctacccaggggtcttctcctcaggtgtctattgcatatctgttatttacagggcatgtcccatgtgggcatgcaggaggggaagggcagcaggtagaaacacataaggatatacttgattttgagctgactttcctaacgtccctaattggataaataaagctaacacaaagggaacacacagataatgttcratgacaaacacggacaacatcaacaatgtaataataataattgtgatgatgadaatagctaacatttattgaatgcatactattttaaggattttccaaaagttgtttctttttttttttaatttgatcacatatcccataaagaagagtgtgtgatggcgacggcacccttacacacttggcaggaaggacatggctgagggtgccacagtcataaacacagaaacacagagatatatgttctccttattgattttgtaataatattggtggcaatcttagctatgaattgagtgaacaggtattatgggaaaggaagggggtgagatggatcaaccaggccaactcccagggggccatgttggcaaattttcctgcctcatgccttgccttggtgacgtacaaattttaggcattttaaagaaataccccaaactgtcagccctgtgcagagggagcatggttcactccctagatagtcaatttgggtgatagggggtggccagctgcttgcttgggtctcaggggagaggccctgatctttctggtccttctcccccaatcctaacctcagcccagacatcaggtcatttctacacactgcattaggcttctctaaccaataaggaacatttacccttaaacatggtcaccatgtcattatcacaactaaaaaaagaataataattccatagggcttttcaatacccagtccatattctaattttcccagttgtctcaaaaatatctttttgtatccagttcgtttgattcartgtccaaacacagcccataccttttattgcgttgctgtatccctttgatcttttttagtctttaatcatctccctccccttctcctttttcatcttctctttgtctcttatgctctctgtttctctctctgtctctctctctctattatgcattgatatttttgaggaattgaatgagttatcctgggcaatgacccacattctgctttggctggttgcctccttgccatgccatctaacttgttcctctatcctctgtactttctataatctggtgtcagatcaataacttgtttgaattcaaattcatttttttttgtatatggtgctgtatacttcctattgcattacctcctgagatgcataattaatatctgatcatggtaactctgtgaggtgatgggtgtgttaattaatttgattgtgctaatcattacattttatgtatatatacttatatataatgtatatatacatacacaagcatatgtcgaattattacattgtacaccttaaacactatatacagttttattggttaattatatctcaatatagccgggaaatttttraaaataaaaacaaaaacaatcccatcaaaaagtggactaaggacatgtatagacaattctcaaaaaagatatacaaatggccaacatatgaaaaaaatgctcaacatcactaattatcaaggaaatgcaaatcaaaatcgcatacacacacacacaccacacacacacacacaccacacacacacatacgcacaccatagaatactacttaactataaaaaggaatgaaataatggcatttgcagcaacctggatggaattggagaccattattctaagtgaagtaactcaggaatggaaaaccaaacatcatatgttctcattcaccaccttactcccgcaagaagggccataataataaatataygtaatatatatatttgtgtatatatatgttatatataatatatamatgttatatattatatatatgttatatttatatatgttggcatggatgtggtgaaaagggaacacttttacattgttggtgataatgtaaactagtacaaccactatggaaaactgtggagattccttaaagaactaaaagtagatctaccatttgatccagcaatcccactcctgggtatctacccagaggaaaataactcattatatgaaaatgatacttgaacatgcatgtttatggcagcataacttgcaattgcataatatggaaccagcccaaatgcccattaatcaatgagtggataaagaaaatgtgagatagatagatagatagatagatagatacacatatatatgtgtgtatatatatatacatatatatatacgcacacacacacatacacacatacatatacacacaccccatggaatactacttagccataaaaaggaatgaaataatggcatttgcagcaacctggatggaactggagaccattattctaaatgaagtaactcaggaatggaaaaccaaacatcatatgttatcactcataaatgggagctaagttatgagaatgcaaaggtataagaatgatataatggactttggggtcttgggggaaaggtgggtgggtggtgagggataaaagactacaaattaggtacagtgtacactttgcaggtgatgggtgcaccaaaatctcagaaatcackactaaagaccttattcatgtaaccaaacaccacctgttcccccaaatcctattgaaataaaaaattaaaaataaaactgtatcttatcagtaggttcagatggttcttccactgaaagaatcagctggagtcttccattgtaaggttcccaaccaaccttttacctaatgtttgagcatcttttgatgatggtgacctaagtccattatttcattacaggtgggagaataattttctaattttatcatccctttgtatttattacctggaattctgccatgaaggattttcttccatatagtaattgcttgaaatcttttttttctcacagcagataacttggtttgaaacatagtttctgtgggcattgactgtatgaaatgggaatatgaagtgkttccagatgcagcggaagtgggaggctgagggtcccctgcaggcacaggattcccttcatcctctgtacctgtagcagaggagcccttgggctccagcagtacaattggggartgccctggtgaataacactgcctgacccccatcctcaccaggcttacaatgtggggtcctggagactgaagggtatgcctgtagtacagagagggtagccactcaccagcttcatgactttggggctgttggccacagtcaacattgcttccttatctgtaaagtgagaataagagtactaacctcacaggatggttgtgaagattcattatgctaatgcctataaaatacttggcatagttttggctgtataacagtgcttaataaatgctggcttgattattcttattgtaataatttttttttaagagacagagtattgttatgttgcccaggctgtagtgcagtggctattcacaggtgagatcccactgctgatcagcacaggagttttgacctgctccatttctgacctgggctggatcactcctccttagtcaacctggtggttccctgctcctgggaggtcaccatattgatgctgaacttagtgtggacacccaatcagcatagctcactacagcccagaactcctggactcaagtgatcttctcacctcagcctcctgagtcaccaggactactgactattgcattggtttgttaggattgccataacaaagtatcacaacgtgggtggcttaagaacaacagaaatttattctctcatagttctggaagccagaaatgggaaataaaggtgccagtgggcccaggctcctccaaagactctgggtagaatcctctcttgcctcttccccacttctggtggtagctggcaatccctggtgtgctatcacttatagatgcatcgtgccaatatctgcttttgtcaccacatgcccatcttttccttctgtctcttcacatggtgttctcctctctacatgttcacattgtcctcttagaaagataccagccatattgagttaagggccaaccctactccagcatgacctcatcttaactcattacatctgcaatgwctttatttccaaataagctgacattctgaggtactggggtttaggactcaacatatctttctgggggatacaactcaacccataacaattgtgtaaccatacaacaccgagttgtcctacatcttgacatatagaagggttccttgtactttattgttatgccacatttcttgcattttactgttttcctactggttttctctcagatatgagatgctatgtagtgcagagtgaggataagatgagcagctcttccacgtttagacccagagcagacacttgaataagtcgttctccacctccaaagacaggataggagcaggaaacatcagccagaacatctcgtataaacagcagaagcagtacagccttagagaacccatccacacctcagaacttcccagccaagctcatgctggcaggcacccagtgattctcccrtccgtatcacgacaagcctcggagtgaactgtttatttatcaattcttaattgagttgatgtttactcatgattgccagtggatgagtaatttactacagagttcgaggagtcagatagtgaagagatcattataaagagaaattataatagagttccctgtactcatgggtctggtaataaaagattgatataattagatggggcttggtaacaartactattacattatgtctgaatcttatttaaatatattggccttttatcttaaacttattagtgggtggctgtagcttacgtcgacaccagctagctmttttactcttgcaaaaggagggctgagctatacaaaggagtcaatcatttgatgtttagaagcaatggcacggtatttaaggcagttctccctgttgatttttagaggaagagcaaggtataaggggaacttaagcttccacttggtcacaaactttctggataacaaattcaggggctgtgtttctctgtactgtggctgtggctaccttggaacctttaacttggccaaagtcatccttgagaaagcagataaaggaaagggcaggaaataatctgacaacgtagtgagaaaatgagctgtggagtaagacaggcctgagatgaaaactttgccatagtgggttgagtggtagcccccccaaaakatatcgctccatcctatccctgggacctgtgaatgtgaccttcagtggaaaatgagttgttgaagatgtagctaaggatctcaagaaaagatcatcctggataatccaggggggctataaatcgaatgacaagtgtccttggaatagacacccagaggagagattaatggagaagagatatgaagatggaggtagaggctggacttatgtagagctattagggaatagatttctgttgttttaagccaccaagtttatggtagtttggtgcaagatccctgggaaacaaatataccagttttataataaattgcttatatgactttgggctagactcttaatctttacaaacctcagttttctcatctgtaaaagttgggttattacacttgtctctcagtatcgtgaggaccgtgaaagctcacccaactcagtgcctggtacatgacaggcattcagtacacatcagattccttctcccatcacctcctacccattttcctacatgatgtttcaacttgaaatctttttcatcttctacgcctcctaaaatgtctgcaaaactaacagccctcccctgaagaatgttccattcttcaggagctgttcttaggactgtcaaattagaggagaaagcatggtacagctggtgtttttgcggcagttgggtgagagccatgtagatattaaaagtttttcaaatgcagttcattgaatgcagccctatagagaagcagctgaagtccacattgtagctgcagtgtggctggccagctggggtctgtttccttcacacaaggaggtctcagggtacattcccagccatggagaagagacaacacatgggaggggagtgcgtataatactctgggctgcagaaagaagccaatgtaaatggctttttgcttgatgtctttagttcattgattttaggcctagaaagtcgtgattgattacatcccaccaaatgcaggctggggaagtcagtgtgggaatttagagcatggctgatttaataaatgttttcagaaccatgtattcttctgaggcatgagaacgatgagaaaaagaacactggtcaagagctagcagagctagggtctggcttcatttctgtccttgattagctgtgtgactttgagccagtcatttaacttctctgaggcttcaacttcacagtgaggttgttggagccgtacatctcagtactagcattcaatggttccatgaaaattcacagtgatccccatgaggtcagtgtccacccatgtagcacatgtattttgtttggcatgcttgctggggagaggagaatcacaggaaggcaacaagggaagaaaattttaaaaaatattggatgttctcttatatatatcatccagggcttcatccgtcatccaggggagaactagagatgttttaaagacttgagacctccactgcctggtcctattgaggatcctgtgttaatgacagttttgccatctctaaatggcattgaaaatccagtgcctgggaataagtaggcaggggagtgcctggggacatggccctgttataaggtagtggtgtttgtttttgggacattagccctcttcccattgtctgttatgttgaggtcagcttccatgtacatttccctatgtctcygagcacattctgatcaattcattgatggtgagagggaaggaaagggaaggaaatagacatttttaaatgcctatgatgagctccctactgggaaggatctgtattcacagccatcttatggggcaatcactttacccacattttatacattataaacctgaggcttggaggtgttaggtaagttggataaagtcactaaattattaagaagcagagccaggaattgaacacatgtctgtgtgagggcctgtgttttatttgccttggcatcctgcccttatactatgacagctctgggcatgcattgtatacaatacaccagactgatggaaagtagcagtggaggaggggaggatggggataaagacaactatgtatcattcttattcttgaacatattatctaattagacaaataaaactaacataaagggaatacctatgacaagttaacaattttatcaacaatataaaaattagagatacgatactagcagctaacatgtattacacggtatatgccacatactaaagactctacaattgttttctcaattgtcaccatgatcccatgtccatatttcattgacgaggaagctgagacataagagagttggaaactctaccaaagttcacagcctttgggcttccagcagtgagccaggattccaatccagcccaactggttccacgcggtactactgctggtgttatttgtcatcaaataagggaacccaaggcccactgtaggctcattaggaggggtgagtttggtctgaaatggtcctggcggactgaagggaggaaatgaaactcaaaaagcctgtatggaaatagccttgtggtcatatcagagatcaggtttctaacgcaggttcttaccacctcatggtaggaccttgcagtarttgcagggcttttcccacacctcctctcatgtctcatggctaacaacctgttttcttctgcattctaatctcctgagaattctctctaaaatggaggggtcattagaaggcagatatttytggagcatgtcttccctggggcaagcaagtgcttggaaccaggggtgcagggaaagcctacgaatccacacctgactgtgggacagtaatagggtctgagagtgttaggtcctgcaacctttcttgaagcacagataggagtgagtacagcagaattacggccctggattagtccaactggcattgctcatgtaaaagcaagagctttgtcaactgcaatcccactttaaagggtgtgtgggattgaaacaagatggcttgaaggaagagaccagtgcctgtgctctgtctttgcattgcacacaagtgtcccttgtcctgaaagaccaggtggactggataactgcataacaaagatgggtgctgctaagggatgaggggatacaaaaggggagaggctacaaatggcagagccaggtcaggtcttggagagtaactagtcacagattgcagtcagatcctgggctaacatattttaagtgaaaacratggatttaaatgccattaacagagcatgtattctccaggttcttttataccagccagcttcactcattccagtgacgatcttgtcttacctcctctgtccctcactccttcactcttgccccagctatcccagaatagcttaactacccagagttgcatatcaagaaattgtgagttgaagagaataaagtgacttaaatagatgactgtttatggggttaaaatacaaaactacattttctgatttctagtttgatatttctccacaatgctgtactgaaagctggatttttctgtctttaaggcatggagaaaagtgagggagtcttggggtttctcagaatttraggcaacatccttaacattgggcgaggtagtctggctattaaccatgaaaccctatggagtgagcttagttgaaggggactgagcaagccatttcagagcccagggcctctgtgacaaccaaacacatttgctatttggaaaataattatagatccttttgagagattcagctgcggataaaactggaatactctggctagaaaagtacttgctatgaaatccattcacctagtgtgatagattgttaaaaatggccacttttattctatccctgtatgcatgaatcccccctgcctcccgcaacccaacccagcaaggtgtctgtaatattcctcctatcaagagtagagtttctctacccacctcttgaatgggggcttgaccttgtgacttgttctggtcagtagggcgttagcaaacatgatgtatcagaggcttagaaagcatttgcatgtggggtcctaccctcttcttgacaccctaagactgccatgtaaagagattggagtgccttccggaggttgagaatatttggagcagacaaaagtcatcccagcagagactccctggaccaacagtgaaggtacctgcatttttgctaaaaagtccaagtggaagggtattgttatatgcagtcctatcatgttttctcaaataatggggaaaggacacaggtgtccatatatgctcgtgaatccagccgtcttcaytggaaaacgtgtggcctgcagagattcagtggaatgatcttaccccaatagtccaggacagtggctctcaattgggagctattttgactcccaagagtcatttaataatgtctggatacatttttaatttttgtacccccagggcaggagtatgctactggcatgtagtagatataggctagggatgctgccgaacatcctaccatgcacaggacagtccccacaaccaagaatgatcaagtctgaaatattgatagtgttgaggttgagataccctgatctgggcaattgttgacttcatgtcaggttttacagagttccttaacatatctaggcaatacttcaccagactccaaccctagcctcatcttcttcaagagcaagttctctctttgggagtctctgaagagtccgtcaaaaacatttcttaacatcctaagacatgcctctttagggttggataaagatgattttctaattttaaaatgccttcctagccccagattttgtgcttatattgcagagaagtagattgaataccggagggaaggacatggatcaaggtggaaagtcagacgtaagcagagctacatttgcagaaagtatgagttcagtttagtttttgcttatggaccacaaagatggccctcacctctaaaccttgaagaattccagaatttttctgggagaggaacatctctatcacatctgccacagcggaaggctttgtgcaggataacatatcattggcttgagaacagagtgagcatgtgtggaagggcctgtaattwttaatatgayattggccataatttatcatgtcataccacccacttacagcagcctcatcctatgaaatgctaaatgcctttcttatcaacacttgatgggaaaatgctgttctggcatcttcctctaagggaaacagaaatctaaccatgttycttacagcctagaactctgtacacaaagatcagacttgtttttctccctgaaaatttataggtatttacaaggactcatatcctgtttgctatttagaggggcaatggagtgagaaagaattatgtagcaagtttctttttcttgagatttgctcaagctgctctatgacttaaaaaaactcagatattactccccatttttatgggcagcttgctgttttctattcttgctttcctcaccgactttcttggcaaagctatgcttgagtactcctagcgggtggctagattctcagtgagatgcttctgtcataaaataccctagaaaaggaggttcaattcatgatccagggtgaagtccttgtgttttagtcctattaaattaaagaaccaacttttgctgagtgttccaagactggattctttcttccctgttgtcgtcagctctcagtaggtgcagaccttctgcagaactccgatggcacccatgaaggaagaggaatccactcttatggtatcagagctttatgaaccctttcttaatattagaatggaatcctacagccaagagaaaactgtgtctcacattcaaagaggcagacattggaaggaaaatattcaccttctgacaagttttaaagaaayagaaaatattgcttctttttaaatatttgcctgggtttgatcacttaatattttttaataggtcacaatactgcatttccaggtagatcgactaaaatgcttggagaatggttctgtttaatttatttgcctagttaacttacagcaaaccacaaattatttatttatgtatttatttattttttgagacagtttcactcttgttgcccaggctggagtgcaatggcatgatcttagctcactgcaacttcagcctcccaggttcaagtgattctcttgtctcagcctcctgggtagctgggattacaggcatgtgccaccacgcctggctaattttktttgtatttttagtagagatgaggtttcgccatgttggccaccttggtcttgaactcctgacatcaggtgatccacctgcctcggcctcccaaagtgctgggattacaggtgtgagccacctcactgggccacaaatttttcatttaacacagttgaatatgatttcatgactaaggttctcattgctgagttatcattcttcagctggagaaggggagagggaaggtgcactgattcccaaagatcccctggcatattgtgaagcaagattgaaagatgtatcctggaaaaaattcattagtttgactctctttttaactgcattcctataaattgagactctactcatttaaggtggttatgagaattgagtggatataatgggatacagagggtggcacattgcaagctttgatgataaattatggatgttatgatatgtatgtactttcatttgtaagtaatgatttttataaaatattatgatacatttctaggctgaccttgaaggagaatactaacataactttggaaaaccaaaaaatgaaaaaagggtatccgtttctcatcatgaataggtttcaaatctcgtatttggagcatttcaatttaagtttgaagaagcaggactgaggtcacatttttctccattggacattctttctgatgaataagtattaaaactgctttgaatttggtttcccccttagataagaaattattttttccatacagtcttttctttgcacctgaaggagcattgagggtgaaaaatagaggcctgtttcctgttcctaactggagccctccaaggttgtcaaactagagcaacaactttgtgggatttatgcctgggacctgtcaaagtagaattatcatagcaaaccctctctgctatcaatcagaggggtattggggatggcaagggcaggcatttttcaaatttctttactgtgcatatttagtcttgtgcctgggggaggaagagctcctttgaacagttcttgtagatttcttttccatcagatggcagctcacaaaactacttaatcttccccaaagggcttctctcattggcctgctgagaaaaacagccaaggaagagagagtgggggaagacagggacaatccaacagcaaatcctagaaaataacgcattgctttcagaggacgtatggtctaagtctggtcacactgatatcatgacttagaaaagcacactgtccattgaaggttatctcccgtcgcttcttttttttttttttttttttttgagacggagtctcgctctgtcacccaggccggactgcggactgcagtggcgcaatctcggctcactgcaagctccgcttcccgggttcacgccattctcctgcctcagcctcccgagtagctgggactacaggcgcccgccaccgcgcccggctaattttttgtatttttagtagagacggggtttcaccttgttagccaggatggtctcgatctcctgacctcatgatccacccgcctcggcctcccaaagtgctgggattacaggcgtgagccaccgcgcccggccctcccgtcgcttctaagtatcatgtggacatttagcaacagcacaaagctgacagtgctatcatagcggtgtgagtattcttctgtcctccagagccatttcccacatttgtcaagacaaaggttgaaggggaccggacaagggaaatgggtcacccattcattcccatctgtcagaggtttgctttgtcatgataacattcaaggagcatgtttatctatcccgctactggaggttaaggcaagggtaacaagaagagaagaaaccctgtttgaaaagtttacaaatcctgccgtgagggctgtaaacagagtccagccggtggtggagcgtgttaaatactgccacattgatagggacmtggttccccgrcactagaaatccactcatgtaaacagaggaactgttgctgtgaatcgggtctgttttgacttaaagtctaagaaacacattgccttcaaagtgaattcttaggtgtcacttcccataagttatggcagaagattacaaagctactgatataacatattagtttgatggacagaattatacccccaacgcttcctgctctccccaatgacgcacactaacttagtgtactgtgacagctgccttgatttaccaccagtccgggaggccaaccgggagaaggaacgttcacatggacgcagggcctgagactggcctggagcctagtttataaagctgccctgtaattcaccacaaatgtgtcaccattaaaagaggaaaaaaggattgcagataataaatactctttaatttattagctaacaacaaagagatcagagccagttgtgatgtgattgtttgacataatattgtcaaggaaaaaaaagctaagttgaccagagaggtaaattacacattcaagcagatgcatcaactcttggcttgtcataagcccagctaaacaaaacaccacacagaggggaggactggccaagagcagagccatttatctctgaaagagacatattcaagagcaagtgaaataagacatagttcttttggacttggtcagaggccaggttttaactgttataaattaaatgttttgtgtataggatttggcaattctagttgcctttgtcatggtagggagatgttaggtttttctgcctgtcttaaactcatggtttggtcagctggggtgtgtgtcctactgctagatattggaggatcactaccttttggtaattagcagatattgggaaggtttctgtatgtggcttgtgataaaatcagtggctttagaaaaacttgtaatcgccttcgttttctgcaattcttcctctacagttgttgagcaatactcacacaggtcaccaggcaggaattcatattgatattagactcgtggaacctgaggattggaagaaacatttcatcccgcatcccacccaggacatgcagacagttgtgtatgagcggggcaacttccagggaggccaggcatctgccgtgtgttattgtaacatagctcagagtcaaccagtgctttctgggcttttatttttatataagcgactgcccagcaaaactctcccatcccttgcttgggaaattgagttttcagatctaagtgggtacttttgctttgttttgcatattatgggtctttgggtttagcctattgttagaacagatttctgggttttattcaacagtctggaggcaaggatagagtcctgtgggtaggtttaaggacattgattcatggatcaacatttttttgatgtagttaattgatctgctatgaattgcatctcatttattttatttgttgcaaagcaatatcatgggggatttttgttagatgtcttattgaaatcaatttataatgyttatggtctcactgatctaccagctgaataactgtttctaaaagacagagctagaaggcagggagggagagagagagagagaaagggagtggagaagagagggggagagagagagagagagagagattgatttggcytagctcattctaggtaaaaagatgtactagctcttaaaagttgctactatcttttcaacgtgctcatatatcatatatttaacataattttttacaattttagtgtcattatttttagaatcttctgttcctcctttaaaaaatcaacaaaaatatttgcccaaatttgctttttatctgtattttttcaaatattagtaacattgtttccatgagcagatctataagaatttttttgttgttgctattgtaaaataagatactatttgtataggtctagacaccaggcatctcctatgtctcataagctctctagggcctcattcttccatttcttttttcttttttacttttcactcatcagtctagcccaaggatataatttcatgatggagaaaataatgacaaaacaagagcttagttttaatcattctgcctttcctctgtcatttgggatttctttttttaacaaccattttccaacagtagacttattttcttcctttgagcatggttttcataagtgacttcttaaaatctgaattcactagaatatgccccatacagttatactagtttggtttctttcactgcttccctatcctcaagcttccccaaccttccttccttgttgtcaatattcataattatatactcagaatttcacttttagtagcatccttccttcttgaatttcatgtcctattaggatcaatatctgtggaaattactatactatactatactatacyataccataccataccataccataccataccataccataccataccataccatcctatcctatcctatcctatgctatgctatgctatgctatgctatgctatgctatgctatgctatgctatgctatrctatgctatgctatactatactatactgaaatgctatagtctcttaaaaataaagcaaatccaatcaagagtattcatatatttgtgttccaaaatatgcaaagttatctccaattaggcacggtcactttctcctaggggtctcatatcttccataccaccaatctttttattttttaagtttgatcatgttggcatttgttctgctatataatgtatattatgttgctactttttgaatatgttcactaaatgcacktctgcctgattttcctggtttccaaaaaggattttccctcttcacctcttctcctctcctctctctctattggaaatacctttcttttcagcaaggtgttctcttccactgtcacattctgggcatgattacccaccaccgtgagtttagttcaagttcattttattttaggaagttacgaccggttttataggaacaatgtgcctttatcatgtcaactccatgttgaaaaacctttagggcctcctcctcgcatttgggttacagccacaaacccttagcctggcttctgaggtccacttaaccttgaactcaatgtacttttttggcctaaccttccagactttccctattttcactcagcctttcaaatcaactgatctgctcatagccagcaacatgatttgttcttttattcgttcacctctttgggctttccccccagaccttttctagttttcttaattagaaagtgagtcaccaaaaaggtcattaamatcaagtctttcattgccttttgtttttttctctatgaagaataaaataattttatggtgcaaaatgaacttttgaaggctaagaaagaacataaagtttgggccaaccaaaattaaaagtgactcacaattaatactaccaaagaaggcaatcttccgctgtccttaagtcagcaaggatttatgagagtgcttgatgattgtgtgttgcatttcctctgttggaaatgatacctagaattttagaagcatagattctgaaggatgacttcataataaggattttaggagcccactgttacccatctcaaccttggatgcctgaaatacactgacattcctacacatggctacatatcattcttattattcagtccacagccattgccaggatagataaaaagcaactgtcatttcacatcagaccaagctaggaaagtatatctttcctcaaccaagaagatggagtatgaaccagaccacatggcccagtggatgggaattgatagtgcatacagtagctttaaagcagcatggagcaaaatagatttaaatcattccgaaagaaataaatcctaacaatggatacattgtgctgaatgaaatgaagctcacaaaagaattgattaggaagtataccaaatggaataaaatgtagcagaaaggcacatattagagagaataaaatatgtttcagtctgaaggggatttaatttactaagatacaactgaccagctataaagcagatgaataacatatgtagtcaagtcaaatggacattcaatggaaataggtttatatagatcaatggcatcatgtgaccagtttcattcttctaattctatggctcattgtgtaatatctttagctctctcaagaaaatctgaggcttttcctgaatcctgaaagagggaactcaccttaaaggagtgtatgattaattggaaataggttattgtttgttggcttgtcttggtccagagaaccataataattttctggaattagaaggattttacagtaaattgcaatagagtatcacagtgaagactatttaagcactttttcctccaatgttaagttagttctactggtcactgtgctgaaatacttagagccatcaatggtcttcatttctctttctaggaaacttggaaattttaggtcaatattgaaattatcttgctgggaattttctcccacatgcaaacatattcattaaacactctgttgtgcttcagtcggagtcctttggagaatgtaattctcaacatgaatgaagcttatttccagcgttattcacagtggcatatcaagggcaggggggaagacagtggtctgctccaggtacagacaatgaggggatgcattgtttgtagaaagttttaaaacaataataaamccaactaaaattttgtgtatattctgttatcaccatgaactggcaattcaggcaattaaagtgataaaaatactcatctctggaaaaaagctgtcaatctaagttctragtaattgccaggagttctgttgtattttaaaataatgactattattgttaatatttattacattttaacacacttaaaagtttatcttttaagacacatcgtattctatatggagttactctggggaactcctagctctccaggaagccttagcatacatgaacttagctgtaaattcacagtggtttggaatattagagatcacatcacagtcagtgtctctaaaaccttggtagcatatatttctgcatttgaacaatatatttgaactaggcagtcgtagaaaaatgattgagagataaagaaacaggtcttgagttagttctgtcattcaatgagactacttggagcatttacttgtttttaatatttaaaacaataaaataaaatacaaaccatgaagtgtactattttgtctttggtaagtgcaaatttaagtttatgcatgaagatctctaatatatttgaataatagctttacattaaaaatttaattttctttttaattgttaattatttcaaaacaaaagcaaattaaaaaaataataattactaattacgtgcttataactgaaaagaattttgttttatggaggaaggggtattaataattatctgctctgggtatcaaatatgctagctatggcactgggtattttctttttctttttttttttttttgagacaaagtctcactcttgttgcccaggctggagtgcaatggcatgatctcagctcactgcaacctctggctcccaggtttaagcaattctcctgcctcagcctcctgagtagctgggattacaggcacccaccaccacacctggctaatttttgtatttttagtagagacggagtttcaccatgttggccaggctggtctcgaactcctgacctcaggtgatccacctacctcagcctcccaaagtgctgggattacaggtgtgagccacggcacctggccagcactgggtatttttatttttattttggttacagatgataaaacaattcaaattgctgaaaaaatatgtaatttaatactttatcaatttccttttatcttgcaacaaaccacctcgaaatttaatggcttaaaataagagttatatataaggtcacagtcctgtgggttggctgggtgcttcttatctggactgacttggttggggctggatggtcacaaatggcctcacatgtctggggctcagttgagatggctggaatagctttccatgtgatctctcttcttccagaaagctagcctgggcatgttacctggtgggagaaaggttcccttaacaggagaaggaaaactccatgctcaagtaccttttaggcatttccttgtataacatttgttaatgactcattggacaaaacttgttacatggccaagtccacatacgaggggtggagaaccagactctacctcttgatggtaaagcagtaaggttacattgcccagggaagtatgtatagaggtaaaagaaatttttgcagccttttttgtgaataatctaccacctacccataagggttgtgttatctccaggtattcaagtaacattggcagtaatttccatcttcatacttcgtctcagttctacttttttatgtagttcatgtagcctttttaaattaaatgtattttttttacttggcatataatacttgtacatatttatgggatacctagtgatgtttcaatacatataatgtattgcatgatctgatcagtgtaattagcatatccctcatcgcaaacatttttcatttctttatgttgggaacattcaatatccttcttctagctactgggaatgatataatatattattgttaactgtaatcatcctacaatgtttttttaacatgagaaattattcctcttatctggctgtaatttttcatcctttaacaaatctccctaaccctctctttgctttacccttcccagcctcttgtatcatctcttccacttttcatttctatgagatcatctttttttagcttccacaatatgagtgagaacatgtggtgtttagttagttctgttcctgacttatttcgcttaacataatatcctccagttttatccatgttgccgtgaatgacaggatttaatttatttttatggctgagtgatattccattgtgtgtatatatatcacattttctttatctactattccgttgttggatacctaggctgagtccatatcttggctattgtgaatagtgctgcaataaatatgggagtgcagatgtctttttgatatgatgatttcctttcctttatatacattcttagtagaaggatttctggatcatatggcagttttatttgtagtttttaaggaacctcgatactgttctccatagtggctgtacaaatttacattcccaccaacagtgtaaagagttcctttttttctctatcctcaccaacatttgttattttttatctttttgataatggccattctaaatggggtgagatgctatctcattggtgttttgatttacgtttccttgatgattagtgatgttgggtatttgaaaatatatttcttggccattcgtatgtcttcttttgagcaatgtctgtttagatcatttgcctattttcattcttaattttttccttcactcattggttgttcaggagtatgttgtttaatytccatatattcatacagtttccagcattccttttgttattgacttctagttttattctattgtcatctgagaagatgcttgatataattttgacttatcaaaatttgttgagacttgttttgtggtgtaacatatggtctatcctggagaatgttgcatctgctgataataatgtgtattctgtagctgttggctgaaatgttacctacatgtctgttaagtccatttggtctctggtgcagtttaattccagcatttctttgttgattttctttctagatgatctgtccaatgctgagagtaaggtgttgaagtccccaactactattgtattggggtctatctctccctttagatctaataatatttgttacatatatatatatgtatatatcagtgttctggtgttgggtgcatatatatttacagttcttatattctcttgcttaattgatccctttgttatcatataatatccttctttatctctttttagaactttttacctgaagtctgttttgtctgatataagtgtagctacttatgcttgcttttggtttctctttgtgtgggatatctttttccatcccttcagttcaagtctacatatgtctttacatgtgaggtgagtttcttgtcaacagcatataattggatcttttttttttaaacccattcatcctgtctatgttttttaattggagaatttaatccatttacatacaaggttattactgataggtgaggacttactcttgtcattttattcgttgtttcctggttgtttggtatattttgttctttacttcctctcttattatttaattttggacttagatgttccctgtagtgataggtttctcttcttcttttgtgtattgccttgcttcttttctctttcttccttgtgtattgtccctaccagtgagttttatagccattttttgcatgttttcatgatgatgatgaagattttccagatgtaaggcttccttgagcatttcttgtaaggccaatctagtggtgatgaatccacttagttttagcttgtctgaaaaagattttatttcttcttaatttctaaaggatagctttgctaggtataatattcttggctgacatttttttttcttttagtactttgaatatgtcatcccattctctcttggcctataaggtttctgcggagaaacccattattaatgtaatgagagttcccttatatgtgacttgatgcttttctcttgctgtttttaggattcaatctttgactttgacttttgacaatttgagtataatgtgcctccaagagaacctgtttggggtgactctatttggagttccttgatcttcctggatctggatgtctatctttcttccaagacttggaaagttttcagctattactttattaactatgttttctgcacccttttccttctctgaaatatatgaactacacaaattcatatgccatccttgtgcaggggccatgctaatcttctctgtatcattataatttgagtataggtaccactgaagtgagcatttttaagaaataaattttgataagatggccaatatcagcaaatggattacttcttgccagcttagcaaccctactggaaagagagcttgttccaatagttcaagacaaaatttcaagactgacttttattggctggattgacttgcgtttcttttcttttctttttttttttttttttttttgagacggagtctcgctctgttgcccaggctggaatgcagtggtgcgatctcagctaactgcaaactccacctcctgggttcacgccattctcctgcctcagcctcccaagtagctgggactacaggcgcctgccaccacgcccggataatttttttttttctgtattttttagtagagacggggtttcaccatattagccagaatggtctccatctcctgacctcgtgatctgcctgcctcggcctcccaaagtgctgggattacaggcgtgagctacygcgcccggctggcttgcgtttcaatctaagctaatcacctgggtcagacccacacctcgtaccaggaactgggctcatgtccatcagaatcatatgaaatgaaaggtggaagrcactggttctaaaaaaaaaatgacaccctrgttgttacaaaatgaacagtgaattaatgctgggcatgcaaaaataagagcctttgactaccctcttgtgcttaggtcatagtatcaaggagataactagatttaggctttyctacttaggtttattgttatttaaactcacttctcataagccttgaaaagcaacacacatgccttcaataatgggtctgcaagttgaactttaaatatttgctttacatattttttgaaagtcacatgtgcaaacatttttatatacatacttacaaaggtagataacatttctgcaggatgaacccgtcatataaactcattgatgtgccacatgtgcacaataggtggattatgactaaaaaacaaatttagaatgacatttgagcaatcttgataagtttatggagttgttggagaaggaaaaatattagtggggaagaaaattgttggcaataaaattagaaaacgagcctcatgtaatcccagctacttgaatggctgaggtgggaggatctcttgaggttaggaattcaaggccaccctgggcaacaaaacaagaccccatctctaaaaaaaaataataataataaattaatcagatgtggtggtatacactggtagtcccagctacccaggaggtggaggtgggaggatcacttgagcctaggagttcaagctatgtgcatgccactgtacttcagcctggacaacaacgtgagactccatttcttaaagtaaaccaaaagccttcaaatgcatataacctaaaatcaggaatcaccggggttctcagtgattgaaatctttaccaccagtgttcactcatgctagcctcatactcccagcctgctccactcatgtacgcgcttctcatcaacatgctttattttctgaatgattctccgtgaaaagaacaaagtggggtgatggaaagtayagtcacttggcattcaggtttaggttctggctccggcaccgtgtgaagtttatgagtcttttcccatttctgggtctcagcttcatcttctgtcaagtgaaagattagggtaactgatctcaaataactctctggcatatatgtgttcggcacctacatcttctctgattggtcctgggttattcaacatctttcctctgcaacttatttagccctaggtttggggaatgggcactaacttctcctgtacagattctttcccaagcttccaaatccatggcctttagttttgaggttctgctggcccctgtttttttccccaaagcaaaccctcttgacaaattcatgctttccagcaagcttaccagggtaagtcatgctggccagggtgacttgtgacactctgtttccacagctggctctggcctgtgcctgactgctgctgtgtctgattgttaccagccatttgccctttcttaagcccttgctaaccattttctttacagaatatatatgttatgtgccctagcataatttttctcataatgaaatagaatcattttcatagaactttgcaatgttgttaacattagcattttggggaaagtcttctttatagttgtttataatctcattttcaaattgaaaaaaaattcaaatgctatttttagaaggatacattccaaacattaaatgattgatctttactttggaaggtacctcttgggtcaccttttcatctctagggagttgattccaaggcaaacttgtttctgatgaagtgtttcaatatgctttattataatctgggaccacaaaaggaacttctaacaaacttttttttttaaaaaaagatcatctgtttatctcattctctctctttcttatgcttttgcaaaaactttttatcagtttacagcaatatgaaattcaaagaaaaatcaaaatagaaaaaaactctccagtttgaaaaatggagttgatgtgctattttaatttggtgatgattctactgaggcattgtttccaggtttgcatgatggttactttatcttttttgccttttagactcaataagatatttctccatagcacattactcaagcttctacataactcatctcacatagttacraagttttgtccccttggactgtaagcccaggcagggatgggagcttgttcattcttggatccctaccgtcttgcatagtgcttgctatgtagaaagcactcataggctcaagtggaagaatactgtgtaggagcaagaataatatgtaggggtaaaatgttgaacatgcataaatattgaaacaaagaaataaattgattttggtgataggtgaccctgagagggataaaagtgtaacccagaggccctcctatgttacagtggcaaaacctctgtcaactctgatgtcttctgctacaggttaaacaagaatggaaagctctattcaaccatctaaaactctgccttcataataatgatggatttgctgtcatcataactcattcgtaggtaatcttgcaagagctgaactttggaactactgccatttggaagggttccattcactctaagggaaacctgagaatctgagttcatttactttttattcccccttttagcagtaatttgttcatttacctttaatgttgaaaggaagcaggttgaggccagccatgatggctcacacctgtaatcccaacactttgggaggccgagaccggcagatcacttgaggccaggagttcaagaccagcctggccaacatagcaaaacactgtctctaccaaaaatgcaaaaaattagtcaggcatggtggtacatgcctgtagtctgtagtcccagctacttgggaggctgaggcatgagaatttcttgaacccaggaggcagaggttgcagtgagctgagattgtaccactacactccagcctgggtaacagagcaagactctgtctcaaaaaaaaaaaaaaaaaaaaaaaaaaaacacggaagcagattgaaataatgtgttttccatttgcaagtggcatggtcattttagttgaaggcatgtccactgcgagtatttcggtcagcttggctgcttctcatgctgtttgcccaattcagcactacagattttgctctctkaaattccagcttyatcccataggagaggtgcagatttctatttctcatctctygtctgttttaattctttgggagaggagtcctgagtactaaacagaaaggtacgcatggagaaatgtaaaacatattttcaggcacctttgtgaaaggaaaatttaatgggacattatagtactatgggaaatggagagagataagaatcatgccccatgcttaaccttttggactcatctttgccaatttctatgtgcagttcagtaaattaaataagctttccttagcctgaaactgtctgtgatagtgcaacctttcactgaggtatcacagacagacattcagcgttcaagacaggggcctgacacctttcaaaagtgaaggaacctgtggcaattttaaacattccaaccatattaattccagtgacagttatcctctaagttatttgaaatggattctccctcttcaactttcgaaacttatatttgatccccatgrcctctggggcctgcacaggggcactctctgtgactgagtgcgtgaacagcaggaggcagaagcaggaaattgttgatccggtccgtttatgtctttcctcctcctttagctgttctctgtaccttattcatgtttctaaggaaaagccttgcatttccaaaagaagggttgaataacggtttggagttctttctttgagggcaatgtttttattattgctcttccacccaggctgaaagttgagtgtcatctctcaagcataagcaactaggcacttcacaatcaatactgggctcagtggttgagccctggttaatagagctgcttcttttcaggtgctcacactcagcgcagccraattctgccttctctgtcctgggaggacacagggacctgtgcccttctccaacagtgggatcattctcgggaagtgctcctcactttccacatggtcaggaagttttggatgtctataacaagcacaggcgaggcttggtatggagcccagtgtttatacttaagagagtgctgggggaatggtcacagaagacccatcaggcccttatgggctgagttccaaggtgactgtacattggttattgttggggaagagtcagatcttcagctttccatgtgtgttggtttgatgttattactagtcatccatgtgttagaaatgaccttattagttcatgtctaagaaactaatttacaaaccaaaagactaacatgttatttccatttgggtgagggatagtattcaggaaaccaccagactgttcacatttgcattctagggacctcccttcctggtattagactaactggcaaagtaaattaatcatctgcaagatttctaagtgagaatggatgattgcatagctgttaaggttacaagtcaaatagcctgtgtttggaatcctggccatcacccttaatccctacatgatctcagaccagttacttaccctctttaagccttgattaactgatctagaaaatgagatactaagagtacttacctcatagagttgttgggaggattaaccgggataataaaaaagtgtgtatgaaaatgcttggcatataataagtacacaataaatattcacactagtattagtagtataataataatcatcttttttttgtaataaaggtaattggatatgttcctaggccatttcatcctataatgttagaatctggagacttacacctgcttctccatagaatactcctttgcaaggacaggattacctgttagctgctagaggaaggctgacaatttcttatttatcaactcttctttctctagatcctgtgttgcttttttgtgtttatgaatacatatttaactactgtttatagaatatttgctatatgccgtaatattgtgctcttcatcatattacctaatttagttcttgcaatacctgtttgaggaaagagtcattatctccatttttcacaataggaaactaagtacagagaagtaagaaaagcgaggaggtagaacagctggggcttcagcttaggtctgtctactaaattccatgtctatgacactaggctatcctgcatctttatttataactcagtatattagaccttgagttaattagattattactaattttatatttattacaaagtggcatttttgatgagttttkagaaatgccctagtatatttacatacattgaatgkatgacaatttgaaacttaatttcaaaatttcacaagttagaatttaaaaactagacttgtaacaggagatgagtttgttttgattccggagaacattcaatctctgggtgatgatccaattaatataggctagagtttcccaggtagatcttatgggaaaatgatacaggagggacacattatcaagagtgctgataaattcaaattgtaactaacctcccttagatagacccaagatagtcatgcctccttctatagggactctttggggcatgatagaccagatgccatgataaagaatggcattcccacagttgagatgaatttccacaggtcaccatatgcagcttcctttctcagcaagaatatccttaactttatgcacrtaatttttttttgttttttttaaacagctattttgaggtataattcacatactatattgtttgcccattcaaattatataattcaacaatttttgacatattacactayaacttttaaaattgtggtaaaaatatatataaaaaatttaccatttaaacttgtaagcataaaattcagtggcattaatgatattcaaagtgttgtgcgaccatcacaactatttatttccaaacccttttttatcactccagtagaaactctataattattaagcaataactccctatttctccactttccagccctggtaacctctattctatttctgcctctatgaatttgcctgtctgcttcatgtaagtggaatcatgcaatatctgtccttttatgcctagcttatagacataaaccttgaaaacaagatttatctatgtggaagcctatttcagaaatacattccttttgatggctgaataatattccattgtaaacataatattctggaatgaagatgtggattccatctatagctgtcaatcttgtgagtaaaatcaccagttttgtgtgaaatgtctcatttgacacaaccaacttggaaaacatgttgaggatatttctagaatggtacccaatctattgacccttgtattattatttattcggtgtttttcttgaaatcagttcacttttaaatgtcttaaatatttatcttattttgtcctaattaatgttcatgaagtccataggttgacgtaatattacatattgctattaaaatgatttacatatatttgttctgtatacctcctaaaatgtatcttctacctcagccacatataggctgtcaataacttctctaattctcaaacttgaggggtgggctgtgtgtcagaacatactagagtgccagattccctatggaacagaaatgaagaggagaggaattgtaacaaatataacctggtgtgaaggccaaggttaaccctaacccaaaccctaaccctgggagtcaattagtaggttcaagtctgggctaaaactgcttctaatcagctgtgtgatcttgacacatagtcctctgtgccttagtttcctctctgtcttaagcaggttgaagtagatcatctcctcctgttgctcattcctggatgtcctgcttctctcccacattcaggaatgacagggctagtgtgtgcttctgcacttgccctccatggggctgtactggagggatttccatttctttggcttcatggtatttacacctctctcttttcacttctctcacccctcttatattagatcaaactcgatctgatgtaactcttaatgatttcctttttaaggaggacattaggaaagcctgcatcaaggacatcacttaccttcatttagaactgtgggcatctgcrctgtgtccatttcttacagcgataaaatggcagtaaatcagaaaaaatgccatgcccttcagaaccttgagaatgagctcctgagcattctgcttacrgggatgtaggcttgtcagtgagtaaatcagctctgtccttacgcccccattgcatcagggaaatctctgactttgtgggataggtttgacgtgtcagtcaatctctctctacccccatttgagactgagagtgtatctctccctgtgttttctctgagcrtgtttagtgagcttattggccccctaggtttcattgccagccacagcttagtccttgtcagagagattattatatgaaccctaggtgacttctgactgcagaagggccctggatttacatttttgcattccaaagtcaggaatataaatgactaatggaacactgggccaccgaatatttatatatctattttgaaatttacatttctccctttcttatgatggggtttgctgctcccggggtcgtagttsatgggccagtagcatccgtggtgacaaagcaatcatctggggagagtgcttcccagccccagtggcacactgtgatgtgctgcaggttattatgccagcaattcagcagtaatcgaaccccccatctccttggccctatccctgcttcccttttatgatgtccaataaattttacatgctccaatttgcctcatccaccacctaatactgtttgaattaagaatctcttccatagctttcaacaatgggaactttgctttctccaaaattatttataaaggccactcatgactgtgccagaacggaggctggactgtgcaggtagagacagtgcacatatgctggtccatatagaagatggggttgcccagttgttgaacttgctgactacatgatatattgagatggaagaggatgtctatagatacatactatatctatatgtatgtatgttttgaatgaaaaaattgtgttaaattaggaattttttaaaaggtagagcatccatttgaaagttccctggtccctgatacttttcacgatatatggtacatttaataatagcagtaacaacaataatagcaacactacttaagcgtttactactcgctgaattattctaagccctttgcatgcattttaaaattccaacagccccatgagattgagcctttttgtaaacctgcttataaaggtggaaataagttcagagaggttaagttcctcaagattacatagctagtaagcaacagggctaggactagatgttgtattgtctgatacctgtttttaacatcacctaataccaccatgtggtgtaggcaggaagcagagatcttgagatgaatgttagtacatttctcattcactcaagccactcaccttttctcattcactcaagccactcccctttttgttccccgtcagtatttacaaagcatctattctgtgcacaccctgttctgaacactgggtatcaatacagcagtgaagatgacccgcagtccctactcttgtggagttaatattttaatacttgtagtcagacaatagacacgtaaagaaataaaccatgcactttctaacattggtgtctcaaagaaaatgcatgagagcaacgcaatggaaagtgtccagttggggaggggagctattttcactaggatgccaacaaaggcttccctgaagactgggcatttgagctgagacctaaatgtgaagatggctgggagctggtgtatggagcatagggttcgctagaggaaaggcagctgtaaagacccaagtcaggaatcagtgtcttgtgttggaaagccaggaggaagaccagagtggctgaagcattattagctgtagagagagagtagattatgaagtcaggagattggcagacctcaaggcgtgcagagcagggcagggagtgtggatgccgtggtgttttcagttctttcaatcaatattttactgcctgcagcccattttcttttacagcctgtcttcttttccttctgctttgactcgagtcttacctcataatgggcattttaatcctctctgtgatgcaatccaatgcttcttgctgggcaccttgctttattccagctcagggcagcattaaaaaagaacagaggaagtctccagccgagaggggctcaggaaggggtgcaggttgcaatctaagagctttaattaaatcaatgccgtgcacatcctgtccacaaagctgggggcaattgcatgctctttactgacgccatgatatacacttaagagctgtgtgacttcacagaagcaattaaattggcctgtttaatcagtggtaaggccaccatcaataacaattattatttttattgatttgataagtgcacagtagaaataatcacagagaatagctgtctctttccccctgtcctttgcctaaatgctaaaccctaggctacccaggccaaatctatagtgacctcttgaacagttttactacagatccatatgtaatcaagaattcctaccttggctaggcggctcacgcctgtaatcccagtactttgggaggccgaggtgggtgaactgcattaactcaggagttcgaggccagcctgagccacatggcaaaactccatttctacaaaaagtacaaaaattagctgggtgtggtggcatgcacctgtaatcccagctacttgggaggctgaggtgggaggatcacttgagcctgggaggtagaggttgcagtaagtcaagatcatgccactgcactccagcctgggcagcagagttagaccctgtcttggaaaaaaaaaaaattcctaccttataaaatttccatgctaaaaaaaaataatccatgctttttcattgaaacagaaattttcaactttccagtcctttgattggtaacaaaggaatgctccctatggcaaataattaaatctgcattttctctttcagcctcatccatcttgtttattgttttcctatagctcaaactatgatctcattttggccagaaatataggttcagtgacagaaaacaggcttggacattgcatagctgtggatatatacacgattatgtggatgttacagaacctaaaggaagatctaaatggcattataagaagctgcttttaccccaagacttattatctttctccatctcacttatagtttrgcatctttgcatttgtagttccaaaaatctgaattacttcccctcgccttcttgtgaattaattccatatacttgtgaccatgggagagaagcagactcaaagtataccaaaattggagtccagccttggggaatgaaagagtgaacctttgttcagggagaaagaaggggccctgatttatgtgtgcagtcactcagtaagaaaagctaaaatgtgtatgggctacatccctctccactatcccactgtgagagatccatgaaggaatagggagggattgttggtcttccatggtacttctcctggaggatagcatatgttattcccacctgacttcattaaaggtaaaggtctcaggaatcttgaatgacaatcacagagatgcccccattccaccattcaccttggatttttggccaggttggcttcctgggggaagagggttacaatttgtctactaatatatggacacattggtaaactgaatttaaatcctcctcaatggacttgatgccacatgggacttgtatggggcattgctctcacagttctcattcaagagctgctttgtttccagatagttctacagctcttcaatagaacctggaatccatggtctgtgaggagaaacagtgacccaggttgtgtcagatgtttttatacgtaccatgaatggcttctgacatcacaaaggtttggaaaatgcattaaattcggtttacctcttaggcattaacaagatacattagcatgagggctttgagattctagaataatttctcagcattttccaaacagactcagtcaaggaaccctttgtcagagtaggcctattccccagaatatacattggaaaagctggtctggaggcctgtattagtttgttctcacactgctataaagatactacctgagtctgggtaatttataaagaaaggaggtttaattgactcacagttccacatggctgaggaggcctgaggaaacttacaatcacggtggaaggcaaaggagaagcgacacacaacttacayggcagggagagagagcaaagggggaactgccaaaaacttttaaatccatcaactcttacgagaactcactcactatcatgagaacagcatggaggaaactgcccccatgatccagtcacctcccacbgggtccctccttcaacatgtggggattacaattcaagatgcgatttgggtggggacacagagccaaaccatatcaaggactaaccacttatttttttttcttgtaggcttgcatatgtacctatacatggggtgagcatcctctcacttagggcaaaatttttagtgaggaattctatgacagtgctacatatattgtatatatgatatccctgttcccaaatgtaaacatctccacatgtatcccttctagaccaaaacctttttatctggcttcatrgaaagctgtagtgttttgggctagtatttaccattagatctaaaaacggtgcatccttggattccttttgttgaattttgtgtaaatatttagggtatttacaccttgacaaccaatgactttaaagtttaaaaactgatatttaactgacttttatacttactaatatcacattatagatgctaaagaatcattgtaaccattagacaccaacgatttctttcagagtttgttaaaatcacgttgccttttttactatttttaaatagtatgatatctaatctgttcattgcttgtgtgtaagtttcctaaactttgccatacctccatataacttgtactattatgtacccagtatgtgtgacagggttccctgatggcaatctccaaagaaatacaatttgggcataaagtaatggtgcctaaattctgcccagaaatgttctgaaatgggggatagggttgaggtgacatgtagttccctctccagaagcaggggagtggaggcaggctcctgtgtcctccagtatgtttcccatccagtatccctggatcaggtgaatgaaaagggcattaactaatggggatattacaggatgaggtcaaatgatccatgtagagttcataccagagtacctgccatataggaaatatccaagtaattctattgttgtcatggttttattgtcttcaaatatctttattttcttttatggatttttacatactacctttttttagacagagcaggatttacttttttttagacaaagcaggatatatatttctaaacatttgaagatatttgaaggtatttgtcatcatcacttagtatcccaggtatcccaaccattccatcttaatagtatctgagtcattcatagtatatcctagactgtttcaggatcaccagttccaaatattggagtaagttattaaacaagtcttttaagatcttatgaagatcttaaaatagaccaggaagagaagtatacttgcccatatttcctccatttagttaatcccatctaaacttgctgcacataaattggaagaattaaataaatgagttgtgaaaatggtgtttttaccatcaaattagatatggatcatctggctataatgggcctggggcacaatctatgcatattcatttgaaaaccaactgggatgtttaaaaaagtgagcaggtcaataagaatacaatgatttctgtagactggtaatgcatggccaggcattaaaagtggatattgtatgcatctgtgtgtgtgtcttggaaaagtcaagtagaacttgatttgggtaaaacccaaatgtttctgtgttctttctagtcagttagttattttgtttagttagaacatagtaccactgaggtaaaggttacgtattttattcttgtgagagctgctttgctatgtatcagggcaaaaaaagaatgatggaacatctctactttttataaaaattagatcaacaatcactgtaatggtagaaaaagagagtatatgtgttttgatattggagcrrtttttacaaaaatcatatatgtcaattttacacaggatcactcactgcttttctgctctgaaggatgaagatcacaactttccctaccattcccctacctctcaatttttgttagttacattgttatcattatattgttaatgacaattgcattctcctctataacaatgctttccatagttgtttagtgttggctccatatttaagtgaactcagagctcagtggaagttctttggatgatagctctccactcctgaattcttactccarccctaactggctgggctttcttctatctttttcaaaaagggctcatgaggcctgaatttcttaagttccatgcttgttgtatttgaatgatattttagttgggtataatagttttaggctatatatgatttacatatatatagaaatatttcttcattgtttccttgtattgaatgtgattctggataagtatgaggtcagactgacttttcttccttgtaggagattcttttttcttccatctggttgtctagagatttttttcccctgaattttagtaacttaattaagatttatttgattgttcttcattctttgtatcatttttttaacttgctaaactcttttgaactatatttttttcttcattttggggacttttttaagtatatgtttgaatatattttctgtcacattaattgtacacatacaaatattactgtctttatttcctatgagtcttaaattatctaattattttattttatttttcatatgcattcactgtgattatgtcaaactgttgctctgtcagtaatttgatttttagtgtgacccctctgctctttgatctttccaaattgctttttacttctgaaccatattgctttggtctttgtttctttaggtcttctttttaaatccattaaattgtgtgtgtgttggttttttgtttcatcctatttgtagttggctgaggttcttgatgaaaaaattttgcagtagatttggtgagtttttgcacagtatttctttaaatacttttccttcacaacctcttcctcttctctttatattaacaccatatacatatatgttagatcttttcatattgttccacaggtccttgaggctgtattcattatcattgttttcctrttttccaggttggataatttatttttatgtatcttcaagttcactaaatctctcctccgttatcttcattctgttattgagacaatctagtgaatctatctatctatctatctatctatctatctatctatctatctctttctttctctctttctttctctctctttctttctttcwtttgttaattcttttgttcattctgtctttctttcgttctgtatttctgtttttgctgttgttgttgagaatgggtctcctgttcacccaggctggagtgcagtgatgcaatcgcggctaactgtagccttgaactcttgggcttaaagatcctcctgccttggcctccctagtagctgggtctacaagcatgtgccactatgtccagctaatttttttttttcttttttgcagtgatggggtcttgctctgttgtccagactggtctcaagcccctgggctcaagtgatcctcccaccttggcctctcaaagtgtcaggattacaaacatgagccactgcacctggcctctagtgaattttttgtttcacatgctgcatttttcagatctaaaatttctaagttttttatagcttttgtatctttcctgagagcttctacttttctactaatttaaagcaagctcaactttatctcatggactatgcagctataataggtgctttgatgtgtttatttgctaattccaacatctgagccatatatgtggattattttttttacacaaatgtgactaatacttatttgtatatttagtaatttttggcttgtatcctgggcattttgaacattatgttgcttcaatattggatatattacaactctgtgaagaatattaatatttacttttttgttttatgaagaattagcctcatttctttcagactatgggttctgtcttgcctttcgtgggttccaatcttggtccagttttcaaagcctttgacatcctcctcttgatctgtctgtgcctgtacactcaagagttagtatgaaacctggatggtggtttacgatcctcattccgttctcagagcccttgctaatctgctttggatatgtcccgcacatccaaatgcacagctcagagatgagctgggaacttgtgtagtttcatatacagaattagagtatccccttctccagctctctcactctgggattccctccacaccttccagtccttaagggctgtttttcacagctcttcagcccagaaatttgaaatagaaatagaaagtggagtttgagatttccatggtactgctgtatcagacgactctgtgattggggcctgcatttggggaaaagccacattaaaaaagaacaataaacccagaaattcacctcttggtgggtagcttctccataagccactggcttttgttttacttttccccatcctcagtatccttgtattttgtgcagtgtttagttgtaatcagtggaagagataggaggtagtgggcttaccctctcatgcaagaggcaggctcacattcaattaaactgcattcagctgagcccctcttttattaaagtcttgttcttactaagttgttttatagcataaagctatttggatttttttttctgctgttcctttagttgttgggtcctttttgtgtcttttgcatgatgtgcttctgtcctccttttcctggttttgttgttagtctgaattttttgctgtgctgtttgttttctctctgatcatgtttgagtaactctgaaatatacagtgtgaatggcttcttaattatcttcccacctctcataatatgagcttcttttaccctcaaagttgcagtttgagaagtaagtatttcatgttttgtccatgttctgtagcttcagaaaatggggtagggaggagaatagttcaactgagaagggatgtgatctttattggaatagccagacttaattctctcatctgacattctgttaaaccttcattagggtttacttttgggctttggatgatttctctaattcactgggtcatcatggaattttcatgcccattagagggtgtacccagttgttagttttctgtgtttcatttgcttttcccagtggttacttaatccattactcagtcagaagaaggagaagagaagaatgcctagataaagtttgcttctttctagatttggatgcattaatgagaatttttcggattttgcagattccctgtataatttctggcactgtctgggatgagctgtactatacctccagttaaccctagagtcttctggctccttcattgaattccagtttctaaatctgtgctcatgtgtttacccaactcaaagtagatagcttttctcaaatcaggaaaatgtatccctgaaaagtgaagtgttcctcggcaggtttggtcattactgaatcttccgtaagaaattctttaaaaatataatgagataatgactgtgaaagtgctttataaactataaagtgctcaacgcatgtaaarctgtgatattatcatcactcatgtcccctatgctgctaatcgtcagtggatcagccagggaggcaggcgttcctcgcttctgctttgttatactgtcttatcccgaccttgacactctggcagcagtgaccctcaacaagataacctgacagtcagcggtgtctcacccacactattacctgcctttgttagtagcactcagacagcatataggtaattccccatgtttcttgttcattgtctctgtaataaaacattttcttttatagaaatcctgactctaatttcacaaaagctctgctatggaacctcctctggcctctcccttcctcctgaaatacagtagtgtgtgtttcatatttgaactcacaagctaattgaactttattgaaagattcttttactttgcccaacatctttaaatagtgatttggtgctatgattagatacactctcaaaaactattgttgctgggtagagagaagcttcaaggaagaatgaaataaacaagcatgatggagttggatgggttagaacaagtttgtttttcttatgtggatatgcttttcatatccacatttattttgtttccttgtctgaactgcaaggtccttggggataggaataatgactgactcagactgttctggaaaaatggagtatgatggaggacatgagcaatacctataatattataaatgagagaaataaaatgataaggaattgctgaccaaatacagtaacactaaattgcagtgattaagagcatgaacttagagtttgaccaattatagctgtatgaccttggacaagttacttaacctttctaggtcacatctgtgatttggagataataagaatatttgcctcctaaggctgttgataacgaatgtaaagtgtttatagcagtgcctggaacataatacaggcaaaaatgttatctgttatcatcatcatcatcattattcttttatraattcttccttgaagcttcacaaggcaagtacaggacaaatgaaaagaaataaagtttacacagcatgggataagaatatgagatttactatgccaaaagtggtatagacgggctaaggattaaaaactaataacaaatgcttctttttttttttttttttttttttgagatggagtttcgctcttgttgcccaggctggagtgcaatggcacgatcttggctcactgcaaccgctgcctcccgggttcaagcgattctcctgcctcagcctcctgagtagctgggattacaggtgcccaccaccatacccagctaattttttgtatttttagtagagacagggtttcaccatgttggccagtctggtcttgaactcctgatctcagaataaatgcttcttataggcattgttttaaaatgttacatgtgttgtctaatgtaatactcatgacactatgaggtagtcccattttatagacaaggagactgaggcactgagaagtgaagtaaccagcctaaattcccataactcataaagggttgagctaagatttgaatccaatcaacctctgcatttaatgcctatttgtgagtgagtgtgtgtggcagaaaggatccagagtagatgactggtgaaattagatgtttaggcaatgtcttcacatttaagatcattgtcaaggagaaaattttgaaatgtattttgtcatcagaaataatccagggacacgtagagccaaggcctgagccagagaagaggtatttatactttgattcaaggaacatgaaattaaccaggaaaaactgaaaagcaatttaatccttagactttataggagtaaccttgttgggtttggtggatgtgatggaaagaatgaagggcaggtattgagcacagctaggtatgattctctttttgccatcttccattttagtgaccttgagcaagctggttcagcttggggtaggggattttgtatccacagtagcagagtgaagaattatatggaatcacttttttgcacccttcagattctaaaacacaaaagtttttgcattgtctaccctgatactgaaaattattgatacccttgatttaacatttatattctatcttattttgtattttgcacattgatcattcatttattcagcccctgtttgtttggggtatgctttgagctcactgtgtgacttttttccttaattaaaattagtctgggagagaatgtatttgcctcctggaattctcagaattctagcaaggtgccctaaacatcataagcacacatcagcactgttcatattgattatcatggtacagtagtgtatcaaatgccacctgaagttgagtgctgcaaatatgagaaaacctccgtaaaatcagccctcaataacttttctagggaatgtgccttaaaaaaaaaggtactggactgtgtgctgagaaaactgtaaatatgagtaaaatgatccctgccttcaggaagtttaccaacaagggcacaagcaaccattgtagaattgcttgtggccttattgatatacaggctaaggattaaaaaattataatcccagggatgaaaagctttagcagttatttagtccaactctccacacacattgagtccccgttacaacagcccaccaaatggttgtctggcatcttcttgaacacttcagtggctgtgaactcaaactgctcattctgctcgtggtagaatgacaggctctcaatttttgtgtagaaggaagtgtcttgctgaagagcaaaggtcttttctaggctgaggaaaagccaaggaggtcatcttggagataaaaatctggaaagtggaagtatatgggaacagacctcaaaggtcctttgttggagcaaagttacagaagtacaaaagccaaggcacgtggtaggaacattaagtagtctagcttggtcatttggcagtgacaggttgagaatagggaacagtgaaattgttaaagatagactgggactataatttggaggaccttgagtgccctctacttctggggtacataayggccctattgaaaaccctaattctatatccaataggtggctcattgagtaaatcactgttagcagtcagatctgatgtgttccccaaatccacatcctttatactcacctggacaactaccattcccccaacccccccatcatccatgaattttcttcagttcaaagagacatggttaaagcaggaattatgaaaagggccctctgccggccttatttccatgtagatctattttatatgcataataaccctaaggggaagctgtgtcaatctgccttacctgacagacccctaaatcctcccaatgctgcctccactattggacatgtgccaagtggcttgcaacctcaaagagagaaagcatcctgattttttgtgtgtaggaaggtggggggcagtgataaacaggtcttggcctgttattgtcttccygcatgataatgaacccatcactagcacaggaatttaatgcaatgatttttccaagaaccatccagccccattgtagccctgcctgaaaatgtaaatacaccctttctggggacagatttgcattttttggtgaaagaaatgcatatatatggcaaagatgcctctgtaattatagaaagtttatttctgtccccagatgtcagcaatcaaattccacataaatatattttgtgtaaatctgtcggcagctggtctccattcaggtttctggagatattagcctgtctttgagtttatgacaaagttaaaaattattcattaaactgacctgcagtatattcagtaactggaaaattgccttgcagttctatttggtttgtagatgtgatcacaagtaaatttttaacttaattaattggccgtttctgttgacaagaaatttatgtggtaataatttgctcgaaatagatgccgactgtaggaaatgagatatccatcataggcttgtgttccaccagctgcacagtggctattatgaaagtatttcagcctgcgtcgaccccagtgtttgtgcagtcaagattatatatacccacgatccatagcctgccagagaggcgctggtggaggtctatgataacaaagactttgtgatttatggcttgctgtgaaagcagagcttgatgagattaaacaatttcatagcacaagtgtttctcaagacctgatttgtagttgcaagctgatggtaaatcacatttatatatctgcaagcgtgctcagcagaggactgcaattacagtttaagacagctactttttatttaatttttatcctggttttgtctcttttatatccccttcgtctgcaaaccattcaccttcacaagtcctttcctggttagaaggccaaagattgaagtcaatgatgttcttcgtgtctttgtgccagcttcagagggaggtccggcagatttcagagccgtgcagactggttcaaactggctctgactggtgtgagctctttgttcaatttcatgtccaaacagaagtctgtttgctattttcccttggtgtgttgctgatacttaaacttcttggtatacagagggagaaagaggggtcttcatcatcctgggatatagggaactgtggagcacataatggaaaagggagatgaggactaaattcactttagaacctcaacttcaaggttgcagcatatcttagggtgtacagttagctcccctttaatgggaaatgtgaaattgtgtttccccacagatctgggaggaataaactctgcaatgagtttatttaaccagtttattgattatctactgtggccacatgtcttcactgagtactagtacagcagtatttgccctcaggcagtttgtaatctacatatggtgctaaaacataaaaataagattggaagcagcaagatcagtgatagccttacacgagtggtgcacctgttgttggaggtcagaaggaaagggagatagagttcttcccactgggraagcatgaaggagcatgaatgagacaagtgcttgagggacagatcggatttcaagtaaggggaagaggaagttctggaaatttcagtgatctgtactgaaggaggcctctaaaatactcaggtgtgagttcaagtccaggctgggtggccagtgattgaataattataataataacataataataacatcgattgaatgcttactatatacaacaaagagtgctatataggtattatctcattaatcctcataacaaccccagaaagggagtattattgtgatctccatttggggaacaggaaattgaggttcagagaggttaagtaatttgatcatgttcatccaggtgtttggttgagctggttcaaccaataccctggtgtatttcaccccacagcctgtgttctttgccactgtgtttcactgcttttctttttctttttaaatggagaggaggtctcactctattgcccaggctgatcttgaactccttggttcaagtgatctgccagcctcagcctcccaaacagttgggactacaggcatgcaccaccaccacacctttcttgttttactgctgttagacagagaatatgaatgtaattagggaggcaattccactgttctgcatcctggtcacatcttcaagagctcaggtcatttctttttccacgaaagtacctaaagtttgggatgttatttttggtctttgtgataggctgaataacaatcatccgaatatgtccatgtcctaattcttagaaactgggattaccttatatggcaaaagggactttgcaggtgtgattaaaaaatcataaattgtggaggttattctgcattatccaggtgggcctgaggtaagcacaacggttccgaagaggactcagggaagtcagagtcaggggagaaggagatgtgatgaagcaagcagagattggagcaatgtgcttttgaaaatggagccaggggtgcaagacagggaacacaggcagccactaggagctgggaaaggcaaggaaacgtgttctcccctcacctcaattttgcctctatagggcctttttcagacatctgacctccagaactctaagacaatgaacttgtgttgtttgaagctgctaagttcatgtgaacttgttacagcagcactgggaaactgattctgtcttgcaaattccaaccagcttgacagagagtttaaccctgattttgaaatcttgggttttttttgtattayttgtttaagatagggactgatatggtttgactgtgtcccaccmaaatctcatcttgaattgtggctcccataatccccaggtgttgtggtagggacccagcgggaggtaattgaatcttgagggtggatttttcccatattgttctcatgatagtgaataactctcatgagatctgctggttttataaagggcagttcccctgcacatgctttcttgcctgccaccatgtaagacatgcctttgctcctccttcaccttccaccatgattgtgaggcctccccatccatgtggaaatgtgagtccatcaaacctctttttctttataaattacccagtctcaagtatgtctttgttagcagtatgagaatagataatacagggatgctttttgatttccatgtttccccattctcccctcttttgtagccataagggaagtgatcatgtctgtttcattcactcatgaatctctgatgcctagtatggtatatggtatgcagtaggcactcattaaatatttgttaaatgagtcaaggagattacttcatcctatttccaggatatagttggccaatctgtctggaattcagttttttccacaactcaaccagcaaatgtcatagcttgctctttatgaagtcacaaagggagtagtcaggcactctacttacagttgtctgcaaacttggatatctcagtggagggagggggcagtaaggccttaggaaagccgaggctggctgaagaatctctaataagtcaatgtgagtggctaattgtgctaaatattaaaaaaaaaaatagatgtaaccctttatcctgatagcaggaaggtaggagggtttaataaaaagcatattgtctctgagaccctcacatgttttcatgcccgcattggctttttgtcttttatgtgataggtaggtagggagtgttttctacctatgtattattccaggttttatgmccctgagggtcttttagctggagacttataggcatagtccactccactgagtacagatgttaaagttgccaatgaagctctttatgagggatggagacaggccagtatctttggcctggattctagagacctggtttgaaaatcctgggaaagctgagagcttcgtttctccctctagagtactagtgtattagcctcccaataaaagttaattgaatttaattttatgttttaagtgtgatgcattttaaagttctccccagtgctagagtccctcttgaaaaggcagtaaattcatattattaaactaccaaatgtaattcagctcaaataagcatattcggcaatctttattctggatatgtgggactgaccttgcgttgaggctaaatcatttcatcccagrcaaagtctgtttggagttaattggggaagcagtgtgggtgtacrgcaggtcactctgggctttttattctctttctggccctcattcaaagagtcgctgtagcatacattttctgatgccagttcttccattattttataaatatcaatatttgacacagtatggaaggtgaaaaagacaatgaagatcttcccgctggagattcttcattagatgccctactttaccatattttaaaatgggcagtttgtcaccgatgcattaaagggctgtrmggagtggagaaagcacattgggctggaaatcagatgacctggattctaacccctgcctgtccattaaccaacccggtgacccygggcttttctagtcttggggccttcattgttccacatttttaaagtgagagggttgtgaaagaacagtggttttcaaactgcatttcaagaggtacgaatattttgtcactgtatcttagcagctctgctgagtgaccagagaggggatggggtgagcagcagttaaggatgagaccagctgatgggcttcaggctctcagactcccacccctttgtgcagagtagctcacttcaatagcaaaaatcaacccaccatggcctaggaaagcttcaaagattctgccaaacactttaggtgtytaagatatttggggcaatttctccctaaagtttgtcaaggcagatgttggatcaagcacaatgaattgagtcatccattcttttgggagtagaaataacttaaaggatttgtttattcagatttgctgatttgtccagagttttaatgtttttccaaatttgtttctccaaatcctagctttgccagcccataatgtcatagcagctctgmgcatcttgacatgggggatctatagtggtaaaagcaggctggcatcctcttctcaaatgtctagcactctctttactattattttatgtacctcaaactttattattatgtcctctmttattaatggcagagacaatgatataattatttatgctggaactcatgcttttgaatttattggatagagatcttctgaaactagaagatataacatatactaaatgtcccctcttatccctaagggatttcttttrtctgaaacctcctgtttcacttatctctacattttggtggtgaatctggttgtggcttcttctttatttgccatctgcctgccccactctcagcatacaggtggctgtggactatctttattcatgtaatcttagttttgtttctatctaaacatcccatttgtcaagggccagaccagatttcatccttataggaattcctgcccagccactctagattccacaaagatcctgttctgaattccttcagaacctaattgggaccaaaaatgctcctaytgtataacacagtgtcttatactattcattattggtttatttttcttaatctaacttgrctctaakcaatttgaggacagagatcctgcaattctttggtatcttctgtagtggtagatatttaacataataacaaaagtatttattataataaaataatatttatgccagcctgctcctgttaggaaaggcaatgcattcttagtgagtggaaataaggtgtgttttgtttggtccactttttaacattgtattcataaacactctctggcaacaccatcattaattcatttccaagaggaaaaaaagttcttgctaaaaataaaattctgttccataaactctgtaaaaagaccagcaaacaaacaagtctcctctggaggaaccacagccacaccaggcccttcagatctaataagaaccttaattccatttgaatatctttgttgtgctgcactacgtggtttgggattcattttgcattagagaaatgacaaagacccagaaaacaagcactgagtcaggactggtttcaaagagctcagcttcttcgtttaatttccagttcatttatttgagtactgtcaaaaaccaaaatttcaacatatttaggttaacaatataatggccttttattagtgattcatgaactaggcagcatcttaatctaaaaatagaagtgctttgttggaaatggaaaaaagtcagtttttgaaaaataacagatgctgatgaggttgtggaggaaagggaatgcttatacactgcttgtaaattagttcagccattgttgaaagcagttcggcaatttctgaaaaaacttaaaacagaattaccatttgacccaacaatcccattattgggtatatacctaaaggaatataaatcattctactataaaagacacatgcaygtgtgtgttcatctcagcacatttcataatagcaaagatatggaatggaacctaaatgcccatcaacagtagactggataaagaaaatgtggcacatacccactatggaatactatgcagccacaggcatgggcaaagatttcatggtgaagacgccaaaagcaattgaaacaaaagcaaaaattgacaaatgggatataattaaactaaagagcttcttcacagcaaaagaaactatcatcagagtgactccattttggtttggtctgttctgttggggcctagtgcaggagctcagtctaaaagcatggcttcccataaattttatttaacagtagaattcttcagtactactayaattctttttaaatgctatgaccagatttgcacctccaaccccaaacccctcaatgttagttactacaatataaggagaaactgtggtttccgtaggagaaaggaagagattcttggaaaattgcttgggatgtacaaarccagagccaatcagtcaatcagaaaacatgatggagggccagccccttgcaaatcaaatgaagccttgctctctgcccatgatgataaagattatgttacaagaacagtttcctccaataaagtagtagttatggaaacaaacaaacataaaagatatttaatatgttcattccacaagggtttattcaataatttaatgaatgaataatttattaatggtttgcccaaaccaagggcaaggacatattacagtggaaggtggaggtgggatgttggatttgcataagattagagaacattgatggtatctttctctaggaaggacaaacttggcctgtgtggtgctgaagcagatatttccagagccttcctcaatgagggggaaattcggagaaaagaaacaaaaagtggacttggactttactgaattgtttcccattcccaagtttttaatatgtacagacagaaaaatagacagtctctttttgacaccctaagttgtacctgccaaatcakcagagtggcagaattggcctctgagaatgtgaggtcgccttcttttatgactatttccaatgttatttttttcaacatctcctccttagtgtttgtaatgcagagaacacttaaagtgctccacagacatggagcatttccattaccctatgcagtattacaggaagtagtttataaggagttcaatattaggaagagttatctaataaaaygcattgtctaatctccctattacaggcgatatttggatagattctggttaactatagtctggcattttcaggaatacatttatgtgtacggtgaggcattgggcttggtgtcttccaattccatacatgtagcaaaaacctggtggctgtttctcaaatgtgcctcataactgaccaggcaaaatggatcagtaattgtcctgatgaattgccctttaattaccctctttcaaaccaatccttttcgagcatctgatggtgccaggttattgacttcatgtctttaggtttggacactttttgggcaggattattccgaagaaccacgatcatctagaggaaaacagaggaagtttcactgttgattctgagagaagaattttgagggggagcatttacatcaggttctccaatgcctgcaaggcttctgcatttctagtcccaacaaattcttcaaaatttttaggacaagattaaattgtaaccactattaactgtgtgcctaggtccatattcatgcatacctatccctgcctactttggcagaatgagttaccagtgtatgtagcagaataaaacagacttttagggtatcctaaatactcccaaactttattgttacaatctctttaatgggccttatccttcaggtgagtcagctggtttaaagagttacgtaaggtacattagcccttaaacatatttcccaaaatgctcaaytctgaaaggaatttatttccttgttaagactgagttgaaaagcatgggtctgcagcaagactgaaktatttatattagtgatttcttatgacaatcttataagtaactgtacaatttaggtttattttctcttttttttttttttttttttttttgagacagagtctcactctgttgcccaggctggctggcgtgcagtggtgcgatttcagctcattgtaacctctgcctcctgggttcaggggattcttgtgcctcagcctccccagtagctgggattacaggcgtatgccaccacagctggctaattttatatttttagtagagacaggatttcaccatgttggccaggctggtctcraactcttaaccttaggtgatccaccagcctcagccttccaaagtgctgggattacaggcctgagccactgccctcagactctgtcctctattccaatggtggtggttagrtggacatttctagagaaacctgtcttacttcttataaggaggtgctataccttcaaggtggagacataccttgcttatttagtatataatgaagagatgagagrccagttgactctgagaagtagtatgggtatgtgtgatgtgaaaaagagtcatgaactactttgctagtttcagatgtaaattaatgttgacctctaattaaaatctttcaatttatatataatagctcaaagaagagcgagtaccatgacactttagatgatggtttcaaaatgacgggttttgggagcacttttctttggtacttcagcctgatcctccaaaaaggaaacaaggatttatttttgctcaaggagcggtcaatgagtgttactgcaaaatgaatctgaagtttttctctgtcttaggagggatgcaacattcacaatttctacttgtctgtctgctgtcttcaccctccctcctccctgtctttcactgttgggtctcaaaataaataacacagacacttcatctttaacttcagataatcagagtcacaatcatctgggatattgtgatgaacaatgtacatttcatacacatgatgtcataataatttaaaatgtcatctcaatctatttatgatcttctaatgactgaaatgttttacaattgtgggggatattttataactgaagttttaatggctgaatcactaacacctggctgtctggaatgcttttctttctcctagttaggcatttaaatgcatttctggaaggcccaaggggtgggatgtgacatataagctcttaaaaggaggaaaattagttcttgataccttaatgatcagtcaggtgaacgtttgcatacttagcattaatgctcttaagtggaatagcttgattaagacccttggtaggattttttttttctttaaacatccttctatgtgagattacagagggaaatgctgctattatgcccatcccttaaaaaagatcttagatttttcttaagtgttttattttctaactctattgttttcactactttttagttttctatctttggtttctaagacaatcaagttacctctttattgagaatttagtgtatattttcattttgctgggctaatatgtatatacagattatatatacacccacacgtgcacacacacacacacacgtgcacacacacacacacacacaaattcttgtccctggatgagcatacagttgcttaaagaagaccagacatatacacatgaaaatgtcagtgaaccatacaagtcaatgtataattaagcccatagcaggcccccggtggatgtttactaatgatgatagtggcactaaattatctggtgcaggccaagagaggtcagtacaaggttgcccagaggcctgcattaaacaatcactgagataaagatgcattttagttcctcctatctgtacaacatatattaatatatagccttccaatgcaacatcccacttaatttccatagtaatccactgaaggaattcgaggtgtatatccacagtttggcagaagggaaaataaaggcttagagccatcagatcacttgcacaaccaagctcacagagctgggtggtgacggagcagagcctggactccacatccttgggaccctagtctgcttttttaccccaccatgttgcttccagttcacagggtttctagcagagtctctttaggctaaattgttgccttgaatgggcaatttgcttgaaatgtagctggatgtgcagcatctttgctcatgttgtagccaggaatataatggcaaatctctgtatatttgtttccaatgaagattgactacactgatgaaataatgataggctttacttccatttttatcaactaatggtgtttctggtgacaagtccccatgatactactttatgactctttatgcacacgcttgtgtcgctcctgcattctagatagattgggctgatgttacacaggcctgctttgactgacaccagaaagccgtgtgacaattggcttgtagattggacagttaatatagagaagtgtcatactatcccaattgggcattaagatgccatagacatggctaaacagggtggctccatctgtgaacaaaaggccactctgaaatgtcagaaaccaaataactaggactgctgtgcttgcaaatttgcaaaatggggaaacagtgtgtgtatttaattatttatttatttatgatggattcttgctctgtcacccagtctgtaatgcagcagcacaatctcggctcggctcactgcaagctccacctcccgcctcccaggttcatgcaattctcttgcctcagcttcccaagtagctgggactayaggcatgtgccaccacacctggctaatttttgtgtttttagtaaagtcattgttttgccatgttggccaagctgtttttaaactcctggcctcaagtgatctgcccacctcggcctcccaaagtgctggaattacaggtctgacccaccatgcccagcmtagtctgtgtgccttaatcattgtatatctttaggcaaatatgttatctctttagccccatgtctgtaaaacgagagggtaatgtttgccttatgatgctcatgtgttgattagactacccaaaatggtaattttgttgaaacatttagaaaaatgtgaagaagagtgatacaaatgatgtctcatgtttgcattgatgtcatttcagatttttgcttctaagtatcttcctagtggcatcatacaggtgatttggcctaggttggtagccatagtttagcttttacaaaagactaagagttcccataaacatgtggtttggttctttaagttcaagccttagggagataactatgaggagttaggggtctttgtaattagtcaaattaatgagccaaaggccacatgtggcagagttatctatgatttctgtaaacattataaaattctcatgttaccttatctcttatatataggattccagctgggctatgaaaaatggctcaaaccaccatctattcctcccatttatctctgagaaataactcaagacccttaaatctgtttactctctggtttgttgtaacattgtaatatttagcttcatgtcactcagtcataattaaacagttcacattcatattctccattattggatttagtagccattctttagccacagtgtgcacttggaggttgttttggtgcttgtttttaataatgctttcttgaacttctacagtaaatacactttcccactccactggataggagaggagttgacaagctgggtgttctgataktggctgtgctgatgtttgctcataaattcatccagcaatctcttgcggaaaatacgttctaaacttggtattaagtttttgggcctatgaccagagtgaactcattttgtgtgtgtgtgtttgtgttaatccttccaagagcaataggttcacttggatagttcttagtttctctttttaaatttcttgattaagctgagagagttcacactggaaactctttgctttgctgattgctccagacctaatacaagtagatcttcaggggaaaagcaacatggctcatctaagtatttacctttatactggtgaagtcatctcttggtgtctatcttcatatttcccaaagaacgtataaaacacatcttatttcctttcctaagtctgaggccttatccatatattttaacttcagacttgaatttgtccttgtccctgacctagtaaacatttttatcaagaacatgtaaggagctggaaaaaggccttttttattaactttcaaagtataaagttggagaggtcagaacattccacaggttttagatcatggttccaagyggtcccagcaagctaaaacactgcctgacacctatcagacaaaatttaataggattgtaagttagaagtcctagctttatattttcaaaaatctattattgaagtatgtgcttgaaaggtctggcttggcagtgtttcaaatcaaaggcattgggatattttatttgactgaggtttgatatataccagcgtagactatagcttgggaaggtattgccaacttggatgtgatggaggctttgggtcacattgtcttcttgggattcatacagttcacccatcatctagaggactaggttcaggtcagaggttcatgttttaggaaaaccagaaaaactaatggggatcttcaggagaggcactaggctgttgagtgttacggaaatatttggcatagaatagaggagattaagatggtacatagaacattatctcaaatagttgaaacattattgtggggatgaggatgtagcatttgtaaaggagaaacctaggactatggtttaatggtataaggagggaagttttggcacaatgtaagaagaaagttttattaaaggatcttattaaacaaaatgatattcttccttacaaagatgtgggtgctgattgttctggaagagctaagagcagagctggaagaccatttttgtaaggcattgtagaagagatgtctacgtctgtgtgggaagctggacaggtcaaccttgcaggatgcaaggactcatttgaattcaaattcattgttatactgagaatttcaaagtttgcctatacattttcagtcatttccttgtttgtattcaggttattatatagcattctcagttagaaatatcacatggtcactaaacctggataccaggcacagtttgagtttctaaaagttgaatgagctttcatggacactgctgccgccacctctttgggtgtgccctctgctttgcttttgtggtagtgtcacggacatgcactggctgattctagctctcctctctggtaacccttataaccaataagtgctaaaaggactatagtatccctattgcctttcactgccctctaactcttgcttaagctatctctgccccacctcctctagccctcttcagttccactttcagattctcccttgacccttcattttctccttgcaatggaaatcctaccattttttccaaggctcagctcaattccatttccttccwaaagtcacctctttgctaatcttcactcatgctaatcttcactcatccctttctttgggactgatacatctttggaattatctagcatagtgcttaattgttttcacattttcmtgtctcttaattttatctcccaatctccatagtacgtaatttgggattagggactttgccttactgagtactgcatgaatacattttattgatttactgatttgattacaaatatgatcaccacacagaaccaactggctgaaaagaattgtgccctgactttggcytcatcagcacaaggtcaaaactaaccaatttatttaagtatctaaaggatagggcatcatgtgaattatattaactatcaaataagcctagtttgcttattatttagacattcttctaaaccctaataaccccttgtcatctctgttatgaggccaaggttgcacgtttagaataggtttctggaaggctaagctgcagagccataggcagatgtgctsccactcctgcaggcttattcacgaggtggagaaaaattctcttccaagtccctggcttcccattgcaaagtaaaatgatctctggtttagagctactcaaagggttaactttgactccttcaccaaacccaactatttaatgtttttaacggcataatgtgttaatagccatacagctgttgtttctcagcctcttcctttattgagttagacaccatttagtaggctgagttcaaattgtaaacaaattatttttgcatatggatcaatggaaatttaataaagtttattaaaacagtatattggaccaaggagtgctgttttctctcatggatataaaccaacctcattagaccaacccatagtaacagaattgcagggaagaaagtatttctggtcatttaaagattattttggttcaacagatggtgactagcatcagagtatagtttttcttgtttgttaattcatttgcatgaacatatttgatggatacctagtgatcccaacatgcttgattttagtgcctagtgtgctttctagcacatagcaggaagttgatagagttgtcacagaggggattgtgatctcaagtgcaaagaagtggcgtgagatgctgagagtcacacagctgttgatgggcagagccatggaagagcctggagctctgagctctcagtccagtgctcctatcactcacacaatggccctcccttgattcactgcctgtgaaatgtcttaaatgatccgcagataccttctgcctgttctcatggcaatcccagtttatgttgcaataaatgttatcttaatctcaattgattgaygagttcttaaaataacagcattaccaaagttcccactcacattgtaaatcgcaaatattccactctttggaaagcattcagggtggctaaccactatttcagatatggcttgggcagccccactcttgtaagaggtatctgaaggggcttttaccagaaggagctaaatggttatcagataacttagagtgggatacagggaatttgtagtaaaggcctagattccgcaacacaaatactgactgccctgtggatttgaagttaaagcagaagagaactaagatgggcctacttttttggccctgagtgacagcagttggcagaagcaaccctttggggtagtagaacaagcttggagttgttcattccagcttccttgtgtcagagtcactgttaagtaggaggtcgttctgttcgactctggttggaatcattctgtgtctgggggcctgtcgtttctgtcattcttcctggaaagtagaatcctaaatatgggcagctggtttggactgaaaccttggtgacttctgaaagttataacaaatggaagtcattatcaccattgcccccctttacctttgtgctacttgaggcagaaaatgatttccccctcccccggtttgttttggagtctttcatccagagagaaaaggattagcctatggctacaatagagctttcagggccttttggcgtgctgcaaatgtttacttatccaggtacaaataggtaaaagcacatagttaaagcttccagctgcaaggtcatttacctttttaaaatgcagccgcatgtgccgactgaagtcgagggcttgctggtatgagccattaactgcctgttgtacgtaacctctccttgtcttacacacagctgcgtgcgagctgctggtgccatgcagccagcccaccatgcatgccttgcgagcaacaaaagcagtttaacttgtgatcactgatcatatgatccacttacagggtgcaggctcagtcaagtagaactggtaaatcattaaaaatgcgccttgatgctatgcctgctgagtaaaacatcatgctaacatctctgcctcccacccccaaccagttagcagcatagggaaggagctggtaccagctgcatattggagaaatccagttggctgagctggacrtggtgagagattgtcagctgcttccaagcagcattggagaggaaggcaggaagacagaaataatctggagtggctgccatcctctctccttgtcctttacttactcattaactgagcctgtgcaaagggccttctgtgtcaggcctggtactagtgcctaaattacaaaggtaggagaggaaatgaactctgacttrgagactctcaaagtctgtcaagaactcagtcaccaccaagtactttcacataggcacccatgacgtgccgtgcaaccctaagaggcctggggtagccaaagagatgatgcttaagctgaaccttgaagagtgaatagaatttcatcaaggaagcatgtagttaaaggaacaacatgggctgtgccttaaaaagttactttctagaattctttcttccatgaagcataccattctactcagtttcttataggttttaacaaattgttttgtgactgtatgatggaaggtccaatggatcctctcttctctccatsatgtgggtctaattgtttctggcatcatgttactcagctatataaacccttctgggatgggactgtatctcttcagtattcttgattttccttacagctccaaaaacttggggagtgggtattgttggttggccaccttcttccattttcttgattagaaatattttctttgacttattttccttagaaaataagaaattattaaattagaaattagttgctttcacttttaactaaggcaatgagacagaacataccagatagatgttcctcctgcatatacgtcaggaacatctgctgttagagaagagccgtgtgtgtgtgtgtgtgtgtgtgtgtgtgtktgcatgcacgcacgcgcaatatgttttaagtatattgtgtgtgtccatatgttctgggatattgaggtttctcaggagtcctgcagtttgcatggctgatacaacctttaaaaatgacttggacttccagaggctctggagagtaggtttaataaaatgttcattcctttagatgtgagactatgccattttactttatctagatacaccactgtcttccagttaatcatagcccttaaataccttcttttgcttctcaaaaggttttacctggacccagaagttcatacagaagctaaactttgggaagaggtcagatgtggaatccgtgctcccttccctttttatacttgctctgctctgcttgtacaatgaatggtcagttagaatgcctttgaaccaccccccttcctttctttttttttttttttatgggactcattcctgcaaggacagttgtttcctgcagaataactttctcattcctctcaggactactgcctgggggccaaaacttgctaattagagggttggaggaatcttcgcaatctgctgtcttcattttcaacaccagtaagagctaacctttggctggttgtaggaatgaatgagttttgtcctctagaaagatgtccgtcttcattgtacaaagaaatggaggcctgagactcaagctttgtaggattaagattcagataaaatcggacaatttgctcagctttctgctttacatctttgtaaaggaaataatacttcctcatacctcccctaacttcaacccaatctctaaagaaatgagagaaactctaaatctgttctaaaactaggggtagtcatggcataataggtatgaaagatctgytcttatctcttccttgtataggggcagatatatagtggcagaattgagaataaaccaaacaattgagtgttttcagtagaaactgatatatgactaaccatgtacctatgaacatatttgattggtggtatttaaagagttgtaaatatttctcattaaaaatagactgtgagatctgtagtcatcaaaggtgggattgccacttgtggaggtagaactttgttttatttgaaatcaagaaaagttgtgcagctacatttggggacactctgggttgttggcacaaaatttaaactcaggctatcaggaaattcctcagtgggaaggcatttcacaaagtcgagatattatccattgatcatggtaggaaagcaggcaagaaagctgtgttctatcctgggcaagccatcaatgcctggggaaggcccwttatttcngtctctgtgttctcatctgtctaatagagaagttaatacctttccaacatacttcacatgtgaaaatcagacagtgtaacaggttctctgtctttctctcctggaacagatgaaatctcttccatcattcagacsctaggctgttttgtttggactctcttctatgggcatttgccccaatccctttttctatggtagttattgacttatctcatttcctcctacaacagtgtaagttaccttaatttgcaacagtttactcctctcaacatggtgcaaagagcacagcacttgcatcaggaagccctaggaatatagaatcagaatggaattctgtgatggaatccaggcacttggtttccccaagaataccattgtaggattgttctatctgccccaccatcttgtttttgggagttaaacaggagggcttatgggaacatgccaagtacatagtacatgcttagtaaccattaggctccttcccttagttctttgctcatagtggcaacttaatatatgcttttggaccaatcaaattttgacaatgaggaggaaatccatgctatttgttttttttccttctggttaagatgttcaggagagaaatagccctgccctcagttatattaaaaatttaaaaaattaccatttcaattgttgatacaaagtatttttgaggtctgcagaagacacaatgcaaattttattaagttaccattatccttgtcagtgaaattagagcatgtttctaatcagtatcttcagcaattacagacaacaaggaaataactcatgctgttatatgaaacagcttataaatttttacatacatgtgagaggaatcacttggaatccaaagctgccaagaggaataattaggaaccacagaacagatcttggtaatgtgacagcagcttctaaaacatcccacaggacgaagaagcgcaagctggcttgacctatatctttaataatacagatcattgcccttggattgaggctaaagggtaggaccaagtgcttgcttcatcacgttttaggaaaaattgccaaagtatatttatgaattcaccacacaatggcctcttgctttgattatgaactgacggatctctctaagtagcaactcagcatgcaaaatttaaaacaaaaaaacccaccacagagcataatttcttatattctgtcatgcttggcaaaaagtattatgtaagacccaagtagacaaatggctgttaacagtagaaataaccttttgtttaattagaaaataggagctatatgggayaataaaaatggttactgatgccctctgtcactgtttaataaatacgatcgcgctagagataatgggaagtgttatttatttgtgcaatatcacagacttggtaattgttcatgttgttgagcattttcctgtgtggagatcacagtagttttagaatttgtttcctttgatctaagaaaaggaaatagcaagttgtttgcttaaaatgttcatggcctccctaggctggagtaaagtatctgcatatttttagcccctcagttttgaggacagaatctctgtggcgttgtctgatgcatattgagaactggtgsgttattttgaactggctctattttttttttccagagcgccctcaggtgctcatggaacatasttctcagcaatgccatttcatgttcagttcagattttccagcacaactaaatttagtagccttgctggagggaggaagtggagcagagctacctacctgaggatgtgttcatgggaagagaaaaatctccctgttgctccatcttgagaaccagcatatgggatgaagatcagactgaatttccacagcatgtgtttcactatcttccctggggggtggtaaggagaaaaggctgaaggtgttggccatgtttcagggtcacttccattttgtgtttactgtgaacactttagttgtgagactgtgccatgtatttggggtcatctggctagatttatttcattgcacatggcagttcacgcttggtttcttttttttggggggtggtggtggggattctgttttcttttgtattgtgattgctggagtggatactcttgtttcttgccttttagagaaaatgtttgtggtttgtgatattggatgatttatttcttattatggcaacctaaggatttttcactgttgactttggtgattgtgagatatttcctcagaccctgaactaacacttgattcttctcatacagagaaatccacaaaaatgagatatggcacaaatttgtatagaagtgttttgtgtgaccacttatttctgcragtcctaagtagccctttctagaaggtttccatgtaatacctttataaaaatatagacagtttgttaaaaggaaaacacaacgcaacaaaaccccttttcttcacacaattcattttaagcttcaaaatccctgaaaatccccaatctccttttgcagtctggttcccactctaactttcctcatctccccctgaaagaaagaaaaaagcatttcttccagggactgataagttgtaggccgatgcttagcaacagcattcctgtgctttaagtagctgcaagccccttgctgaactctttgatgtgactgtcagggcagatttattttgttttagcacattgtctacttgtccagatgtatcaggagataaaaaggagtcatgtttacactcctcccttttttttttttttttttggagatgtaattaaatcgtgtttttgatgagtcttggggagctccagttgaagaaaacaggaattggctggagtaaagggaagaatgaaaacttgcttggcagaatgaacacctgactgcgtcaaaaaataaagcataagtaccagctggcgtggttctgtgaagctggaggttttgttctgagtcwtttgttccacttctgtggaagtccaaccaagaagaagggagaggtgcccgtccagcgctcacttgctgggcactatctgtgaaacctctagctctcagtgatctcttctttcttactgcacacaggcgcgcacatgaggccttaactcccttcttccwctatcatttagtgggtagtacatctgtgatagatagttgtcaatctaagctaataaaattgttgaactccagtgatcttgaataaacaaatcttcaccgagctggatgagttgaattccctgggaatgggattgccactctttttttttttttttggtgatcagttttttaatgtgcacatttagtaacaccattctgagttctattaatgacctgcagtgagcagtgacaagcaggaatatgacattcagtactgctgaggacctgccaggcagcggctaacacgctcgctttcatctgcagctcgggagacactctatttgcatcctaaataggttacactacagcacccccttctgccgactgagctgtgtgacaagaaggcctcactacaactcagttttctcccctgatgacagccctgaaggccctttcacggctttctctaaccttyctagccttcccctttggtccctggaggagcacaacagtgactaatggtgtgcgtacctgcactcctgggggcttcatttggattatacttttaattactcattcrtcagaggaaaggaacaaaaaccatccattgaaggagacagaaagatgggtataacaaaaagaaagctgagccaagcaggtgctaccttagatcactcctggctggggtccctcctgccagatcccaaatcccagacagacgccactgaatgcatcttagaaactacaggcttggttttgtgtttcccatttgtagcccagtctgaagtacaggaaggaggttttcctttgtttgttctaaacaccttttggatgactccatttggcagaagcgcaccttaaacttgtagtcctttcacatacgagaaatcaactgggctctgctagaaaggrgtgtccacatggggaattttggagggaggaactatgcatgccacctgtccaacactgagaagccctgtttgcaggggttggggtatggggtagagagctcccatcagaggacagtgcagaggctgacttagcctgggaagatgtggacttattgttatcctccacccttggaggccagggaatgctatttgttcaatattttaagttcatttaatttaccatttagtatttatcgagaagatactatgggccacccaggtggagtagggcgctgccctcaaggagcaaagtgtctagtagggggacaactcaggcaaagcatgttgggagggagttaggaaggaagactaggctttgcaaagatctccagcaggatggggcacagtgccctgcgggagcaggagaacaccacrtgatgactctcagggtgaggagtgaaggcaaaagagaggctgagaaggcaggggctggggcagagggccttctaggaaatggatggtgctctttgcttaccccaagagcaaggtgaatcactacgtttttaagcagagrggccccagtttccttgtgaatcttcgtggagtcctttgagctctgtaaccatctgggttacaggtcttctttgtgtgtctcactaccatgccttacccttctgtaatctgtctgtgcaagtgcacttgcaggataaacccaggagctggagaaagcagaggagtttctgtggccgtgtttacctttcaaaacctaggaatcctggatatggaataagagaaaagagggcttgtagcatgtgtgggccctttctatcttataattggtacaaaagacagtagatggtagaacggagtcaggaaaaatgttggaaaatgttttaatggatgaaaactcatttggaaagtaacctcaaaacatcttttttctttttcttttctccctcccttcctctttctttctttcatggtcaggacattggactgtcctgagcaaaacatatacctagaatgggatctcccacccagggtaggttcatgcatactttgtcagtgactgagtccctctagaccacaatgtgtttgagagttgaagactaagatgggcacagggtagtgtttctttagaaaataaacttaaattttgcatttcctttggcttcagggagaataaggctgctagaatggttagaaatattgcacaggacatcagacttactgattatgatacttgattagtcatttttcttgtagtaatcatatatttgggtctggaatctctcaaggaaatagcttcacacatatgtatacgtttagatgaatgaaacttttgatgttaacagttattgatagtataaagcaaataaaaaaggcctctttcaagaacggctctgtgaataatttacagawaattttgaaaaaagaaaataaaggagaaaagatttttgggggttatttctcaaatgactttccatctattaarctattttccaccatttcccttggctccaatctactatattaactatattttataataaacacattagtattgtgaaaattaatatttaataatgtagagtccttatctagaaaagttaagttcttatctagaaaggtacacaggctgaggattagtattaactttacaaagaaagattgggtttggaactcagagtttttttatatccttatcctctcctctgcaatcaacacatacacacatacttttgcatactgcagcccttttggaattccaaatgttagcatccaagcttcatggttcttcttcagattttagctatcctgatatagacactgagagcatgtgggctctagcccagaagagttttagcagcctagcagagcatttgtacatatccccctttggttgctatagtgggtgctgttgaattgctaagcagagaatcctgcctactttctttgggtctcttgggggaaatgaaactcaagtgtagcagctagtcctaagtctgtaggtcttcagttccacatcctaagtcacacatgacanggggcatggatcttcaggggcttacctaagctgtccaggacacattgtcctcatcctcaacacaatgaacctggagkcttggatatattcaaggcaaacatccttggcatctcttttagaaataggcctgaaagataaagagggccgagtgatagagtaatggggaaatgcttttggaaaatgagagatgcacattagaattaattttcccatacctttgaggtttgcatatgtcaaaattaaaactttttagactgttgttcccagaggacttcctcgtgctactcttttgtactggtcacatattctcttgtggtattatctgtttaatgtgtggacaaaatgtgtatgatgtctcattcccagaattgataccagtagttgcttgacacatgctaattagtaattaaatatactgtattactcctcacttaaacagaacataccacactgagtttaactttatcctgttgacatatatatgtgtggaggagtggaggaagcctggggtgtcatcatttcagaggtctgttgcagcatcttgtggttcagctcttagtctagctttttgtggttgtttctttttccatgtcatactgtgaccccagcagctacccttgccyacccctcatgttgctctatttagatgcctgtggctgtttttaatcttctgtgggataccaaagcttagaagaataaaattgtatgataaacctgcctgatgtcaactaagatcctgaaaggtataaactttatgatatctgcaagacctcgtggggagggttttctggaggtggaggccttttgttgatgttgatgtcaggattgagccactgcataatgagttcagtttggcctaaagataatgatgagatgttttgaatgtctgggatgcagtgaggggctcctgaagacttacacaggaggtcgtctgctttcgaaggggaatttgcccttttggcctctttggtgtccactacactgtattctgggatagacctaactctgtggaaccaccatgtgaccacccttaatcaatagtggtctgatggggccagctgctctctcagcactaggagtggcacaggagccaggctcaatcaggtagagggttctttctcatgggtgaggagattctttccaggataggcacataacccaaagcaggccacggattcccagattttgttggaacttacaggaaagagaaactctttcttttgtctttgaagatggtgaggtacagatgtggggggctcctgggaggccaccacgtggagaaaccaagaaacaaagctgagatagaaatttctgatgagaagtttgaacacctggatctaaccrtatatgaaaccatataccttgagctcattaaagccccctgctcctctttttaaacttmaagcactttgaggtggatttcatgacttaccatcaaaaggataatcttattttcctgaactgttcaacaagggagattctacaacttaccctggaaatgtagcaagtggtccccatagagtcattttggtcaagaattcttaattgtgtgtgacttaaatttcattttctgacagtctctctgtaatgtaaataacaaaccaaccctacttgccctctccccaaatcaaaaaatcctcaaacccaggaacaaaattttgattagtctactcyttccaaagacaccttcatctacttgaacatcaattttcaatggtcccttcaaccttctctttaaatactgtctttattatgcaactttgaaatgatctacctgtagatatgtatggcaagtgtcaacactagtgagccatgagaatttgtcatagcagcgatctcacaagcatatcttgaaggttttcctgtggtttcatcctggcatctggtcctgaaagacgaagatggatagggagccacatggtggctgttcactggccccaggaaaggccrtgcttgtttcccctcccragactacttccatrgaccgagacaggtaactgcagttacccagtgactggaggagatggagaagattccagtagaaccagccaatctaaacccaggtccttctctgtgaagtcacctttgctacacatcagagaccatggggctgctgctttctcaccaatctctctcctgctctcacctctctcctcccagcctggggatggagaagccatagcaagcacccatatggctcacattttcttctcctcaaaacctctccccatagttctgtctgaatctgaaagtgacggctccaattaagacacaggaagaaaagaaatataatttctaagtcacttggcctggtgacatatatgttgggagttaggaaagtcagtgtgcggcttctctaccatcccaggcgctgcagtcaaacaaatcaattcagccttcagaggggcatccattgccttgtgattatgtttgtgtaaagtcttggggtctttgatcaaagaatggcatttcaggccagkycctaatcctcactgccttaagatgtttaaatgggttaaaaaaaaaaaagttgataacagctgggatttaaatttgcctttgcccagcttttgttttgaaaggacttctattatccgtggcttcccttttcgaggcaaagatggatcattgggtaaaccaaaaagggaaagaggatatgggaggaaatgggcggggactctgaattaatcttctgaggaagaatgtttgatcagcggggaggaggggatgaaaacctctgatgctgacagcaggcacctttctgatgagggtgtgattggcacctttgaagcttcagtcaggagccagtgtccagtgggtcagagcttcctctgtctgtgggtggtggaggtaataatgaggcaactggaaggattaattgcggacaagcagcaggattacgaggagggcttctcagctccaaaaggaacagttcgaggaaagcctctgatctgtcagccttagaggaaattagtgggagcagactcgagcaggcttaaaaaaaggcatttaggatattaaagcgaaatgtgaagaggatattaaaatagggcaaaagggcaaggagcgctgatcttgaaaggcgggtgtctccctcttattactaggaatttccaagttttgcccagatttcacagacaccttatttttacagtccagcagagagattttacttgcattgcaacaagttaggggagggtcagactggatttgaggtggcacccaaggtcctgtacaaaacttgtttgctgtccaccctctggcagtttcagaagctcctgaaactaaggctcctggtataattttacaacaagccagcgcattactgacatcctatctgcattagctatctgttgtatgttttacttcttacccttctggttcaagtctggatgctgccaataaatcctgtgttaccattaaagaggccattcatcacgcttcctaatgcgattaatcaagatacaccacagtacccttaaaatgagatcattttgataaatcatgtatgacatgaaaagactttattccttttaagtgcaatttagactgtaatttttttcctcatttatgattcatgggagaaacatggataaaattcccttgcacagttacaccttatctacagcaataactcaaaactgcttttagatgaaaattcagggtcttattcaccaaagctgaatgccagctcattattttctggcgttcagtagtccaaaaataatgtccgcacattaagcggcattctcaaaaaagttggaattggccaggcwccaggcacatcaattacactccatcatccttaataaggaagaaatatcagatgtcctcttggaggttttttgaatcagtaatgctcagcctttaccttcccaatttagaatgattgggaaacaaaaatggtagtaacaaaaaaagtatgggaatttcagggcctttacatgactcttctcctgttgcataagtctcaaaagargtatttttttccctcccatgcggttcatgcttccttttccattccccttttctcatttcacaaaggaaactaccattttgttaggtctgagttttgtttctaagctgctgtatctgtgatgcaggctttcccctcacagctgtcacaataatttgggaaacgatattcataacctccaatagaaaaataatttgaaaatgtgccttctggtgagatccatcaagtttaaggccatatttttggttaaaagggagacactgatgctattcattaaactgaaaaatggcttgttttccactaatattgaaataaactctggatgaatgttaagtcatgctggcatgcactcttattgaaagcaaaaggaaaacacagatatatttaatttggacatgtaaagtcaacagagttttaggtctttcatgagaaagggaatcaggaagattggctgaaacaaatgtgaacaattagaagttcatttgcctcttgcaaagagtgagagcatttaaagagrgattcagtgtctgagaaytatagactcacttgcatttttttttcaacccctggtacctatgaataaagaaataaagacttgatcaacatgtaatttatttccctgctgttcttagagattcatttgggaagcagaacaaaagccagtatttgactctgtttttaagtaacccaagaatgcacacgtatcctattcatgcccacttaacataaatgcagcaaaactcaagtttatttgggttatcacatttatgctaatgctctgtactttaatcggatagaaactgacataaaacaaaagttccttgcatattattcacacatttaaatgaaatttcctgtgcttttaatttttttctaatatgaagagtcaattaagaatctaaggccattaaggctgcacttgccttgtttaggtttccatttcacatttatgactttctatttttgtgaaaaaagatctgtaaatttgaaaaatatgcacgtatctcattaaaaaagtttcccagctctagcaacactcagcaaatctccaaagaatgcaagtttaaaacataaatattttaaggccccataaaattggcagtaaatatttttccccctttaataccatgttcatttcattccaatttactaccacgattatattttccaaagcggcttttaatacaatacacaattatttcatatggggttgggtaggtcgcctcattaagcctgcaaagatcaggcctcttgtgatccccacaaatatacttgcatttactcctaattaaaatggccctcttaaattgtctcaagttyattaatataaataagaagctaagcaaaatagccacagttgaacagttagcagggcaagatgaccaggtccccaaacctcacacagagcagactgtggtatgtatgcagtggtgccctgccacctgttggctctgcttacacataacagggtattgatgtccctcatggtggtgcagtaaccctctctgacccctatccctagttcatcatccccaagagaaaagaagaggcctttgagaatcccaggcctcctgatttcccccatcattcatttccttggctacatgtttctcctgctaatgctaaaaatttatggctgagcacattaagggcagtgcgagtccttccctacttctggattatatcagagtttcctgtcataaggaaatccaagatgtgtcctcagctgattgcatgtgacagtgtctgcttatatctcaggaatctgaggcatgatggataaactgtcagttttgaaggatgatattttctccatatttccattatgaactgggctgtcatctcctaataaatttcttgcattggtatcaatttatttttacaagcagagggtctgatgtatttgggaaaggcactgacagcagatctggcctagcctgacagagctggcttcaactcattttggaaaagtactttggttccaaggacagaacttgacccgtagccctcaagattaaaaaaaacctccgtgagaggaaaagagacacatgaggcaagttccttcttttaagccaaaataaatcaagcccttaggactaccatgacataatatcatttttaagacagtcctacaaacccagttgagatatgccaygtgtagccttctcgtctgagttagatgagaccatctaaatgttgttagagcatcacaataatgcagtgaattgatggatgaattcggattataatgaagctagggatctcacaatttttgytcccagaagggatctcagtagtgctcttctgcttgacaagtgagaagcaaaattaattcatataatgcctatttaattatgaaatatgggcatgtctctgtcatggctactgtgaagggcagaaaaagctatacaacatgagctttacctctcaagaaacttaaagtccagttgaagagataagatattaaacaaaattagagtgaagtaagaataaatcatagctaacatccatgagcagtggctaagatggttgtttcttacccttatttaacatttacctttattgggaagggaggcagcataacattgtaattgccaagacagcagcaactggaggcaaactgcctggatttgtgtcccagctctgccaaggagtagttacccaagaacttaagtgagagctttgtcaggggacttaatttctctggtcctcggcttcctcatctgtaaaacagaactaggagttgtgactcctcgtgaaactttgtgaagattgaataaatcaatacatggaaagtgtttaacgcagttctcgacacaaagtaagtactaattaaaaatgctaataaacgttagcatttttaaactatcattatcatgattgtgactattattaccattatcactgttagtcaaaatgtggcttaaagagtttaagtcaattgcccaagatggagcctggctctaaatcttgatcaataaggcatcagagcacagaaaacagagagttaaacaatatacaaattgtgaattagtcaagaacagaatccttgaagcttagttatttttcttactgttctttccattcctagactataaaatagccctttctccattgcctgaaacatactttagaagctagttgaaaagtgttatatgtagtggtgtgtaggtaaatgcttaacagccaagtctctgggaaaaaaagtgtgtgtgtatacacatgcatatataatatattgcattttttagttatataaatgatgtgtagaacacaattaaaagtaaataacaattgaatatataatactgtttctaaaaaattccatacaatcacttaattgtcacagatactttcaatgattttggccaaactcttgtatctcgtatctgtggttgcaactgatgaacaactgtagttcccacttgatattcctttatcttaatgagtatgtcagaactttactcatttgttaatgacataagaaactactttgctgaactggataatagtttttgaatattggaagaatattttttcaatttttttgtgctattcacaatgccttgcaatacccaacaaagcaacttctcaaagaattaagaaaagattattaaatgagaaggaatatactaataccacaggtaatttttataaaggcagaacatcctatctataaataagcaattatatttagccaaagaggtatggagcacaagttaatattttgctaccattaggctacgacacaacatcctttttttgttgttgtttttaagaaatggaattttgccatgttgctcatggttggtctccaactcctgggctcaagtgatctgcctaccttggcctcccaaagtactaggattacaggtgtgagccatcgtgcccagtcacacaacattcttttaggttctatctgcaacattaacattttctccatcactttaagtttagcaaataagcacaccaatgaatcaagctctcacttgcagcatttgccagtttctgctgcaaatactcccacagtggccaatgtcaaactacaaagtgccatcactgaagagttggaaagtgactgcacatcattatatagtatttttatcatacaaattcagtagactcaatttcaagagcataaataacagtaaaattttgtaaaataattaagaagtgaggagtcttgttaaataaggtaatttattcaagtttaagtgtatataattttaaataatacctgtgtttaacaactgaccaaagttgctgaaaccttaataattacttcttgtaagccagtacaggttaacacttacacaccactggttatttgaacccaaaaggccaaagagatctgaaacactaatttgtctacatcgcacagctaattctttcatgtattattaaataagttgatagttttatttacttagcacgccacaaaacgtgttgcatattaccatgagttgattcatatctcactaccaatatattacctacctttgtatgtgcactaaataagcctaggagggttttctttgccaggcacctttgaacatcaagttcattgtacagtgcttaggattcaggctatggaatcgagctgtgttatttctcaattccggtctccacatactagctgggttttcttggactagtactataacctctctctaaatctcaactgccttacctataaagtggtaatgttaatggtacttgtgatggcagcggcggcctgtctggagcagccgcttcgaagattagcttcagtggggcaggaagggctggtgggagccaggaacagacaagagccccaccccctamccagttgaaggggcgggagcccgcactccttggtgcagctgcagcttcccagccgcactctggaccctggcatccctgtgctctcaggggcctgggaagcccctgccccagcgggcttggaagtgcctgctcctgctcccgggcctctccctgctcccggtgcccactccagtgcagagcaaagttgtggccaagcccgagggctgtcgtgactcagctgcgtttgcgtgcactcagggcagcactcacacgctagcgccccctgctgccttggccccctccagactttgggcgtcagtgagcrcaggaagcagcagcccagggggtgctgagggcagctccctgcgggcctgtagacacccctcaacrtgaacagcctgggcaacgtggaaggcagacaggtccctgggcggaagggggtgggtgcccagtgaaaccccaccttcaagccagggatggcttgaagcctgggggccgggctgccrgtgccgggtggagtccccctcctggagtgagaatttatgatgctttttccggctggcccatggcagcccatggaccaatcagcactcacttcctccctttgagcccatagacaccctccccactccaatgacctgcctgcagaaaggagctacatacacactgtgggtcttctgagagctattctgttgctcagtgaagctcctccctgccttgctcaccttccagttgtccacgtacctcattcttcctggatgcaggacaggaactcaagatccgccaatggccagactaaaagagatttaacacaaacagggctgaaacacgcctctccgcctaacacgttgcaggtaatgagaaggagaagagctgyggcccttcagggagcccagacctaggggctctccaagtcagggctgtgacgccctctttagggctctgtggttcctggcgtctcccagcttccaggcaccacagcattccctggtgcccatggtggaagctacttgcaggacgcctggtccakatgcagcctctcttggagccagcgcctatactggcacttggagctgcctgccccaccgcagccagcacacctggccgtgcgctgtggccgaaccccgtgctcactcacacaccccttgccactccatgcctggctcacccttgacagatgtgggatctgggccggtagtgccagctgagcgcagcctgctgggccaagtgtgtggaatgagcccagtgaggctaagcaaaactcaggcaaaggcgccacgggccacagacatttctgactagaaaactgacaccctaaggatcctgtgacacttgcattataaggctattgagagggttaaatgaaacaatgtttataaaatgcctgcatataattaatgccagaaatgtgatgtacacacacccacattacttggaggttatattacattacattctgattatgttctatgtttgaatatatgacacaaactaaatcttcagcaagaattaattagcagcaaactattaatttgtgctccatcatacttctttggataaagataattatttgtttgtagataggatattctgcccttattaaaactacccatgctattagtaaattccttctcatttgataatcttgtctcaatgctttgagaagttgtcctgttaggtgctgcaaggcattcactgtcaaattaggactggcccctaccatcttgcaaaagagacaggtgcccagtggacagtgaagcaggggagaatagagtaatggtcaggagaagggcatcatgaaaacctgagggctccaatgcagagagagtgtggggctacggaaacagtttgggctttaggagtcaggctgatttggtttctaatcacactctggactttagaactggatagccttgtacatgttactgatctttcctaagtgtcagtttttttcatttttcaaatgagaggaatataggacatatctcatacattggataaccattagcgtttaccatatattcaagaaatattaaatcctgtcacacactttgcctcctttctttaccatctccttctttttcctcaactcgtatttttcctcccttttttcatctctcctcaacctctgataggacagattgaaaaatatttgatggactaggcattatttcgtatcagccattgtatatgagtagtgttttaaattctaaatattgtaaattataagaagtaattatatgttaaataaagtttacaactccaaacatccttaatcacattgctagcaaaaatttattkatttagtttttgagatggagtctctctctgtcacccaggctggagtgcagtggcacattctcagctcactgcaacctctgcctcccgggttcaggcaattctcctgtcttagcctaccaagtaactggaactacaggtgcccgccaccacacccagctaatttttgtacttttagtagagacaaggtttcaccatattggtcaggtggatctcagactcctgacctcaggtgatccacctgcctcagcctcccaaagtgctgggattacggatgtgagctactgtgcctggcccaaaaatctttctatctttacttattaactactacttattcctaattttatgtagttaaaaaccacaacctatgtattattttaatgtttaccatgttgacttaatgctaggtaattaatatctttgcatatttctctctcctttgtacttacagttgtattaggttaccaaaagaaattatgatcacttctataatgtccaatatttagatggttttatttttktcttctgttatataagtgtctgctaaaaatattttggaaccactgctctagatgatttgtaagatctttaacaactcttacattctgtgattgaattagttatgtaatagcccataaaatgcccaagccacagcccttccttccttttttcctttcgtagttctcctcctccctccctccttttctttttccttccctgcctttcataaatatttgtgaactgctactctgggccagatgccactgtgggcactggcagaactgggccccctgtagatcagatagaaacaaatgggaagctcygggccattgccttcaaaaggctttcttattccagagaggtttttgacataatcctcccctccccaccagcctctgctgtgaccagcttcttacttgaattacccttcagctccctcgctcagcttcatgctcagcatttgcccagactctgacctcttctccattgggatctttttcttggtctcttggttccagactcaccctcatccctaccttgccttttgttttcctcccaatttcttggcttctggctctagacaggatatggctgttcctgctttcaaacctgtctattattcccaacttaatctgtctgtcagtgacaccttctctcttgctttactgaaaggcayggcaccttaatctgtgagaggggtgggaagcttcagccttctacctggttctttagtttctctaacttaatccttcagaagatggcaagtctttacttttggattctggcaatgtggcccacactttcgtgttgaattacagtcatggtatgtagttttttttttgtttgtttgagacagagtctggctctgtcgcccaggctggagtggagtggcacgatctcggctcactgcaarctccgcctcctgggctcacgccattctcctgccttagcctccagaatagctgggactacaggcacccgccaccatgcctggagaagtttttgtatttttagtggagacagggtttcaccatgttaaccaggatggtctcgatctcctgacctcgtgatccacccgtctcggcctcccaaagtgctgggattacaggcgtgagccactgcrcccagcccatggtatgtagttttatctttgactttaaaatgttttacccatcctattatcatgaattgacttcttcctgtattttttggcagtatgttgagcacaagggttaattgtataattaatttcagaaagttaatatagttaatctccaaagctctctgttagtatgagtgagaaatgagtaagggcgtaactactgttataggtgtttagatgtcataatcaaagtcagggacaacattctgtaatgatccagagtatgggagtgtgagggacacactatgagttggtggctcttcataaccactattaatcatagtatgtttttttwtatgacccagcaatgcaaccaatgttctcattttatttttcttggtattcttagcacagggcctggcatatagtaggtggttattaaatacttgataactaaatgagtgatgctttttcttatgagagaaaataaatgtttttagaagagtcagctttataccatggtttcaggggatgaattgtgatgaaaagtgaagattgcttttgcttgaaagaggctgacatatttcccagacccrggatcactttctgtggtgtatgatttaagggtgagcgarcatgccaaagcgctccacttgagctgagtgatggggaatgagttgtrgagctgtggtcttagatggtattttgtgaaaaacagtgggagatttatggctattaaacaactttgtagctgcccccttcttgtttcgaagtctgccaaatctctcctcctgtggtctgtatcargttctttcagtgcatccaggacattcagagatatccacyggactgtagtttttcattgaatgcacctattggaaaggggcttgaattttatgcatttatcagtttyggtaatcaccgagtgaaattctcgctttgcacgtctgttgtagaatacactgtatgtgcattgaatcttttccaagcgggttgccaaagttctaccttccttctttccattatggatattgcagagtgcagtatattagtggctactgcctttattgatgtgagttttaaaaattattagtaactctttgatcgtgagcaggagaagaatcaagtaaccttcagaatgctttgatgtatcttcagcagaaggatttataaggccagaatgagtgtttcaagccttgcgggggaaggggatacatatttaccatcatctgcttttttctattctagagctcactctcagtagctctagaagaaacagaaatgggatatttcatcacaaaaagtcaatcagaggtggcattcatccatgttatacaagtactagagaattgttacaggaatttttctctcattrtgggttcatgtcaatataggagtgcatggattagaaaagaaatagggccttttggtgtttttaaaaaaatttcaggcttaagtctgagaaattccaaaatgtagaaaacttttaaaaataatgarcacatgtagagatcatccagaatttgtggtttctaatattttgacatttgttttaagtcttctttaaatgaaagaaagaacatcatatatacagctgaagttcctttctctccacatcacactagccccagtcctactacactgccccttggcagaagcaaacattttcatgaatttagtgtacattttaaaataatttttaggtgtttccctgcatacatgaaatcaacaaattttatatttccataaatattatattacatttatcattttgcaacttgcattttcactctgtattaaatttttagacctattcaaagcaagatatagaaatcaggtttttttctcttaaatactaaatattattctgtcttactgatatacaacattatttttatttattttcctcatcgacagacatttgagttaattccaatttcttctgttataaataatgctgcaataaacattgttttatgtctcaatttgcagacctgtgtgagattttccgtagagtatatattttaagtgaaattgctgcaccaattttcaattttattagagattgctaagttactctttaaagtagttgaacgaatgtacattcccaccagcaaggaatgagaagacaacagtttctttttcctttgttctcactagtacctgctattgtgagacttaaaagtttgtcagtatgatgagtggaaaaatcgtatcttgttttaatttgcattgcccttagtcctagtaaatttcagcaacttctcttatgtttattgactgttcaggttttctcatctttgaatttccagacatttcctttgtctatttttctattgatttaaagacattctttttttttttttaaatttggatactaataatttattgtagatgttgcaaatatttcctgacaggagaatttaaaaagtaaaatgtaaaactataattccttgccataggcatttagaaaatgtggcaagagccaggcgcggtggctcatgcctgtaatcccagcccttttggaggtcgaggcaggtggatcacctgaggccaggagttggagaccagcctgggcaacatggcaaaaccccatctctactraaaatgcaaaaattagctggatatgatggcacgtgcctgtaatcccagctactcgggaggctgaggcatgagaattgcttgaaccagggaggcagcggttgcagtgagttgagatcgtgccactgtattccagcctgggcaagagagtgagattctgtctcaacaacaacaacaacacatttgccaaggattcaaagatttaagagtctttatagtcttgaagattcatatttactcaaatttgcttattctcattttaggcatatcttcttaacccaggtaaaagaaaacattatttaaattttctattactgcatactcaatatacgatgggtgtactgcctcagtttcaaggcaagttctttattctttggcagatacagtataaatttaagacattttcttgtccacttctttcctatgataattgtgtctttctgaattgtacatctaatcctaaggttcagagaaccagtgtgaacatcactgttgaaaggatcrcaagggcttcattttgaaaaaagccaagtcaaagagctggtagttggatcattgatttgtagttgttttcctaaacatccagccatagaagtcccaccaaaaggcatagtttgcaaaatcattctttcctggattattttccatgatgtgagtttatcaatggacactgagcaggaaagtaattaagtgctggtcatagaatgatgactgcaaaacaacagaagccacaccattttttgctctacctacagtacgaaacaaaactaaatatctcttttaygcttggttayagaattctaatgtgtagcacagtcagagatgtttctgaaaaggtagcatttgttccagtaattgtagaaaaaagctgtcatcaaattgtcaacagcccaaattgagattaaaagttctaagaaatatcactacacaacaaactaaaactcatgttggatttttgggtcttttttttagcaatgagatggagcagaaatattgacagctatggcttcctatggaggaagtatgatagatctagggaggatgacccctgtaccctcaccccatatgtcctgcctcaagcattaaatagatgccctatttaggacactatcctcatgtttcattcatcaggtagaaattacaggagaccttgaatacccaatagagagacacttggtgactgtagtatttgatttttaataattttgggctctacattcttgcagtgtgctaaaaagtggaaaagtcttacctactttaaaacacgtttttcttggtggttaagcttttatttttgtggacccaatagccttggatccaaatttaaacaccatatatttgccttggagctgragtgaagaaatgctacctgaaaactgttttctacctagggacagagcttctgattttgctccactcacactcttcctgtaagtctccactgaaagccgcttagtcaaacgtctcaaatgtcagaaatgaaatttaaagggtttttctagcaagtaggtctaatctsctacttagttttgattcctataatataggtaatctctttggagaaaaggcctgcttttagaagggcaaatatatcccatagaatgtatttcccgctccggaaagaaaaatgtagcattaatgaaatttactttttcatgaagcttggaaagattgttagcttcggattttgatcctagcagatgttctttttgggatattaaaaaaaaaagctacatttgatttaggaatctcagttaagagttacagcggtaatgcttcttgctactagcagctacactgtgagtgtggcatactggccattggttctgagtgatagctgaccccaagctgaagtactttcttttggctttagctcacaaggatgttgggttctgaaaagagagcctyagcagcctgggccatcttggacacagttctatggttaaagagttgtctgcgtacagtgaaaaagcatcatcctagatgtatgttatgttattttcttttaggccttggagtgacacatttgttgataaccactacatcccaaatccaaatttcagacgtatttctcactgctgttgttaaactgagccagaatccccagtacacagcacaagacaatttatatcctttcctatggtgacttcattctgccaagtctttcatgccactgggctcatggaagtcagccctggttttccccatttatcctgggggcagagcttaacctcttcactagtatccaaagaaatctgctcatagccagcctttactttgtgggaattactgggtgaaggcctgatagaaatctaagcctttaacttttcctgtcttctgcctctctctttttcctcctccctcctttcatttcagcacataaactgcccccttttcttagagctattccatatgtactgaggcccctcaaagctttggatcttacccaacacttaccagaatattatctcaacaaaaacagctcttgcttcctaagaagtatcttggtgaataatattttctccaagctcagatcccaaggagacaggtctggtaaatgassgtatttggtatttggtgtttggtgttgcttcatgttgactttgcttttgtcacacaggcttctagtgaggacgttgccagctycccggagcgccactacacgcccttgccttctgcttccagggaactcaccagtcaccaaggttggaactcagctttttattgctctcagtgggtgcagggagggacacttggctgtgcagagctctggctcattactgctgcctcggcactttagaaagaacacagtgctttttaagtccttgatgagaaaaccatacctgtcacacgtagtgattttaacccrtattaaacagaatttagtagcagtctattcaggaggcaaataaatctacggtataatataattttgtgatttttttttctttaaataaagagattagagtacttaaaaattatcaaggagatgttaactccagtattagtgatggagagaaattgggaaactcactaacatttataaaagtatcgttgtttgagaatataacaattaacagctataatttcaaaatgaatgaactctatgttataactaaaaggaattccaatttgcctggcaacattgagagaagccatgtgcagtttttgctgaattctcttattttcaaaatattaatttggtttactcagtttttccaaagccttgcatgtctgttgccatctctagagtcttcagcttcaaaagcagacagaacactgacatgaaatatcatttgaaaatgtcttatccctaagttggctgttttaaatattgtttccccaagaaggaaattccacttgtacacgtaaaggtgaaagtgaacaggggctattctagcattgtcatcccagcagcattgcaggatgagcaggtggaagaacaggctgtggtgatgctcagaaagtagtgaatctgaccctccaagtcaccgtctgggctctgggcaaatgggatacttgtattctgcaggaaacgaagaagagagtagtgcaggatttccgatgtctgtggcttggacctgtgttgcctgtttggtgtttgggcatcaatagaacttttctacatttaaatatactttagttaattttgtgaaaaatcaattttgctcaaagtcagggagaataagcagctgccaacctgctatgttttgaggggcatgaacaggtctctttcactgaatgtccttttgaaggtcttaagcatacatccctttcgagactgtttttgggggaatttccctaaaataacaccacatctagatggagcaacaaattaacccttaaattagcctcatatcctcatgtgtttatttattggtttcttgtatttgaataagggtatttttactttagagtcattgaataagttgcatagaaactgaagtctcagaaacctcacagccacttgtaaagtttatctggccctgaaattgagatttcactatggagagatatgatcagatagatgataatcattaggaatagggcaaatatcatctgtcatttttaacagtaatataaaaaatctgagacttgaagaaaggaaatataacacaatatagttttaaaatatttggagtaatatttggaatatggaaaaatgcctaaagtagttagagttcaaataagtgctcttggatgacatcagggcttaacatcaatgagagaaatgtaaagacgttatttaaagagagccaacacagacatctcaattttactgaagaaaatccctacacatttaacatgttggttgcctgaccagtgctgacttggttgttgataaaagcaagtccatatcataaaatgacgttctttgggctgatggccataaggagaccaatagagagaagaccgaagaagttcattaaagctggattattgaactgatctatgtaggagaaaggtgagactaatatatttcagcttagcataaaccaatttggcttgaaccaacttggctttccccaagtgagaaagccattattttttggcactaaaatgaaaccacttaatactatctcatttttttagtatttaaaagaattatttcaagtttctgatcatgtacatcacgaaaacatttgaatgtcatttgttaataccttcatgcaaacagcttacaaacatttatgcagaaggggacatttcatggtgtgaggacaaattacatcaattctttctcaagtgaaattctccatgatgtctgaaacttttgtctatacaatcctcagtggaagttctatttgcaaataattttttattcatcgagttcccaatctcttttccttccacaccaacaactacaaaaactggcgggcagtagttcatgtgcaaattgctatttttctgtacatgccattttccctttacttgtccttttatgtaacttccaatgtcaactatgataggtccaagattcatgtcctaaaaactgtagattcaaatgcaaaggaagtccrggcttagaataatgatcaggagacctgggactcaatttttccatctgttgcttgtagataatccatatatcacagggatagtaacatgtcgtattttgcttcctgcatgaaacttttactgatctgagttatgttgattttcttctttctrtaggtatgtctgatatttgtttctatcttctaggtgcaattgttcatattctactttgtatgatagaggtcaggttatgtgtatcttaaactcctcataaatgaaaactccctgagaggcagcagtaagtccaaatcatcttttttttttttttttttgagatggagcctcaccctgtcacccaggctggagtgcaatggcacaatcttagctcactgcaacctccgcctcctgggttcaagcgattctcctgcctcagcctcctgagtagctgggattacaggtgtgtgccaccatgcctggctaattttttgtatctttagtagagacagggtttcaccatgttgaccaggctggtctcgaactcctgaccttgtgattcacctgcctcggcctcccaaagtgctgggactacaggtgtgagccaccacgcccagcctcatcttctctttgacatcagtgacactgcccattcttcaggtatcagcttacatatcacagctccaaaggaaacttgcctgataccccctacacacttatattaggccagtgttccctgttcagggattatcttcctagaaaggccataagctgttgggaagagtggttgtgattacatatgttcaccactttatctgcaatgcctggcacagggcctcctacctaaatggcgctccacatatatttgttcagtaaaggctgagtaataggaacccaggggaagggtgagtatcttagtcacctctgcgaggtaacttgattgcatgtgagaaaggagaccctgcttcctttgggggtgaacacactaaagggaaaggtccagctgtgtggacctcagacctcaattctgttgctttcataaacccaaaccatcagggatgggtgtcatatgtgttcattcattaccagaaagcatttagtcacaaagcctaacttctagatagttgattattttaatgttgtagttttcaagcattggcggtttgacggtagggaagggaataggatgaattgaagtaactgatggaattattttactagaacagaaactctcaaggaaggggtcagactctcagtaagatacagattgtggtacacacatggatttagaatggtccacctgaattctttctgagaatgctgccctgggttggagcatatctttggaatgaggaggacatgggaatgtgtcagtaatctcagttgttccctcgtggcaatctacatattgtatccttggctgtgtccatgttatgaggagcgctaaaatatctgttggagaaatgtccctttaaatatattacgagtacaggacatgccccagcgtgccaggtattgccgttctttatctggtagctcttwgaagtagaattcacatttgtacagggcattatgtcttttggggaaaacatttctatttagaatgtaaactatatcatcctcagggtaaccctgtaaagtgaggagtgcaaatatttttcccatttaacagagggagacatcaagaattgctggggatgatggagcaactcaacaacaggcaagggaaacaaaatcaaagccctgtgcccttaattctcaggtccccctgacctttgtcctttacccagtgcgtatgaagcaagtgtaggtaggactaactgtggccttgagctggaaggaagagtcaaaaaagtagagggagaggcatggcctggaaatgttcaccactgccatgcgtttccaaagcctgtgctaaggctgctaggagctacagcatcccacttgcctgcctctgtcaaaagaattgcattactcctgccctgccattctgtatttttaaattacagaacaataaaatcaggagtggagaaaatttgaaaacaaaaagggtgaatgctccatgtcagtctggattcagacagggaaaatagaaggcactgtatgtattccagtaatgaagagttttaatggaaggaattagaggtgctgccaccacccagagtcacaacctcagcactgaaccagtgattctcaggagcttgctggaaagtttctgtggatcacaggaacatctgggtgtctcccactgactttctctatctgaagcaccagtgaggggattctcacgttcacctggagactgtttcagtcattgctgttatccatgcgttgccctgctcctccatctctctagatttccaaatcatactccagcatctctctttggcccaactctaacctaggctgattcactgaaggcgattctccgatgtagttttcagttctccctcgaagctacagagaaaaccttagaagaaagcagatggtggtaatggtaaaacagataatccagcacatctaccataaccctgccttgccaatagctatcatgtggaggatctcatttcaacttgtctgcacgcacattttgcaagataattgcaagcctagtgaatgtccctgaattatttatttcctgatgcttatactatagtcttgaagatatgccatagttagcttgccatattaaacattgaacttgaaatgtgtaaaagaaagaaagcaaaaagaaaaaaaatgaagaggaaatttgctgtgaaacttgcttagagatgataacctttctactttgactattgttggyaatcttgccattatttttattgacacagttgttaggtactcatcttcctctccaaccaggggcttggtctatttgtgtttgaaattgattgctgggactgtcacaaagtaatttatatagcaacttattataattagttatcatttgcagtttcctaaatgtgagttgcattttatgyttagcaattgatttttctgtatatctccatgaagcagctcaatgtatgccatccaaaaaagaagaaaaagaccgaaagaaaaactgtgtttttttaaattatttaaaacatttttagcctgagatatcataaaatacgtttccacagaagmcataaatacagagtgttttgcttcaactcattaaatcgccaaagtgaaagtgaataaaaggaaatttaaatgtctgtatgtgaagaggtagcaatgtagacaaaaatgtttgggatggggagatgttggccagaaaaacttcatgccaacaagcataatgctttcaggagggctcaaaaggaagttacttgatgactaaactattgctcacaatttgttttgggcttataggattcggaggtgcaggggcagaatgatgcgatacttttcctcatctattataagggtcacagcccataacaaaagacaggttaacaagagaagaggataagaaatttacttaatcaaagttttctgagatgggggggcctttagaaatgaaagggaaaactagttttatgcttatgttgatgaagaatggacagctgtgtagaaacatggttagacaaagggtatgatctaatgggaatagattgaggggaaacctagcaaggcctgtctgttcagattcttcttggcctctctatgtagcattccttcccctggttataggacagaaccctctgaaatgagagtcttcaaaggagaagagagagtgtgaattttctaggttttatggctggctttaagggataggattctagtttcgatgaccccacttagggaagaggaattctggtttctataactcactgcagggcagagacagagggatgagggagcaggtaagagaaggccagagagaccttgcttctgaggcccttccagtgtcttttgtttcaaagcactcagcacgtcaaggtgccacaatttcgggtattgtgttttgagccctgtcagaggcagtatgtctcttttagccaacttttagtttttcatttttagatttctactatcttttcatgtcagccacagggaatgtgaaagctaagtaggtctgatcattataaacaaaatctacagaaaacaatagcaaagactcaggaaaatagatgcatttatttaggccagcttaatagcttagcatcaaggaatcttttgcctactgcctcttggttatcactgaccatttataaacatgaggccaggtgccgtggctcaygcctgtaatcccagcactttgggaggctgatgcaggtggatcacttgaggtcaggagttcgagaccagcctggccaacatgatgaaaccccatctctactaacaatacaaaaattagttgggtgcagtggcaggcacctgtaatcctagctacttgggaggcagagacaggagaattgcttgaacccaggaggcgaaggttgcagtgagtggagatcgtgccactgcactccagcctgggcgaccaagtgagagtccgtctcaaacaaaacaagcaaactaacaaaaagatgggatgaacaacctgatggttctggagcctttgccacataggtctcacctaaggtcaggccctatgagtgagacagcctgcttatatattgccttctgccttccagaatatttttattagtctttcaagagagctaagcatcaaataatttctcaaaaaattgtcaatgactcattgaaagttcatagaagcacaacagatccaaatttctcctgtggataatgtattgaaaagtggcaaaaggaaagagagagaaaagaaaaaagaaaaaaacctccttagagacaagaatatgtttttgtccaggggtcctgtcaaataagagtatggccttggcttgtatcttttagacttcttgccaccactgtgccttgactgtgtgggggaagagtgtgttggttcctcgtgcagaactattattagcatttgctaattatgtaaaatgatttcctctgatgacattttcaacagaacccattactttagttttctttccttcataatgcttttatgggcttataatcttggtggaattctcagatgctgagagatgctaaagtttcctttatttaatcgaggtgactagtgatttgacagtagtggttgacaggtttattttatctgcgtggcagtaggagtctattttcagtgtgtgcactctgttccaaagtaaaaggactttactaagtgctgaataaattgtactttcctttgattctagaccttgctgaaatggtttaaaaactccggtctgggtcatcaaattcatctccttgctactttgcagggtcaatagcttcactctgtacagagccgggctgggtggattggaatggagggtagtgtagattaaaacttccgcatatatatagatagatgtgcatgtgtgcactcgctgtctgcgagggtggcagtgatggaagagcaagccaagtggaattgaagatggatgaatctgttagactattaccaagactggcatggagtttagccaggaactttaagcaacctcctttaaacatttgaaatccataggggtccatttcctctccttttcctccaaggatgatttttcatttgcagtctctgagattgctttatttctattctttgggcagaattgtggtatacttgtagacagagaagggctaygaatctggtttttctctcccagagcaaagcaaggaggaaaaaatggatttcagttttcccctgcccctcaaatagtagcaaaccctacttctgtaaaatgagaggtcagaatgacaactcttcccccaacagacagtcccaataaaaaatgatagtaaaaacatgctccctttatcttaacaaaatggaagcctagaatgtacagggtggaaggttctaaatgtgcttatgttttagagtcctgggctgtttcttgcccctttttataaagaaaaaagtatgatatggtcagtaagacaaagattgctatgagcacagtcattcaagaatctccccaacatgtcttcatttagtacctattgtgtactgagtgtattgttaggatttgtggagaattcagaaatagagaatattatctctatcttctaggaatttatggtttgattgaggagatcccaaaaatgaagtaataccaaccaaacaatatattatatattacataaataagagctctattagttggtaaaagctgcaaatgctctcaacgtttagaaaagatagcgtgcaatgtaggtgagactactcaggcatgactctttggaggatgttggcactgagctttgaagaacatgttaagtggagagcaaaagaagggcattccagaaagataaatgggtaaagataaagcacaaggrcaagaacaggtagaactgatgagagaaagggaccctgttttgaaaaggtcagaaataaggttccttatgtaggataggtccacattatggcaggccttggacagacagaagggtttatattttatttaaaaccatgctgtaggattattaatctgcaagcagtatccaggggtaattggaaaggagagagcctggattcaaggaggccatggtgggatgggattggaaggaaattgtttcagtcttagaagccttagatttccagataaccaggttctgtgcccatagactgtgatgcctccaaagagcaggtttctagcaaaggtaatttagaaaacaacttggtaacagatggggaagacagctggggcctggatagatactgccaggagagcaggagtgggggccatgcacagggaaccttatggccactatggagttgttgtatgaggttgctgatggtttggtcacgagggctcaggcatcagagaaactggacagtcagtgtttttcctccgcatgttattcagaatatttctgatgttggcttttgaaactaaaacacagggcccaggataatgttacaataatccagcattcgatgatcaaggcctggagtggctggctggctgactgggagtacaaaaaataaaggaaggaatatgagaaacattctgttgcaaacacaatagaccgaatactgattatatttcagggtagagagaaacagaggaccagaaagctataaggaagccagcatggtgtgtgggaggctgtggtctctgcctgttgcccctctgtcggttcatcctcatcacaggattctctcccaccattcatgcatgaactctaatctggcctgttaaatggaagaccggtggagttaatgtagtggagctgtggcagcaggaacaaacgtacaaaaagcaggcagagcagccacaaacatttgttctcattctagcctttggcttaaagatgagcttcattctcttaagaactaataaatgtccagggtgttttatttctgaatcttgggctcctggaaggagagtgatttgaagccaatgcttttggtctaaattgttcagccgtgagctcggcccagtattaacttcctagtcccagttcttctgactctttttatttccctgtctcttgtagaaaactttacccctgccccaggtttttcctcatgtagtgattttacaaccttttttggaacaaataaacaaacatctggaatcatgtggcacatttaattaaaaagtttgcatttggccagaaatggtaaaatcatgaaaaatggcctgtcggtgagctcaagaaggccaaatgatgacgttgttggctgcaaacggactgaaattgagggaagtgaacacctgctcagctcggcctgccgtcctccagcttcctcctccagccattaatatttacagcagtttctttatccattctaatgaaattttttggttggggctggtctggggagagggctgttacttttccaataaccttggatttgttgtgatgtgtgtactttataaagggtgtggtattgggctttttgggcttttcatttcccttgctcagaattccatatgcttcaggtcactgcaggggcctgttgctgtttcttcaatcagtcactcaaccatggttttcatgagagcygtaacatgtggaaccctgcaccagggcatgtaggagatgaaaaagaagctgtgggctctgccttcaggaatcctacagtctaattggagacaaggtcctatgcagagaaagcagaggccaagctagatggaagagtgcagagaagggagggatctgtgatgatagaaagattgggaggtggccttggatgaaggtgagaactgagttgaaagaactttccctgcgtgagttccaagtgtgaaaggatttaggaagagatcaagttgtggattcttgtctagtttctggtcataatctaggtgaaagtagggggtggatcatttaaagcaagaattagatatgattattctacatttccagttagcttctcctttgcaagacatagctagggtgaagtaaaatttaagttttgtttgcaaattaggataaaacattaagatgatctggctttgcagagtgtagtgctctcatatgtctcccacatgaggatttataccgaggatgagattattcttaggacaaagtgagaagtttttcttgttgcacagaatacaagggaagtagccaggtgctgcaaatatagtaagcactgtttaggttagatccaaaggaagtatgaacccataggtatctgagacatgtctcacaataaatttagaaagtttattttgcaaagacttaaggatgcgcctgtgacacagcctcaggaggtcctaatgacatrtgcccaaggtggtctgggtatggcatggttttatacattttaggaagacatgagacatcaatcaaatacatgtaagatatacattggtttggtccagaaaggcagataactttaagtggggggagcttccaggttataggtagatttaaaatttttctgattggcaattggttgaaagagttgtcaatagaaaggaacagctgggtgatataagaggttgtagaaaccaaggcattatcatgcagatgaagcctacaggtagcaggcttcagagagaatagattgtaaatatttcttatcagacttaaggtctatgttgatgttaaatgctggttggcttttcctgaattccaacagggaggagggcataatgaggcatgtccaacccaccccmgactttccatcatagcctgaatcagtttttcaggttaactttggagtgccctggccaacaggagggagtctattaagatagttgagggaggcttagaattttatttttggtttacagaaggatgagtattgttttgaactagggtgtggattggcaagggagatagagaaatcaccattccccaaggccttttactgaaggacatgctcatctctctttgaggtagcctgaaggaagtgaaatgaaacttaaacaattttcaaatcctgactggatgtaatcctgggttctctatgtcagtgctggttcagctttttcataaaatgaaatcagggtttcaccttgaccctcctggacttgtgcaagcacagggagatacaggatcatgctggacggagcataacttcagttgccagaggagttcttagtcctcagctctttattattcttgtgcatctgtttccttaaatactctctgcagaagcattagcatgaaaataaaagagtacagcaacttggaattttccatttgtagcttccttagtctgtggggtcaaagttctgtcctcagggatgctaatgcaaactctgtgtgctgttccagggcaaatgtttctcaactaaatgacaagagggggtggggagccagggaaataatgcagtgctaattcccaaacacagactgcccagaggtcccaatttaaattgctgcttccccaactctattcccaccctcccccaaaggaaaaaaaaatatcctgtgttgttaggacagacatctgtgtgagagcaataaaacagtcttctcccttgtggattagctctttattcctttatttatcttgctatacctcatcagtttatcctaaatcaaggagagtcaaagaggataagatgcagtcccttttttgtttttgattaaggaaacccatacaaccatcctcctacacaaatttcttttctcaagagatagctttccttgttatgtctaatttctccccacccccctttttttaatctgcctccttggaaactctctggaacttttatttcatataatgttcaaatcagawaatgaaactcctccagagacaggttagatagggcagtgaatgttggcatgtctgcatgattctaaagtacaaggggaactaggatagcagacttaacatattccatagcctccatttcttcttccaaatccctggaagtttattaattcattcaagagatatctatagagcatgttctatgtgtcaagccctgttcaaaacattagagatagagctgtgcataaagtgggcaaacatttctgccttcaaagagcttatgttctagtcagagagaggatctataactaagataaaaataaaaccaccacatggtatatcggtactaagatgaaaacgacagcagatcaagggcatgagagagtatgtgttggcaatttaagatctgacagccagagaagtcaccactgagaagatgatggtggagtaaagacctggggaggtgaggcatggaaccctgagaatgtctgagagaaaagtggtccaggctgaggaaggagcaagtgcaaggccctgaggtgggagcgtgctcctggcatacatgaagcacaaccaagaggtcagtgtggctggagttagtaatctagggggagagtggtagatgaagcsagaacaataccaggggctagaacttgtagcccattgttaaatgttaaacccaggagcattaaaattttaaagaatttatttgagcagatggtgattcatgaatcaggcagcactagattgcacgtggttcagggctccaccaagagggtgtgagggaatattttttataaggtgtttgtggaagccaagacaaagaaattatttgattggttaaagtggaaagtcccagttagaagttagttagtggtttcttgttggttaagcttaagtttcattttactgcttacattgacttgggttttggtttgcttatgtaggaatccaaagtgctggaaccatctcagcctaatggcttcctgatagattattttaacactgtttactgtgactaagacaggaagctatttcaaggcagaagaaataatagaaatgctgttacccttctccttatagaaaaaaaaaaaaacaattcccaaatgaataactaactggaaaagaaagaaagggtactgcttttgatcagaaactatagatttcctgcaagatcacagcccaaaacaaatgcaacagagtttcaaaatgcagaaccaagacccagcagggtggcatatacctacaagctcagatatacctgacgtaggaggactgcttgaatccaggagtttgagactgtagtgttgagtgattgagcctgtgaatagccattgtattccagccggggcagcatagtgagacacagtctcataaataaataaataaataaataaataaataaataaataataaataaatggatgtagaactagcttcaggagttctctaagcacagagaaagctactgggggcctcatagcaggcaataatttgggcttcctcagtgggtacagccacatgggtcacattgtctgtatacttctctccatccttagtttaggcatcaagtaacagagctatctctaagccagggcagtaagtatgagtgattggatcagaaaaataagatggcaagagttggtacaaatgtattaagtcataataaatgagaatgaactagactaaaagacagagcactaccagatttggttaaaaaaaaatgtaaaataaaatactttttcaagaggtgcatgtaataaaatgacatagaaaacttgaaaatactggaattaaaggacagaaatactggatacctgctaacacaaaatccaggaagagcaatgttaatattagacaaaataagactcaagatgattactgaaatgacaaagagggttattttgtataactatgaagatataatgggaatctaaaacamtcatgaatcttaatgyacccaatgacatggctttgaaattcayamagcagsaacttctakaaataccasaaaaaactaacaaagtcaccatcatgaagactttagcacatctcctatgaaaatgacagctaaatgaatggactttttacaataccttccttttgttacatggaaaataaggtgatattctttaaaaacctgtatgaaacagtcacaaattggctcatatccacaaactggctcataaagaaaagtgtaacatgcttctttcaaattaactgaccataactaagtcaaattagaaattatattaaaaaaggaagacttccttccccctccttccaaaaaaaaaaaaaaaagtaaaagaggtaagaaaaagaactatagactacagaattagaaataaatgaagttttgggtttatgaggaaatagtatacagtatactttaagagtaaatggaagtgataacactgtagtatattaaaaactgtgggatataccaaaagtctaattaaaggatttttcctccttagaaacataaactgtaaaacaaggaatagaagataaaaatatatgaactatgttttcatatatcctaattaaaaaaccaagcaaacctaatgacayatggaaggacttaataaaataaaaacaatgtacaatatactttatcaacaataccaacagatatttaagaaaaaggtgagcctagcagatcaaagtaagaaaaaatagagattgacatttaacattaggaataatgagacaaaaaaaaccccacaaagctattgagcttcatattgataaatytgaaaatctaagtaaaacaagtaattttaaggcaattatagttaccagtgctgtctcaagaagaaatataagtctaaacagagaaaaaaataagatgataaaagaaactttaaaaataaccatatagccctcaaagagaagtagcatctcatcttttataatttattccagaaaataaaaaatatggaaaattactctttttctcttactaggaatccataactgacctaagcaatgtgagaaaacatgaaaatgaaactctaggtcagtctctttttcaaatatgaataaaggaatcctccatgagaaattaacaataagacttagtaatgcatttaaaaaatagtacttcctgaccaagtagggtttatctcaatattgaaaggttagtttacttttagaatttatcagtaaatgtgtcatattggcatattaaaaaagaaaatgggattatatataaggatgatgttactagttataaaaagagagggaggccaggcatggtggctcacgcctgtaaccccaacactttcggaggccaagcagggtggattgtttgagctcaggagtttgagatcggcctggccaatatggcaaaaccttgtctctactaaaaatacaaaaaatagctgggcatggtgatgcatgcctgtagtcccagctacttgggaggctgaggcatgaggctctctggagcccaggaggcggaggttgcagtgagccaagatcgtgtcactgcactccagactaggtgacagagtgagaacctgtatcaaaaaaaaaaaaaaaaaaaaaaaagagagagagagggagaaacctatgaaatttaacaaccatttctgctaaaatctctcagtaaacacagaatagataggaacttccctaacttgataaagtgtatctaccagaaacctatagcaacctgcatatgaaagagggatttaaaaaatttccatcaaagtctcagaacaagcagagaaggactattctacattcccttggatgtgctagccaaagcaatgagatatacaacaacaacacagagcgcaataaagattggggtaaattcagcattatttgcagtcaatattatgacttagaccaggagtaggcaaactttttctgttaaggagcagataataagtattttagggattgtaggccagaagacatctgtgacaattactcagttttgccctaataacataacagaactaagatccattatatctgtagtaaaatatataaatatgcttaattcatgtattttaaagattttcagagtgaattataaggcaaaacctaatgctctgtgttgtggaagagaaacagaaacaaactgactcaggaaagttaaaataaaaggatggacaaatgtgaataaaaagaaagcaggtgttgtagtygttatagtgttttacaaggtagaattcaagcagaacagtaaatgaggcaaagaaagatgcctggtactgaaggttgaaattcatattagaaataactattacgaatagctatatagcaaaataaagtgccaatattcatgatggaaaaatcataggctatgaaaggagaaattgaaaaatatactagtcttaggggattctccttcacctgtctcatttactgacagattaagtgggraaaaaataaggatatgaaagacaaaaatagcaaaattattaaggtagatttgattaaaacatatcaaactctgtaccctaacaatataggatatgcttcttttcaagtcaacataaacactcattgttattccagttagtacggctgtgtaacaaattaccctcaaatttaattctatgaaagaatgacttattatattcagattctgtgggtcaggtatttcaagaaaggatagtaggaatggcttatctctgtaatgcctggggcctcaataaaagacttgaagcctgggagctagaattatcagaagattcatatgttcatgtttggttgttgatgctggctgttggctaagggcccccctttccctgcatgtgggcctctccatgtggtttccttttgttggctcatttgggcttttcatagcctagtagcagagttctaagggtgagagtcccaagagacaggaagacccaggcagaaataatagaatcttttatgacctcagaagtcatacagcattactttggccatattctgttcattacggtagttacaaaagtcctgctgctcatgttcaagggaagggcaaatagactctgcctgttcatggggagtggcaaaattctggaagagcatgtgggaccagaagtattgctctgactgattttggcaaatacagtattccccggtaatatactgactggatcacaaacaaaatttcaataaatttcagtagatagaggtagtacaataacactgagatcataatataataaaaccagaaataacaaaattagattgcaaaaaagccctctacccagaaattttctagtactcttacatttcaagtcagagataacatatatggttaagaattcctgggggattaaaaacaaacaaaaaaaagataacatataagcctaaactgtagaatagctagagaagtatattaatgaaaccattacctatgagaatgtatagatagatttaagataattattagaggaaaatagatagcttgaagtacatatattaacttgaaaaaataagcaaaaattgtaaaagatatattaagcatctgactcaaaaacaatatcagcctcataaatcaaaggaaagtggaagggaggaagttttaaagttaaaaataaatattaataagatagaatacaaaaagtataatagaccaaaagttaatttttttgaaaaactaaattattaactatcccaatcaaggaaaaataaagaaaatgcaaatatacaaaataaaaaaataaaaagccatagaaacaagagaaaactaaaataatcctaagaagaaactgtgtttaattctgtgcaaatatctgaaaatctacatcaagtggataattttgtaggaaaatataatttcccaaagctgaccccagaagagatagaagattgaaacagtttgatttccacaggcaaaataaagttcataaagacctatcacttctcccacaaaaacaccaagtccaggtggttttacaaggaaattttaccaaacattagaagagtagatacttatagtattctgctaaatgtttaacaaccgggtctgggggctggagcagggagtaaaaaaaaccctgatctgtactgtttgctgatttctaagcataaatatttctgtcataatttatttcaagctacctgtgtgacatcacttaaagtgaagatgagaagagatgtgcagataggctgttgtgagtcagtacaagctggcttttgcataacatggagctgatcccaatgctatttaaactgttgcagggtatggaagtactactttactcttacagaagtatatttacagagtgaagaagtacttccaaatttcttttgtgaagtacataaggcctttacagaaacactgataagggctttatagaaacactgataaggattacagagaaaataactgcatactcactccaatgttaactataggtgcaaaaatgctaattgaaagaattacaaacagaatctagcagcataaaagcagagtaaaacatcatgtccaagtaacatttattccaagtattcaatgaaatttcaatattaggatactcatttatttactttttttagtagatctgatgatgaaacccataattatatggatgccaaaaaggctttggccaaaaattttatagccattcttgataaaaagcattcaaaaatagatgtgtacttccttaatatgaaaaaacacatccatctcagtccaaaagccaacatcaaacttagaggcgttcctgtgaaagtaaggacaaaacaagatatctgttactacctattatttaatgttttactagaaatactaaccaaagcaattagatatgagaagagattacaggcatcaaagtggaaagcctattataaaagtttcatgtttacaggtgattttttttttttttttttttgtgagatggaatcttgctctgttgcctgggctggagtgcagtggtatgatcttggctcacctcaacctcagcctcccaggttcaagaaattcccctgcctcagtctcctgagtagctgggattacagacccgtgccaccacgcctggctaattttttttggtatttttagtagagatgaggtttcaccatgttggccaagctggtcttgaactcctgacctcaggcaatccaccctcctcagcctcccaaagtgctgggattatagatgtgagccactgcacctggccaggtgatttttgcacttggaatttaagggaaacaactaaaaatctaamaaaataattcagtgagaaagtaaaatatacagtgaatatgcaaaatctttagactttttatattgaaatgaaagcctgttagtattttgaatgaaaaacttcatttacaaaagcaacataaaagataataaattgggaatattataatcaaacattaacaaaaatatacaatatctccaagaaaaaaaacccacaaaaaccttctagaagggtgtgcacaagaattcttgacattaagaacagacattcgtattatttttaaggaaaactcaagatcataaatatgtcatttacctctttgtaaatttataaattcattatgaaatcatgtaacaaagctttttttcttccgttttaaactagaaaaactgaatctaaaggtcatgtggaaaatatgcaaagataatagctgggattatttttaaaaagaattataatgagggaaaatcagccctattggatatcaaatatattatggaatgttaataattaaaacaatgtggtactggcacaggactccccagaataatggaatagaataggtagtctagaactagactcagttacatgtagaaatttgtatatggtaaagtagtatcttaaataggtagggaaaagatgggccattcagtataagtttgggggacatataataggtatttggaaaaaaatttagatacataccttacaccttacagcaggatacgttgcaaatggattaaaattttaagtgaaaaaaaaaaagaaatcatacaagtactgaaaaaaaagcataagataactcataattcagaaacccagatataaaaagcaaaaatggacaaatttgactttattagaaatactcttgattttatttaaaaaaaaccttttacacaggaacacaaaaccttttttttttttttttttttttttgagacggagtctcgctctgtcgcccaggctggagtgcagtggcgcgatctcggctcgctgcaagctccgcctcccgggttcacgccattctcctgcctcagcctcccgagtagctgggactacaggcgcccgctaccacgcccggctaattttttgtatttttttttttagtagagacggggtttcaccttgttagccaggatggtctcgatctcctgacctcgtgatccgcccgcctcggcctcccaaagtgctgggattacaggcgtgagccaccgcgcccggcccacaaaaccttttaagcaaagtcaaaaatgaatattgaacttaaaaaattatttggcaattgtattacagaccatgataaatttagatatatatttattttatatatatttataaatttatatatataaataaaagggaataaaacaaggtgtagaatagtatgtatattatactgctacttatgcataaaaggtgggacaataagaatctatatttatgaaaaaactctgaaagatgcatgataatagtgacaatttatggatgggaaacctaggcatggaaaaagagtatggtggggaaaagacttaaccttacacgtgcatttactttaaagctttggaccatgttcaagaataaacaaattgaattttcaaagagcaaaataaaattcatactgccaataacctaacaattacacatggctaaagggaaatacacagaatgatattcattgaagcatttttctagtagtaaaatacatacaaaaattatatgtctgtcaggaaagaaatgattaaaatatggtaaatttgtaatattgaaggctatgcagcacttaaaaaaggttaaggtaagcaaaatactaatataacagaaagatctccaagacatatttttgagcaaaaacatgtttgagtgcaaaagatttgtatgrtgttggcagaacttatttatttaagagtacagtgctatacacctttttgtgtttaaaagcacaaaagtatacacacatgcagacacacacagaaatctataaataattggaaatagttttgaaagtgtagacacaaaactcctaacaatagttacttctacgagaggactttgtttggagtggaagagagtggaagagggtgaaaaaggacttcagatttttcagtattggagtttttattaaaatatgctaatattttactcatgcaataataataataaaaagtctcaaagaaggtgataactttgggtgatttataactgttttggagactttgcaaatttgtttccccaaggccaagtgataaattgtttctgtgaaaacatcccttttcttcttcagatttaaatattccagtgttgagaatccacagtaaacttgctgtactctgtcactgttgaggaatgggacattcacatgaatcaaatatgctggtaaataaagaaatatggagaaaaatatagaggtacgtgcatatattgtatggcttataatctactgagaatggagaggaagacatcagcattaaaaatattctttattgagtgaattctttagatccaggcactgtactggaatctttacatatgtttgtgatctcatttaatccgggaaacatctcataaagttggatattatccccattttatatatgaggaaattgaagcttagaaagatatttccttgtttacccaaggtcccagtgctaataagtgtcctccatgagacgcaaaaccaggtttctctaacacctgaagcctgtgttctttcctctgttccattctgccccctccccaatacaatacacaacaatacaactacactgaatacattttaatgtttcttgatgattaggagagcacttctggcttttttgaatgttttggaatccctttatgagcgtcaattatcagaatactagtgaagcatggaaataatgtctaattggagatatctggttaaaagaaagcagagtaatactgcatcgacagaatttagtgcttttattacagatagataaaggtatggcaaaatcactggtgtgattcttgcatatcccctttattaattgatctgcatgttctgaaggccgttattccctatatactgattccaaatgttctgtctttattagtccttttatataaaaccttgtatctctatttgtcatcctaaaaatattgcttaaatacatgatgcagcttctctccacattggaatctgataacgaaaggtcttatctctgtagcctgaattaacatgagcagaatttaggtatactacgccaatagcttcatggacagtccctttggttatagattataaatgccatttagagaaagcacaggatggctcctgagtgtctagtaaacttcaacaaccacctgagagatacctccgtgtgactgcatgaaatggaaataaagaatggcaaataacccattgactatgcactttctcacccgctgagagcaaaacataatccgatgcaattttagtacttacatgcctctggggaaaatagacccctaaaaatcaccgagtgcagcactggaaaaattccttaaatttgtgctatgcttggtgttataaaacccaaggaaccttagatgttcttcttgagtaaaatggactggtaattttgttttgttatattatccaccaagcataatgataatgggtcacatgcaatttaagaaaaaattaagtctaataagaaaaatctctaataaatactaacagcatcttattggtatcatcattggtttaacccttctattaacatttgtttttttacatattaaatgatctgtaatatgttgaaaatgaagaggatagtaaaaattaaaacaggcattctaataatatatgcattgtacaaatgtttgcatgcttcttccctcaggcgagtactaggaggtgtggtacatgcatgggagtggtgctaggatagagcaggagattttgattttagatatgctgagcagtgaagatgctcagtgcaggggatagaccccatcattaaccaggaatgcaaccaattcaatgaaaaacagagattagaaatcaaaatgtagccccgaggaaagtacacagttatcccctcaaatcaggcttcttctgggccactgagaaagggtgaacgatcttagggaacctctggtacccaagcaaagggcctgggggctcctgtgcattgatagctatccatcaygggcaatgtggtagagtggggtagagctagaaggatgtattcaggaagctgccattattagaaatgtgcttctcaagcctacataagaatctcctagggaacaaccataaagtaaaagtgcttaagcacgtatttccaaggattctaattcaagggaactgggtaacaccctggcatctactgtttttaatgagttgttctggtaacacctctgcatgtaaacatgtgaagacgattgcattaaatgatattgacaaggagtctctttcccctagtcctttccaccatgtggtttaggagaatagcaactatttccaaaccctactgaatagtggcagccacaaatgtcttgccatgtcaggctctcaatggtttctgagaaagattgaacagccttcaggaggctaatctatgattaggtatttgctatgcaagacactgtacatgtgtagaaatggcaaaggtccctgcctcaaggaacttacagtttaggaggacctagcagacagaaactcagacaaataaatgcagcaaactgtgacatttgctgtgaaaagccatttgtattggataatggggacaaatggggtttggtcattarctgaagggttgcctaggtcagcataaggcttgcacaaaggagtggcagatgaggacatcacaggagccgtgttgaggaggtcaaatacttgggtagtagccacatgttggttgtaaatgtgtgtaggagggaagagcatgaaataactcccaggtttttctggcatgagtgtctttgtggcaggtgaagccattgtgaggatcagcatttggaagaactggatttgaagagaatgttgaatatgaagtattcatagtctgtaaatggagatgttctaatttgtgrgtcagcaaacttttatcacaaatggccacatagtaggcattttaggcattgcaggtcagtctttgccatgaccactcaactctagcattctagtgtgcaggtagtcataggcaatatggaagccaatggggttggctgtgttccaataagactatttagaaaaacaggcagtgggccagatttggcccatgggagctagcttgccactcctgctatatgtataggtatgatctgaagataaaaatataaatgtagctatgttgactcacatacatacatatatatattatatatatttacctagtatctttctatgtagacttataatcatacctatttgatataaacgctgcacttcctggttatttgggataaacagttttttcaaactatccaaaagtcacctaataattgtctataaagaaacaattaaatatgaaaatataaattaaaacaacaaaatacattttgtactcagtggttcagcaaaatttaaaaatctggtgataccaagtgttaccaaggttgtagagcaacaaaaactgaaaagctatttcaatgggagttgtgaattaatgtatctctattggaaaacaattgattattttctagtgaatttgaatatatatgccaatcctaagttccagaaatctcactcctgggactctaccacaggaaaaactattatacatgctcagatcaatatgaactatactcatagcataacaaaacaaaaaaacagaagccggaaacaacccaaaatgattcattaaataaagtgaaataacattcaatatggacaaatctaaaaatcaaaagaaaaagaaaccgactgaatgataccatataatatcctttatataaagcttgaaagtgccaaacaaaacactgttgtaaaagggtccttacatttttggcaaaactaggatgaaaaccatgaaaatgaaaaactcaaaatgcaggtaggtggaggcaaaaaacaaaaaaaaaaataaataaattctgacctgataggaacgaccaatgggatttatttatttctaagcttggtaatgggtagacagatatttttaaaatgatagctcttattattttacatatgttatatttgttccttaacatcaagcaagtcttgcatgataatgaaaaggcaaaaccaaaatcttattaagttatcaattttatattttcaaaaaataattaagtcaagtttattcttttgttcaaaagaaacgttcattatggggaccgattttttttttttttggtctggctctgtttctttccagtcatgtcacctctccccatgacagagggtcagctggcttccagtgtttcagctaggcaggagtcggggattatggatagcatagaagagggaggaatatcaggaaggagctaacgttgctggtgtagggtcatttgagttcctgtatctctaggagaacaagcattgtctttggcataggacagaatgtggtcagaatcctctctgtcactcagaaagtaattccattgctgtcttaatattatcctagtcatctggggttgcaggaacactgtgtagtggttttgcggtgtggaagctattgctacataattttttatttcttgaatatcactttgtagtgtcatgattacaaggcttggaagaagataaactctctgtccattccgagtataaatgggcacttgagatgaaaccacctcgttaatttccccttgttgctgaagtagaatctgaatccaaaccacaacacaacctagcccctaaatctctattaaaaaccaccttgggtagtctggcaaagctttatttaaagtcagcagagaattataaagtcaaacgtgaaaaatggtacaacaagaaagaatcataaaaaaatactagatcagttaaatgtagtcaaaggcaatttagtgtgttctggcaccagcacttattgatgcaaagaatgtgatatgtcaggggttggcaagagcatgtaggaaatgcagaatgaaggatgcagctccacgcattgactccgaaacagccatacatggctgcagaggatgcttcagctaccttccttgcttttctatcaggaatttcagggagaatattcgaattcccctaggatggacattttctgttcttttgttcttgatatagtttatgttttaaagtagaattctttctttcatggagataagctaacatggagactgtgtaaattgggtcagaccaggagggtaagtaaaacttgctggtacttctgagtatcctactattctagtttctctggggctgctacatttatctgcttttttacatccatctccaagctgtgagggtttctgcctcatcttcttcacccctttggtttcccattcaccaatattagcagatttgctcagtaatgaacacagctaccaatgttatgcacccacccctttccaggcactgtgctaggccctgcatatacattctctcactaatcctcaacaagccccggtgattcttagaactctagtctgaaaaaaaaaaaaagsccctgtgagataggtcttatcagcatgttgattttacacataaggacaactagggctaagagacttagagctcatttgaggtgccacagaaacagaactcactaggccggactcctgtataggagcaggcgctatgtaagaagtgttggttctctaacttcatcaacagtaaaaggtgggtgccagtacctctagrggacagagtacaggatagtatagtgtcaagagcatcaggctgaagtctgggtttgaatcctggctttgccacttattgactctgtgactctggagaaggtacttgaccactctgcatctccctctccataaaatagggacaataataacacctgccttactaaggttgttgtgaggattatgtaagttgctatgaatagtttcaaatagttactgtggaagtgctgaatggtagtccccttacctctaggggatgcattcaagatcccagtggatgcctgaaaccatggagagtactgaaccctatgtatactgtattatttttttgtgtgtacatttataactgtggtaaagtttagtataattattaggcatggtaagagataacgataactgataataaaatagaacaattataagaatattccagcatcactacgcttgcactttggggccattattaagtaaaatagggttacttcaacacaaccactgccataccacaacagccaatccaatagctgagacagcttctaggtgactaagcggccgattctatatacagaatggacacactggacatagcgatgactcacatcctgggcaggatggaacaggatggtgtgagattttatcatgctactcagaatggcatgcaatttcaaacttatggattgttgatttctggaattttctattcaatattttcagactctagttgactgtgggtaactaaaaccatgcagaaagtggataaggagggactactgtatacatattgttgctgctgctgtttctattattattattatcaatagtgttgttatttttgtcttaaaaaatatatccctgaaagtagagtgccttcactgaaagaagtggttgtggatggaatcagggacaggggaggtggaaggaccagcccctgtggcaggtcagatgggaggatgttcttagacatgccactcggtacccttgaaatcctactttggtgtgggccatatccacttttggtaaactcatttgccccaaatgaagcagcttttgaagatcaaacaagaaaactggattctttgagtatatccagcttgagtacttccatgttcaaaatgcctttctttcctgtctacagattcacctctaggagagaaggaaagaagtttggagacttcctttggttctagcaggtcttatcagagtctcagtgtagactgaagaggagtgattgctatactgtaaatgctttagagggtctgaaagagattagagaaacctattccagaggataaaggcaggacaagagggagccattaatctcatggacattacattccctaagaactttttttgggaatggccagaagcatgccaggccatgtgctgtccatttgcaattctctgagctgtggagttgtgtgtgtgtgtgtgtgtgtgtgtgtgtgtgagatagattgaggccaatgtcattgcctcatttacaatggttcttaaacttgaactgaaaggttgacacatgcatgcagagtcaatgcagattattcgactgaagtagtcctgacaaataccagggctctccacattgtcaggaacagtctgatgatgacacgttcgaagctccgcagactggcttgcatcttagtaaatgtgtacaatcaggggagacatagctatgccgtggagagttctgagatgtgaagagaacaagttaattgttcagcctcaactgagacctttcactcaagtcattaatcacagtgcacagtctggagtcttggctctgaagttcgattctttaggctgctttcctgctccagatgaaagctcattccaggtgctggccatttgtgttttcctccaactaggctgatttatggacctggagatgttttctggtttttccaaattctgttccattactttgtaataaggggggacatgtgatttctggctttttgcagatcctcagttttaacatccctaataccaaagatttttaaaattagtctgtggtctgctttctgtgatctggagaatagaaatgctgttctgtattttgagtatcaaagttaagactttagggactcatttctttccccttgagctggagttgaagttgcaagggatgggcaggaaactgtgttcctgccttcaacatcccaatgcaaattaaggcttgggaagccctagtgacagcaactgactgcaggtgttggagatatccccgtcccacccraatacatatggctcagggtataatattaaaggacttccacacttgggctaggtctctggtgacagtgtaagccaatattgaagatttcaaaggagaatctgagtgtcaaaggaggacattgtgatatggaggctgaacagggtgctgccaagtgttagctgtttgactgaaaggtaaaccagatctgagttgatatggggcaacagatcccttgggagttttcccaggaggatagaaatgtgtcacagcaaagtaattggaaattgatatttggcatatctctgggttactttttattccagataataccaagagtcacttggtattggccaagagtcattagtgacttatacatcaaatcccataacccattgctgaaatacaatcttctgttcgttgacagtagccagctgcttcctggtcctctgcttcctaactagtactttatgttaaaggcccatggccctgatttaggtgaaatgagtggtaaaaatagcaattcaatcttataaaaaacctgtctatacttttaaaaaattgatatataatcattgtacatatctatgcggtgcatgtggtattttgatacacgcatataatgtgtaattattaaaccagggtatttgtgatatttatcacctccaacatttatcatttctgcgtgttaggaacatttcaaatcttctagctgttttgagatataaaataaattatttttaactatagtcataattgtgctgtcgaacatgatgtcttctatctaactaaatgtttgtgcccgtaaccagcctctcttcatccccctgcactgcaccaattctaccttttgataattctctgaaacgaaattttcactggcagtgctgtccttmaaattcaactcaactcaacaggtacttgttcagagcctcctatgggctttatattgtgttgtgtgccctgggacctataaaataagtatcaaacatgacctttgcccttgaaaagcttatgagctcataggaaggatgatgtgtttatgaaacacattttacatggcaagataagctatcgtgtatgtgccaaagtgactagaatcgggaataagtgcaacagagagtcagaaaaatgagagtaggttgtactggaactgtcagagaagctcttatggatgaggtgggacaaagacacaaatatcctaaacccagaactctcygttaaagaaattgtaagaagcacagcatcaggttaccaagaaattatggagcccttttaagtgaaagtaatttgttcaatatgagaatggattaatttagttccataaatatttattgagtacatgcaatgtgccaacaactatacctgatgtgatcaaggaagaataatgagtacaaaggacacgtgtgtgttattctcagatgctaacttctctcacataggtatttaaagttattgctggtctgttgattccaaagtctgtgatttttatcatttaccattcaacctctcaaaaagactttgtcatccaagatatatttggttgaggggctgagtctaattttttgtgtggtggaaaaatggcatgtctaactgcataagttgtatgaagtgtaaagagttgcatgcatgccgattgtgaaagaaagggacgttgaattagcattgaatgtgggcccaaattattgggttagggagtatttggagtagcattagaaaagcctgaacctggcccacattcagggctataagtgaagcccaagttctctatagatcaagcttttcttggaacttgtattgttccccttgacagctgatttggaaacccaattagaagggcctcccatcattagaggtgaggcagtcttgcactgagctttgttatttgagaagtttaaaattggctacacccagatatattggataactcactaaaatctagaattgatctgtattcctccttgtaaaataaggaaagccattatgtgttcatttctttgaggacaggtataactggacaattgcaaagtgttttagaaagaaaacaatgtcaggatgatagtggtggtagtggtcatcgtcatggagatggtagttattattccaaatatccagataattttaaaataatataaccatagaacgctagtaaatgctagaaagaatctaagatatcaggcatggaggcacagaggtgtcaaagtttatttagcgaagcaataccagaagagaactagaaaatcctgcttcctagctggctgtcatttgcatacaacaatgagacccctgcttagtaacccctgtgtttctgccacccatgtgactgctttctgaagctaatttagttatcaaataaaaaatggaattttgagaaaaccgtatttttttttaaactggagggattggtggaaggaaaagcaagaagaaatttggaatcttggttcctgacattttccttaatgttcaattactctcttcattggaaagcttcgtcttggcctctatgggtgacacatccacttgtggtcactcactcctatgtatgcgtgtacatctgttgatatgcattcctcttcatcatctgtaggcattttacaaataatggcttgtgtgtgcgtgtgttttttatcatcttatgtttttaaatgaaaatgacaacttgaaaattctttgcagaaataattcttctatggtaaaggaatttcagcgtgtcttccagggtcatctttgggtcacataatttcatggaggagttggcagtgggtgggagggatataaacaatgactttggaatttttatctttccatcctgtggcaggtgggcaatgttggtaacaaagaaagttggttggtggagaactaggaaaatatagtcaaataagaaaggtacaacaagatgtgagtgcaaaccaaaaaattggcaagtgcaaaacaaaaaattggcaaggcatagaaagagagaagaggaggcatggatacttttcccctctcttccaaccctgctcctctgtgaagccattgctgaggtgggggtgcgatcaggagagtatataaaggagcttggacttygcagttgtaactcttgtttttgatgaaactgttttggaagctttcttcttgaatagagctgggggatctgagtgggactcagaagagaggagaaaggccatttggaactcgatccagattctgggtttaaagatgagaaagtattacagggtttccataaaccacggagttcaggttggcagcatggaaatctgatccagtttttactcaccaaactatgtgtgtggaggtacacatcagaggggtacctttttcatatttatccaaagcactgtgtagaagagactagtccctggatgggggaattttaaacttccttctaagttttccaatcctatctgcatatttttagagccggagtttctaagcaaggcactctatattgtttgttctcttgggtagttaagcacagacagcagggaagcatggtggctcacagagtgaactagctgcagagaccaacttatccaatgaacaaagtaggtgtaaaatgaaaatgactaaaggggtccttgatttcactctcttgagaagtcagccacaaagccaagtgcctagagacccacatttccagcttctctcgtctccagtctccctttaggaaggctgtgagcaaacctggccttcgtggttctttcttccgtctgtaaactccctgtaattattatgcagttccttatrctaggtaccatgggastgtgaggcctccggaagaaactcttgactttgaggagcttggaggccattgtgaaaacaggaaagacaagcacaatcctggtaaatgaagtgtgtacaaagcctgtttgacaacaaagtcctctctagaggaccttgaaaaatcagagaccgccatcccatatggagaggtccttccaccctcacctcaggggctgtttttctctcactgaagaatgaaaatggtaaatggcctcaagcaagctaaaagcagatccctcagctttattcatttcctgrctgcaatacttggtggtagtattagaaaaggctctggcagtcctcgtaggagaaatgccagtaatgaggcaatggaacgttcattcacctgctttatgttcttttggaaataacatgatttataaaagaatacagaatcataattgtcagccaagatgtcattttaaccttaggatgtccagaaacaaagggatattacatcctttgttcttggagcaccactggtgtcaaattatgcacagcgtttcctcttggcattaagtgcttgtgagcctaacagcaaccaaacactgacttcagaaagatgatgtttctgatggttttctcacctgaatatctccttggtactatgggagagagcatgggcctcctagcttccctgcattctgatagagcaggagccaggaggcatggcagtcttagaaatggctaagggttggggtacactgtctttggcctctatcagaggagctgaacaagagtcccattaaaatgctggtgaaataattcataaccttgattttatctgcacatcaacatatgccaacagatgctcagtgcaaaacatgaatatttgattaatataaaatcaggcatctagagcagagagcgtggaatgttgggggttgagtaggacttacatgttatccatctaatcgcagctgtctggatgcacatagtaggcattggaaatatccataattatattttcattgatttgaataactctgttgcttggttttgagcccagatgtttggcgtcccgctggaactgtgtgctctgcctcctgtcatcagtctcatcagcacacagatgttcggcaagggacagcattcctctagtcttcattgtgaggcctcttctctgttctcccagcccatccactmgggctcctgtgacagtcagccacagaacacactgcaggtcacccatggagctaggtgcagaaactgtccaccacaccattttgtcattgtggttttatccaaaggcagagaacattggagcctcagctaacagaccagactaatgctggtaacaagtacttgagtggttatttcatcattcattccattggtcattgaaaaaatattgagtaaaggcttattagtccacagcacttccctgaaacctgaagaagacataggagaagacccttggtaggagatggagaaggttgcactgtgagtgagaatatgagacattcattaacttctagggaatgataagactggttacattagtgctgatgacattcacagcagaggggaggggaagctagttggtagagtggatagatagtacactagatccaagtctgtatcttgaatctctctcataacaccagcgtgtggctgtaaacccaggcctccggtttcctctgtaaaataaaggagatgcactaagatgctttctatgcctttcagtactatccttcagtttgctctgatcaagaattgaagagatccccatattcccgtggtttaattttccctgaagaccttggactgaccactttcgtaagtaatcaggtagacttctaatagtcaaaggacacatgaatgaaaggtagtgaaagaaggcatacactgatgccttaatatcttggttagaatagcggcttttgaaagtctatgaaaatcaattttggataataatagaaaaattcgttaaggctgggagtagagctttgcttcaaagtgaaatagcagcaagttttacctttgctcatgtaccatcattcttgaattagttattaatctcaggaccaagagcaacttgttgcccttggatcggtccagtggcatttctttttcttttgtttttttttatttttttgagacgcagtttcgctcttgttgcccaggctggagtgcaatcacacgatcttggctcatcgcaacctcccgggttcaagtgattctcctgcctcagcctcctgagtagctgggattacaggcatgtgctaccatgcctagctaattttgtatttttaggagagacggggtttctccatgttggtcaggctggtcttgaactcctgacctcaggtggtctgcctgcctcggcctcccaaagtgctgggattacaggtgtgagccaccatgcccagccctagtggcatttctgacttccttggttcacatggtcttggtatgacagccctatgaatgggtacctgaggagctctgctgccagtgttcaaggtggcttctctttagctcatctaagatacaggggctatatctttaaaaagtagagacaggatgattaatctgtagttggacagattaattgtggcttccaatctcttcagaccctgtgtaggcagatcaagtaacttacctacataaaaggcaaagcacagaagtcatgaacattctcacttctgtgtagtactatatagcttcctgaaaggtttataacaatttctaaccaacttgtttaatccccacagttctgtgaagtcagtattatattcttacattgtaagtgaggatattgaggtacaaatgtatttgtggggttggaaatttctcacaggacatatttggtggatgctgggaagagctactctcctgaaactccaaaaccccctccctccctcacctgctacagttgaactttttctgtaagttaagacatttctgattctgggtactcttttaaaatgcagatacccctggaagagaggtcagaccaaatttcttattgcttaaataattgcctgaataatgttttacaatcattttcatctaagatagttgaggacagcatgctaacatattaaaatcaggattaaatgggctgggtgtggtggcttatgcctgtaatctgagcactttgggaggctgaggcaggtggatcgctggacgtcaggagttcaagaccagcctgggcaacaaggtgaaaccccgtctctactgaaaatataaaaattagttggatgctgtgttgtgtgcctgtagtcccagctactcaggaggctgaggcaggagagctgcttgagcctgggaggcggtggttgcagtgagtcgagattgcaccattgcactccagcctggatgacagagcgagactgtctcaaaaaaaaaaaagaaaagaaaaatcaggattaaatgaagggggaccaggatagatttgggtttggggagcttgtttaggagtagctatctgataggggtataacaatggtgaccccaggactccagttctgaatgaaggaagtccccatctaagggatagtatgggacacggagcaagaagataatggaaacagagcaactctttatatttcagacttggttggcttatttgtgctggatcgacccctggtgagtgggcaggattgtgatggatggggtcaagcttatctaccattacatgccaagtacctggcttagggcattgatccattttatatactctcttattttgctaactacttaaggcagaaaaatcattcccctattctactccaatatgtgccagttgaaagtgaaatcctcacactgagcaaatgcaccaaagaacactatataaacttaatgagggagatgaagagatatgtgccagaaacctagaaaatttaacactgatgaggttatgactattatatgtttagttaaattgttgacactgacaggacgtggctgaggaaatctaccatccattttctccttgtaccagtgataatggttccttggtgtgctcttctcagttaacaaaaatattcccaaaagttaaatgcagggagaagaagtgacataagaagtacttttattatctctgttcttctgggagttccctccagaaacattatttaaagcagtacttctcccgactggcaaatgagtttgaagggaaggactcacgagttcagaggggaccggagaggctcctaaccctgtgcttgaaggcttgctccagcaaacccacataacacgacactgccatagcctctcaaaaacacctttctcttccattttcttcctttcaaaaactgacaaaggttatccacgggctagtgaataaaatctcaattcctttagctgacattcaaggcacaaatgtgatcgtgatttttgtaaggtgtcaagtgctgtataaacaggtggtggagagagtattgaatttgaagtcagaacactttggtttcaatcttgttaactgggtgaccttgggccagtcacttgatcactctgaatctcagttccttcacttataaaataggattatttcaatagttaaattaattgaaagtaacatagtacttagcaaagagtgaacattcaatacccattaaggaagagatggttaccagaggcaatttattctagcatttaagaacattcactatggagacaaaaattagtaatcttttttatttatttatttttgttttagattcagggggtacatgtgcttgtttgtacccccctggtggggttgggcttcaaatgtacctatcatccaaatattgaacattgcacccaaaggttaatttttcaacccttaccctccttccaccctcccgccttttagagcaatctttcttttgtctttgatttctacctagaaaatgggggtaagttggaagacttagatgagttaatacatatcaggaactttcaatagtgcttggcctatattgatccttctataagtattaagtcttttcttgctactgttgttgcttttattgaatgacctgtcctaatcttatttttcctgacttatctgattttctattttaccagcagacagagctcctccacaaagtcatgatatcattagggtggggattaattcctacctttaacttccatgagctttactcaatgcctgcaaaatactcaatcatttttgttattaaaaagtgtacaaatgtgcttgctaacatcgacctagcattgtgctagaggtttcagcctgtggagtaaggaaagaaagaaagaaagaaagaaagaaagaaagaaagaaagaaagaaagaaagaaagaaaggaaggagggagggagggagggagggagggagggaaggaagagaaagaaagaaagaaagaaagaaagaaagaaagaaagaaggaaggaaggaaggaaggaaaggaaggaaggaaggaaggaagggagkaagggaggaaggaaaaagaaaagaaaagaaaagaaaaaagaagcatccagattggaaaggaagaagtaaaactgtctttatttgcagatgaaattatcatctctatagaaaattcagtggaatgtacataaagctgttagaagcaacaggagaatttagcaagttacgggatgcaagattaatatgcaagtcaattgttttagttccttaaacttaagacagccacaagtagaccagtttaactggagcataggatgagtgaggggtagtgtggtatgtaaaattagaaaggcagatctagataacatggaatacttttgcttactctttctctgccttccttcattccttttcccctcccccacctcctttctttctttttcctttctagtttcttggtataacaacctttttccataaaagaagggtagaacttctttcttaaaggcgaagttatttattctttgggttaagtcaaacaaaatgaccgtaactacgttgttttgagcttacagttaatgttctgttatatataaaatgttcccaaagacaaggagtgaaatgtcagcaagcaatcactggaacatagggtatcaggattcaagttctgatttcctcttaactagctctaataactttgggaagatcacttcaccttttaaggcccagtttgctttgtcttaaaaaagggataatgattgcatgatttccatatttatagggttgttgatggcttactccaacaaaatttttctagttcttagaaactctaagagctggagatagggaatcactcccctcagggaatatttagtgaaaatatgtgtagaactaactccagtggcataggataggctattcagagtagtatacataagggcctaggagagtgcaaagaagggattaattaactctgcttgtggggttgggaaaaatttcgctgagttgatatctaaagccaagctcacagcttaagtgagatttttgacagagaaagggacaactttaacatgataatgggaataatatcttttgtttgtttagcactttaccattttacttgacataaattagagtgatctaaaaactatatrgacgttagggattattattgctatcctaggggtggttattactttaaactacttgtttgataaggctggggaaattttgaccccaaattgtaacaatttagaaaagtttatgtaaaatttccagggaatttttccatgttgggggaaccaggagccttaggagcttggtggggtgtcaaggattaggggaggggcatgggaagagggaaaaaggatattaattaaatctttgcaaaaagatggctcattttgtaattatggcataacttgctgagtaaagatgcaataatatgaaaacctggatgtttaacttttttccccataagttattggggtacaggtggtatttggtacatgagtaagtcctttagtggtgatttgtgagattttggtgcacccatcacccatgtatacactgcaccacatttgtagtcttttatccctcaccctcctcccatccttccccccaagtccccaaagtccattgtattattcttatacctttgcatcttcatagcttagctcccgtatatcagtgagaacatacaatgtttggttttccattcctgagttacatcacttagaataatagtctccaatctcatccaggtcactgcaaatgctgttaattcattcctttttatggctgcatagtattccatcgtatatatatacacacacacacacatatatatatatatatatatatacacacacacacatacacaccacagtttctttatccactcattgactggtggacttttgggttggttccacaattttgaaattgtgaattgtgctcctgtaaacatgcatgtgcatgtcttcaaataatgacttcttttcctgtggctagatacccagtagtggggttgctggatcaaatggtagttctacttttagttctttaaggaatctccacactgtttttcatagtggctgtactagtttacatttccacccgcagtgtagaagtgttccctgttcactgcatccattccaacatctactgttttttgatttttttattatggccattcttgcaaaagtaaggtggtattgcattgtggttttgatttgcatctccctaatcattagtaatgttgagcatttgttcatatgtttgttggccatttgtatatcttcttttgagamttgtctatttatgtccttagcccactttttgcttggattgtttttttcttactgatttgtttgagttcgttgtagattctggatattagtcctttgtcagatgtatagattgtgaagattttctcccgctctgcgggttgtctgtttactctgctgactgttccttttgctgtgcaaaagctctttagtttagttaggtctcagctatttatctttgtttttattgcatttgcttttgggttcttggtcatraaatccttgcctaagtcaatgtctagaagggtttttccaatgttatcttctagaatttttatagtttcaggtcttaggtttaagtccttaatccatcttgagttgatttttgtataaggtaagagatgaggatacagttctcctacatgtggctagccagttatcccagcaccatttgttgaaaagggtgtcctttccccactttatgtttttgtttactttgttgaagatcagttggctgtaagtatttgggtttatttctgggctctctattctgttccattggtctgagtgcctatttttataccagtaccacgctgttttgatgactatggccttatactatagtttgaaaacaggtagtgtgatgcccccagatttgttcttttgacttagacttgctttggctatgcagactcttttttggttccataagcattttagaattgttttttctaattctgtgaagaatgatggtggtattctgatggggattgtgttgaatttgtagatttcttttggcagtatggtcattttcacaatattgattctacccatccatgagcatgggatgtgtttccatttgtttgtgtctatgtttagaaatctgtgatttctttcagcagtgttttgtagttttccttgtagaggtctttcaactcctttgttaggtgtattcctaagtattttatttttattgcagctattgtaaaagaggttgagttcttgatttgattcttggcttgcttgctgttggtgtatagaagagctattgatttatgtacattaatcttgtatccagaaactttgctgaattattttatcagttctacaagttttctggaggagtccttagggttttcaaggtaaatgattgtatcgtcagcaaacagtgacagtttgacttcctctttaccgatttggatgccctttatttctttctcttgtctgattgctctggctaggacttccagtactatgttgaagaggagcagtgagaatgggcatccttgtcttgttccagttctcagagggaatgctttcaacttttccttattcagtattatgttggctgtcagtttgtcatagatggcttttattacattaaggtatgtcycttgtgtgcccattttgctaagagttttaatcataaagcgatgctgggttttgttgagtgctttttctgcatctgttaagatgatcatgtgatttttgtttttaattctgtttatgtggggtatcacatttattgacttgyrtatgttaaaccatccctgcatccctggtatgaaatctacttgatcatagtggattttcttcttggtatgttgttggatttcgctagctagtattttgttaactattttagcatctatgttcatcaaggatatcaatctgtagttttcttttttggctatgtgctttcctggttttggtattagggtgatgctggattcatagaatgaatttgagagggttccttctttctctatcttgtggaatagtgtcaaaaggattggtactaactcttatttgaatgtctggtagaattctgttgtgaacctgtctggtcctggactttttgttgttgttgttgttgttttaatttttttaatttttaattttttttttgaggtggagttttgctcttgttgccctggctggagtgcaatggcatgatctcagctcacygtaacctctgcctcccaggttcaagtgactctcctgcctcagcctcgcaagtagctgggattacaggcatgtgccaccatgcccggctaattttgtatttttattagagatggggtttctccatgttcatcaggctggtcttgaactccagacctcaggtgatccacctgccccgatcttaggtgatccacctgcctcggcctcccaaagtgctgggattacaggtgtgagccaccgcgcctggctggtaatttttaaatgaccatttcaatcttgctgcttgttatttgtctgttcagggtatctaattcttcctgatttaagctaagagtgttgtatttttccaggaatttatccatctcttgtaggttttcctttatgtacataaaggtgttcatagtagccttgaatgatcttttgtatttcagtggtctcagttgtaatatctcctttttcatttcttagtgaggttatttggatcttctgtcttcttttcttggttaatcttgttaatggtctatcaattttatttttcttctcaaagaacctgccttttgtttcatttatcttttgtattatttttgtttcaatttcatttacttctgctgcgatcttggttatttcttttcttctgctggatttggatttggtttgttcttgtttctctagttttttgaggtgttactgtaaattgttcttctgtgctctttcagactttttgatgtaggcgtttagggctgtgaactttccttttagcactgcctttgctgtatcccagaggtttcaataggttgtgtcactattgtcattcagtttgaagcatttttttaatttccattttgatttcgtttttgacccaatgttcattcaggagcaggttatttaatttccatgtatttgcatggttttgaagattccttttggatttgatttccagttttattccactgtggtctgagagagtacttgatataatttcaattttcttaaatgtattgaggctcgttttatggtctgtcatatggtctatcttggagaaagttccatgcattgttgaatagaatgcgtattgtgtggttgttgggtgaaatgttttgtatatatttgttgagtccatttgttccaaggtatagtttaaattcattgtttctttgttgactttctgtcttgatgacctgtctagtgctgtcagtggagtattgaagtctcccactattattgtgttgctgtctatctcatttcttaggtctattagtaattgttttataaatttgggagctccagtgttaggtgcatgtatgtttaggattgtgatattttcctgttggacaaggtctttaccattatatactgttcctctttgtctcttttaatgctgttgctttatagtttgttttgtctgatataagaatagctacccctacttgtttttggtgtccgtttgcatgaaatgcctttttccactccttcactttaagtttatgtgagttcttatgtgttgggtgagtctcctgaaggcagcagatagttggttgctgggttcttatccattctgctgttctgtatcttttaagtggagcatttagrccatttacattcaatgttagtattgaaatgtgaggtgctgttgcttttatcatgctctttgttgcccatgtacttggttttttgtttttgctttttaacttgtatttttgttttataggtcctgtgtgatttatgctttaaagaagttctgttttgatgtgcttccaggatttggttcaagattttgagctccttttatcagttcttgttgtggtagtttggtaatggtgagttctctcagcatttgtttgaaaacaactgtatctttccttcatatatgatgcttagtttcactagatacaaaattcttgcctgataattgttttgtttgaggagcctgaagataggtccccaatcccttctagcttgtagggtttctgctgagaaatctgctgttaatctgataggttttcctttataggttacctggtgcttctgtctcatagctcttaagattctttccttcatcttaaatttggataacctgatgacaatgttcttaggcagagatctttttgtgattaatttcccaggtgttcttttgcttcttgtatttggctgtctaggtctcttgcaaggccgggagagtttgctttgattattcccctaaatctgttttccagggaaaacctggacatttaaatgctagtttaacatggagcagaggactccatttttgtaaaatgctgcaacctgggaatttcctttcataattttgatagacatatggcacttctggttgagaactgggcctatagcagtggcttaacttaagggttccatagatccttgccttggttcaacatatcccatctacgagatgacaaatgtttgattgaagaagtattgaagagtatttggaaatgtagacaaataacagtatctggagcttgcagcacagtgggaaatggagccaagactgtacctataatttagggtaaggagcaataatgaggtcccataaaaataaaaaaccatgatgttaaatagactgcagatcatttgcaccttgaggcttttcttagattttatgccagcaaaaaaaagtagtaatagggcttgtgctttatgccaaaagaattcctcgtacacaagattttatttgctttagtgtaatcaaagagaccctccccctaaaattatataagggtaaaaaaaaacaaaacaaacaaacaaaaaacccatccagctataaagagctgccagcctgggtttggagcatggctttaatcctctgtgcctggggtcatattgtttttatcttgcttttgactctatttcaaagctgatgttgctatctacaaaccttacctaacagctataattatttcatttgtattcactatgaagtcctttccaatcatgttagagaaatggattccagtgtttgcaagtgaccccttatcctgtcttttaaagaaaatagcatatattgtaggctccccttatctgcatttttgctttccacagtttcagttacccacgatcaactgcagtccaaaaataagatattttgtgagagagagaaagactatattcgtataacttttattatagtatattgttatcattgttctattttattattattattgtaaatctcttaccgtgcctaatttataaattaaacttaacataggtctgaatgtataggaaaaacatagtatacatactatatatagtaagtggagagcacaccaaatgtatatcattttygtactgtagtaaatttgaaaaattgtaggtcaacccattataagttgaggatggaaggtctgtctatagggttcagtattacatgtggtttcaggcatccaytagtggtcctgatgtgtcctctacagacaaagggggactactgtaagtttgtaaaaccactgaacaaggagtttcaaatgtgataaaatattaaaatgggactcttcaagttcagctgaagccacaattaataggaatcaactggtcgcacattccaagatgagatgctagatcaccccagcaggacctgcaagagttctaaaatttggatcgtgtcattgcctgagctttcagacattagataagtcaagtcagatttgatccttagttttttcctttgtcaagtgggaacagttattgctacccagtgaccttgtagggatgtgtcaattgagatgctggacctgaagatgccatgaaaattcgaggtagtggttctctttctccttcttgcagtggggttttgggtcacaaaatgacaggattgtcctcagatactttatagaaagccattggtgctgttaacacagtatgagtttagtgtttcattttggagtcaaacacactttatttttttttctcacaactgcttctgtgaatctacttgcagggctagatcttctgccctggaatcatatcctagctagtgctcagagcctgccactcactctttggtagtaataactcctctcattggttacctgagtttccaaacagtgttggttatgctataaataagtatagtctagggtaataatcaaaactctgaaattcatccatgggtaatgcatcttctggcaccatcaagagcttgctacagggggagaagtgggctgagtaacttctttctcctttattcttccatatgctaggtgagttggataggggaagagaagagaagtaggagccaggatcaaatttgcttggctggtcccaacctggtattgatttgcttttctactggcagatgcttaagactggcctttcttctctgaaagctgtttcatgatttggacgcttatcactagggtcctcttttttgtgggtgattctcttttgatgataaatgaatcatctagggacttctctctgctgaggtctccttgcctctaacaaggcaaggtccaagactagctcagggtgctttgtcttgtacttggcacttacctcctccctggaaatatggatctttgacctaaaagtgttgtatagttatgtccccaaattgaatctgttttgtttagccacctagtgagcagctttagccatagtctttctttcactcattaactttcttagacttatgtaagatgggtatcagttcactgtgacccttaaaatgcaggggcacctaccaagccatctgagtacactaccaaagtccctctcatttgctagaaataaagggagtaccatagccctgatacttttccactggagggaagcattgcaagtacacttgaaaattctctttgaagaaatccttgccgggcacagtggctcacacctgtaatcccagcactttgggaggctgagyggggcagatcatctgagatcaggagtttgagaccagcttggccaacatggtgaaaccccatctctactaaaaatacaaaaattagccaggcatggtggcaggtgcctgaaataccagctacttgggaggctgaggcaggagaatcacttgaaccgaggaggcagaggaatgcagtgagccgagatcacatcattgcactccagcctgggtgacagagacagacttcatctcaaaaataaaataaaataaaaaataaaataaaataaaaaataaaataaaataaaaagaaatccttaattcccaattctaagctcctctgatagtatattcagcatcttttttatgctatgcmgagatgtactcagctaaggggtgcagacctgggtcttagacatctcctttgcaggtcctgctggggtgatacagtacctcatcttgcaatatgggaccagttgattcctattattttgtggcttcagctgaacttgaagggtcccattttaacattgtgttatatttatatcagcttaccccaaactgtagtctatggaacactgcttcagaaaagggttccattttttttaaaaagggtccttatcaagtgtatttgggaaatatatgtaagatttccagctcttcaggtgctcattgcatataagcctatcgaagaccatgtggaatctagcatgaggagtggtgtttgaccctttccaaacccagtgtttctcaaatatatttaaccacacaatttattaacatggtgtctctttgtttgcattttgggagatgctgctgtagatggttgctggtgatgcttccattgggtttagctaagaatgtccatacattcttccaaagttttcctaaataaaaaagcttaattccttcttagtagaaatgggctcattttaagatgagtatctgttttggaaatagtccatcagcattggckatgtgaggaaaaaaagagtaatgagtaggcttgttgccttgcttattgcaaacagcaaaaaataaaagataagattataataatatttatatgtatcatagtaatattgattattatgatacaactcattataataggagtttgtagtatcctggtattctgtctggactttgagagcttagcttcaatgaactataaagggaaagtcatagttaattattctcacctggacaagatattgttatctcctgtgttttttaagtcactaccatcagttgcattggttttgagtcttcccaaatgtgtctacctttgggaaggcccaattggccagttcctagacagtttttttttmtgtacacagctcattttcacatatggatcataacttcccaggctatcctagcatagcctatcccatctatcccctcattgtgtttcaatgataagatgatgggctttatagttcttttctgtttcaaactttgcaagtatttattctgaataacattagagtctcactagcatgaaaaactgtcctggtttgcctgggactgtcctggctttagtactcagagtcccacattctggaatcctctctccaaaatgcaaaatgtcttggttttcaatagtggatggcaaagcttggaaaaatacaaagcccatatgtcagcccaaaatataggtgctgaaagcaatgctgttttagtgtcaaataggtacagcatagattatctatcttccatagttattgttactattcacccctcccatgttgacaatcatgatttgcagttcacactaacggatcattcattattgtttcactccaattgatgaaactcaagtgtacaccataactacattgtaagttgagtgttaaaagtccatctgtctttgactttgtctttatattaacttgttgtgctttgtatcaagataatgccagtttaatttttaactttatgaatattgtgaccatattctctaagagttcagatagtgaaaatgaagatgattattataccaatgccagcatcctagaaaaagaaggttagatggttgctattttaatggcagatgaaaggactcatacgtctggattgggcagataaataatcaaaacagagcatactgcacaagatgcagaaaagaagatataaaagtgcatagggagactgaatcccacaattttggcatgaggtagacaagtacttctgagtcaatcaraagtttcttgtctcccaagaagacaccaacgctcagttgaatatagcagccactgaattatcttgagtatacgacacaaataagcagcgtcattgcattattcccttgattgctttctgaaactgattaaaattatatttcctgattcacaggttgcagttaaagtgccctaggcatgaacagcaggggaagttttgggtaacatgtgctggccctctatgtagcagagttaattctgttagatttgaacaacaactctagtatatcaagaaattcttgaatcatggcaataagataatgttccctttagctctttagtacttgaacttgataaatggagattcagaatgtcttttggatttttataaagattttaatgaaactgtagaaacataaaacaaaagattactgataacttgtctaaaaacaagctagatttagctcatctatctgcatgtgtggcaggcagtgcaaatgtaaattttggtaaacttcattcagtgtgtaaatttcttaacaaagaaaagaaaaagatttcaactgctaaaagttcagtatactttttctgcaaggatgctaaaaaaaatgggatttgcttacctgtgatattgaggctttttctaaaactctctgatgatctttgaagaagccataaggagcctagaaaaggacaactgactatacccaagttgttggatgttatgtgtaggatgtgacagaaactcatacagaaaaaaaggacttatgttttggaaataagcctgtttcaaatgaaaaaaaaaatatgttaccagaggactgccaggttaggccaatctttctcagtttttcaatttctttaataaaactgtcacttacttggaatctggctttgatttcacaagtttgaattacttctgtgctttaaaaccattttacctgccaaagaaaagttttgcttatgatgacatccaaaatgcttcgtagtgttttaaaaatgatcaacatattggacatggataacctatatgactagtttatagatgcagtggatctgactgacaaactgctggtccatcaaagcaggcatgtggatacaaagtggatgaacatttttggagagctagaaattaatccctacaagtcttaaatcctgatgttactagtaagtaaacttctaagtgttccatgctgaattttttttttttttttcggggggagaggatatttgacttggtggagtcataccaatacagtgtaaagtgggcttgataaagagcatagtctaaagttaaatcaagttttacatttgactatattcatttagttttaacactacagaaaagaatagaagtgtgttgtaatggttgaaagcagtttaaagaactattactggaaaaggaaacagagagtaagaatatcctgctgtatcatgctgtatcacaggacagatggaaacgtgtcatagtttttggkttttttttaatagacatgagggtacaagtacattattattacatggttttattgaatagtgatgaagagtgggcttttagtgtaaccaacacccaaatagtgtatatcattcccaataggtaatttctcatcccttacccctcagccacccctccaccttttggagcctccagtgtctattattccattttgtatatctatgygtatacattatttagctcccacttatgagtgaaaacatgcagcatttgacattctgagttatttaactttagataatggcatctagtttcacccgtgttgctgcagaaaacataatttcattcattttagggctaagtagtattccataatatatacatatatatcatgcctctctatctacctatctatacatacatacaaacatacacacacactactatagatacacacacacagcacattttctttatccagtcatctgtggatggacacctagattgattttataactttactattgtgaatagtactgtgataaacatacaagtgcaggcaactttttaatataattttttttcctttgggtagatatgcaggagtggaattgctggatttaatggtagttctatttttaattctttaagaaatagccatactattttccataaaggttgtactttcattcccaccagtagggtataagcattcacattcctgtttctccacattcttgccaacatctgttgtattttgactttttaataatagccattctgactggtatatgatggcatctcattgtggttttaatttacatttctctgatggttagtaatgttgagcattttttcaaatgtttgttgggcacttgtatgtctttttttttttttttttttttttttttttttttgagacgtagtctcgctctgttgcccaggctggagtgcaatggcgcgatctccgctcactggaagctccaccacctgggttcacaccattctcctgcctcagcctcctgagtagctgggactacaagtgcctgccaccacacctggctaattttttgtatgtttagtagagacagggtttcaccgtgttagccaatatggtctcaatctcctgacctcatgatctgcccacctcggcctcccaaagtgctgggattacaggtgtgagccaccacacccagccgtatgtcttcttttgagaatgtctgttcatatcctttgcctaccttttaatggggttatttattttgtttttcttgttgagttgtttgagttccttgcagattctggatattagccctttgttggatgcatagtttacagatattttcctccattctgtagattatctgtttactttgttgattatttctttgctatgcagaagctttttaattaaatcccattagtctgtttttgtttttgttgcatttgatttggggctcttagttacaaattctttgcctaggccaatgtcagaagagtttttgctaagttttcttctagggttttaatagtttgaggtctttattccatcttgagttaatttttgtatctggtgagacatatgggtccagtttcattctttcgcatatggctacccaattttcccagcaccatttattaaatatgatgtcctttctccagtatatgttttgtcaactttgttggagatcagttgcttgtagatatgtggcactatgtctgggttttctgttctgttgcattgattgatgtgtctatttttataccaatatcagactgttttggtttcaattgttttgtagtataatttgaagtcaggtaatgtgatgcctccagcttttttctttttgcttaggattgctttagctattcagtttcttttttggttccatctgaattttaggattattttctctatttctggggaaaataatattggtgattcggattcgataggaattgcattgaatctgaatattcctttgggtagtttggtcattttaacaatatttgactttttaatccatgggcatgggatgttttttctatttgtttgtgtcatctgtgatttttttcatcagtgttttgtagttctttttgttagagatcttttaccttcttggttaaatgtatttctaggtattttacttttttatagctattgtaaatgggattgacttttgtattttgttctgagtttgattatttttggtgtatagaaatgctactgatttttgtaggttgaatttttattctgaaytttactgaagtcagttatcaaatctaggagtcttttggaggagtcgttaaagttttctaggtatcagatcatatcatcagaaaacagagataatttgacttcctctttcccaatttggatgccttttatttatttcttttgcctgattactctagctaggacttccagtactagaataggagtggtgaaagtggcatccttgtttagtcccagttcttagggggaatgctttcaatttctcctcattcagtatgatgatggctgtaagtttgttgtatatgtcttttattattttgaggtatgttccttctatttctagtttgttgagggttttaatcatgaagagatgctgaattttattgactgttttttttctacgtctattgagataatcatatggcttttgtttttatttgtgcttatgtggtgaatcacatttattgatttgcatatgttgcaaatccctggaataaaacccacttgattatgatatattatgtttttgatgtgctacttaattcaatttgctgctattttgttaaggatttttgcatctatgtacatcaggagtattggtgtgtcttttcttttctctctttttctttttttttcttttttttttttttttgagacgatgtcttgctctgtctcccacgctggagtgcagtggcgccattttggctcactgcaacctctgcttccccggttcaaacaattcttctgcctcagtctcccgggtagctggtattacaggcatgcgccaccacgctcagctactttttatatttttagtagagattgggtttcaccatgttggccaggctggtctcagactcctgacctcaggtgatccacccacctcggcctcccaaagtgctgagattacaggcgtgagccactgtgcctggccttctttgtgtgtgtgtgtgtgtgtgtgtgtgtgtgtgtgtgtgtgtccttgcctggctttggtatcagggtgatattggctttatagaatgagttagggaggagtccttcctcctcaattttttggaatactttcactacgattggtgccagttcctagaatgtgtggtagaattctgctgtgaatctgtctggtcgtgggcattttttgtgattgttaggagattttttactactgattcaatctcactacttgttattggtttattcagggtttctattttttcctggttcaattttgggggttatatatttatcratttcctataggttttctaatttgtatgcatagaaatgcccatagtagtcttttatgagcttttgtatttctgtggtttcaattgtaatgtgttctttatcacttctgattgtgcttatttgacttttctctcttttttcttgtttagctagcagtttatcaattttgtttatcttttcaaaaaaacgactttttgttttatcgatactttgtgttgttttttgattttaattttatttcgttctgctctgatctttgttatgtattttcttctgctagctttgggtttggtttgttcttgtttttgtagtttcttgatgcgtgaccttagactgttaatttttgatctatcttttgaatataggcatttaatgccataaactttcctcttagcaccacgtttgctgtattctagaggttttggtttgttgtgtcactgttttcatttgtttcaaaaaattttttaattcttgccttaattttgtcattgatccaaagatcattcagaagcaagttgtttcatttccacatacttgtataattttgagagttyctcttggtatcgacttatagttttattctactgtggtccaataaaatacttggtatgaatttgagtttttaaaacttattgagacttgttttatggcctaaaatgtctattttggagaatattccatgcgtagatgagaagaatgtatattctgtggttgttgggtagaatgttctgtaaatatctgttaggttgatttgatctagagttcaatttaagttcaaagtttctttgttgattttctgcctccatgtcattgttatttttcattatttataggtaatatctgtttctaatgttattttcattttctttttaaaaagtcttatgtttgtgtatcttaagaatatacataatataggccaggcatgatggctcacacctgtaatcccagcactttgggaggccgaggcaggcrgatcacaaggtcaggagatcgagaccatcctggctaacatggtgaaaccccatctctactaaaaatacaaaaaattagtcgggcgtggtggcgggcgcctgtagtctcagctactcaggttgctgaggcaggagaatggtgtaaacccaggaggtggagcttgcagtgagccgagattgcaccactgcactccagcctgggcgacagagcaagactccacttcataaaaaaaaaaaaaaaaaaaaagaggaatatacataatatagcctataaatttaaatatccaataaagtgcttaaaaagtgttaaaacaaattgctttatcagaggacagaaacattactgtaatatttttctcacacatattatttgtttagttagtcctactattaattaatgttaattgccactgttaacaacctatttttatttaaataataaaatgcatgtagctgaaaggtaaatactatagaataataaataatttcaaataaaaccttatttttaacatttttgtgttaaaatactaatgtatgtatgtattagtaattaattattgtaaatttttatctttgcttttttttttttttttttggcttggaatggctgtaccctaggttactctaatggtcaccagggtacttttcccaagcccgtaatgttttaagacaagcaagcaaatctaattctcattaattgcctcttacctggtataagtaacctctcacattggacactgactgtaaaaggagttactattacattatccttatcaattatctgtgacagtggagccagtaattctcaaaacatttgtacgtcatttaggactctttttaaagtaaattacatttactttaaaatgtaatttatttgatatttggtatcttcaattttttgttggtgctaattgaaaaaaggagaattgacaatagtccatatatatcaccaatacctgtacatatctggtaattggctggggactgaaacttcttttaaatccagtagttagaaaatgatgcttatattttcataattgtgccctgtatttaccatctcgcaataatccataagagttttctggtattccaagcccttgtggagtgtccctttcttatcactaactaccctctcctcacatggaagtagacatataccctcatatccggtaagcatctccgtgcttacaaaagaatatcccactcctttagctctttggctcctttcttattcctacctatacttcaaagccccttgaaaatgccctccactttacaaaactttcttcagaccatttttctaacctacactcctgtgtaccacatgccttactactcagctaccatcttgtattgtcctgtgaagtctcatctgttctcttcttggatggattgagaagtagagatcatggcttattcttcccttgtatccacccagaatactagaacaaggctaggcaggttgtaattgttcaaaaaagaccatcaattggtttttataaatgatgagtcctgcaacacatgacatggaagtaggcaaataataatatatcttctcatagaaacgttgtccatcatgtttaacagcacgtgaaagcacattgttgcaatggaaaaataagtgaagacaggaaaaaatgaccatagtaaccctgactcctgggctaagattttagttaataccgtactacttctgggtagagactctagattatttaaaacacatagacacactcacatgcacacattcttacgcacatgtacacacacaagcacacaaagaatgggggtttggccttgacatacttttagaatttgataccagtactttttaacagcatggtctaaagttggaaaaataggaattcagtgtctagttgagttatgagttgagaatgaatttcacaacaaacctcgatgattttccaccaacaacaccaacccaaagacaatcacttggtggccatcgtattgcaaaagaagcagagcacagacatgctgtctgtttcacttaaatttatgagaacctgctgaaagggaatgtagaaagtaaacgacccatggtaaagcattgtgaatgaagggagaggtgctgtggttagctgggttgctcaattcctcagattctcaaagccaggagaaaatttatcctcttccactgagacataaactaaactccttttggccattaatctgcaaagttgatgcctgccatggtaattcatcagacatttttgtggggtgagtctggtggggcctctggggcatctgcctttgaaattcaaagaacagctttgtcccctggggacagagtgactttcttccctcattgcacatctggaaggggagtttctgctcccactctcccccaagccaaggcagggcctgaaagagctgccatcttcatgaagcatgtacttgtacctcacttttctgatcactctacccagactgtcagacgaagagaaggaagagaaatacagccagcacactgtttgtaagtgcctttttcccattacagttcagcacagagaaaggacaattactgtttttagtgggttttataggagccacagtcactgcactaaccattgtgaaaaatgagcagaattctcaagctacatgtctcaatcatctgcacataaattgggcaatggttttggaatcttggggtctaatctgaatttacaagtgtgtctccaggcccagtgacaaatacatgatctgaagacagcgggcattactatgaagaacatagccttgggtgctgggctcatcttttgccccttcagtaacaggcacctgccaatgccttggtctcttagctggaggtttctcctgaaccttccagtccttaagtgaactggccgtgttttctctacaggctcctggtcctctgtcctccagctctgcaccacactccagacacagtggttacctttcagttttttgagtacaccaatgtcttttcttttttttttttttttttttttttttgagacggagtctcgctctgtcgcccaggccggactgcggactgcagtggcgcaatctcggctcactgcaagctccgcttcccgggttcacgccattctcctgcctcagcctcccgagtagctgggactacaggcgcccgccaccacgcccggctaattttttgtatttttagtagagacggggtttcaccttgttagccaggatggtctcgatctcctgacctcatgatccacccgactcggcctcccaaagtgctgggattacaggcgtgagccaccgcgcccggcccaccaatgtcttttctacatagaactatccaccctgactagaaggccctgccgtacaatctttgtgatattggcttcttttgacattgaggtttcagcttgaatgtcatctcctcagagaggtcttctgagaccactcagtttaaaggagccacaaccagctacccaccagtcactttccatcatttgtcagtgtgtcactttccttgtgacatttactgatacctgccatttttttttctctctctcttctctttctctctccagccctctttctctctctctccccctttccatcccacttctacctctatgaaatagtaaactcccaaagagcatggtccttaatctgtcctgttcactgtgctatgtccataggatgtgttcagtcattcttgctgaatgaatggtttccctgttctttgggtgtttgactgagggtagcatgacatttacagtaaagtttatgtcatttttcatattaaaaaacatgcttggatcaacatcttttaggtagaattcactcttatacatttatctattaaccaatgtattcatttattcattcaattgatatttgttatctactatatgccagataccttggcgagatgttacagatgtcagagaagtttcggccagggaaatgatataaagaaatggagagagacacatgtgaaaacaaaatttcatattttataccgaatgttatatccagacctgtctgtctaatatccaattttctttttctagctaaactgctatctttctgctccaactgtctgctctccagtaaggctctttcttcattaccccacaattggacctcatcttcacttatgttattactttattctagactgtcttctctctgctgttttctttgaggccagttcaggactttccgtcccaggaaggtttccacaactctgtgagctcccatttgtcccctgagctgttctctttagtacgtaaagtctagacccttcaaaaatttagagctttgtactgatgatgattttgcttggatttgtatttcttccacatgtgttaatattgaaaacccaactcaattctatcttctttgagaaagcagccatgttttataattcttctaggtctctgccaatatcacaggtagtatagggaacataatagcagtcaataaattcttactgattgattggtgtcgaaattgggttgtcagttccagacggcatgctgaatgagagcaggtctgggaaaagcctcttcagcattcagcctccctgtagatcaagtacaggcaaagcttatggcaaaaggtggtgaaaggcaaaattccaatagcaagagtattattaatctacttaaggcattaagtgttgtccagtattagattggaccggaaatcctggttttcaactctttcccatttgaatgcccaagaggctgtcagtgagtgagaggaaatacggaattggctttcagttgcccgaggagaggagcttaaattcctagatttatggctctactttacctgaaacttttattttgcttttacttttatgtaccaatcgagtgtactctatttctgttggtgcttcctaaacagtctaagggagctctaaaaataagtaccaaccaatttatacagtaatgttcayagcgttgtttacagaatgcctcatcacaggtcggtatcctgggagaccccaaaaggtatgatactttcagagaggggccttagtgaaggaggtatagtttgcagtatgaatggtctgtctgtgatctctgaactcaattattctggtttttcaaaatctagtagtagtaaaagaagcaggcagagtgtagtagtcttgtgtcccgaatctctttactaacatgccatcttgctgcttctgtttggcctgattttcctcatcatgctctacatttctggaagtcctttggtcttccttcygttgaagttttctagctccttcatatcccaccttatcctcatttcctggagtgaactctttcttctttgactctctatagcactcaggtgcttcttcattcatttgctgcttattaaaattgccatttaatgtgtatgcatcttgttttcttaagttgactttaacctattgtttggcaggaactttgtctcatacttcttaatatctccagagtgcccatagtaaatgctcaataaatatttgctgctaatgatatatcttagttgactcatcttgtttctggtaaattttactgtaacaagtagcaatataatgatataacttaaaagaggacaaagaaaatctagagggactttgaacacttgattagaactctaaaagggagaaattctttcagtgttggtcagtaatataaaaattattttgaatgattttwtcaacttgacatatctggctattattacaagtgtttgtttatgtgttaatctctcctaaacttgacaaggatagggtcttcttaagcacaaagtctatatattttatatgtccttggctttatttggattaccaagtgagtagagagctgaaaaaatatttattaaatgcataaatgaatgaataaccttcaaatccaaagctagaaattctgttaaagaaaagatttagaccctctatctctcaaagttgcaagttactaatgctgctcacccattttcggttaatactaatagtctgtcttctacatggggaagtttgttggactaaaatgtgataatagggaccataagttgatgcctttgcattggctggtttgggaatagctgttgagaggatacaatgtagtttcttttcagttttatttgtcrgccttgatcttggtggaggaacatgttcttaacacctacaagataacaggattgtttaaacattacaatatcacaccccatatttgagttttatgaaaaactgtgaatagggccaatgtcctaatttgtcaaaaatgttaaactaatattgcaattctataaaataaattattgacagattttataacataaaaatgtgtatttttatatatctgtagcattataagcaaaattaaggaaaataagctaggagataatattttaaaatataattaaatattttattcctttattataggaagagcttttacgagttctactgaacaacaacaaaaaatccagtagaaatgttggacaaaagatgtgattatacaaaactagaaatgcaagtaaacataaaaagctcaaacttacttaaaaacttaaaatgaaatattcgtaaataaaactattactgagggcctataaaattttgggttaaaatgaaatggtaatacttaataaatgttagggcacaatgatgctatctttcttacatctttctttttagaagtaacttatttcaatgtttctggaaagcaatttgataatttttatattactacaaaaatatggtagctaccctttggctcaacaattttttagaacacaaaaatgcagtcaaagatgtatataaaagactgaaagyaattcttcatagccttgtttatatgaagggaaactgaaaacagcctaaatatttaacaataggtgaaatgattagaaatgtggtatattcagagcaggcatagtggctcatgcctataacccagcattttgggaggctgaggtgggcaaatctcttgagcccaggagtttgagaccagcccgggcaatatggcaaaaccctgtctctgcaaaaactataaaaattagctgggcatggtggtgcacgtgcgtgtaatcccagctacttggaaggctgaggcaggaggctagattgagaccaggaggtagaagctgcagcgaggtatgatcatgccgctgcactccagcctgggggacagaatgaaacactgtttcaaaaaaaaaaaaagtggtatattcagatgatcatatattatttaacccacaaaaataagtctttttaaacttaaatttaaattttttaagtgaaagcaagattattaagaaagtaaaggaataaagaatggttattccataggcagagcacaaaaataagttttaaaagagtaccatgagattgtgcttataataacaagtggggaaaagtactaaaagctacatagagcatctcaatttaatggacccacacaagactttgaagaagttcactgaaatatcagcagtggttctcattgcacaataaaacagactgtgagtgatttttttgactgggtcaaacatcattgtcctgtcatctttgtgtgactgagaggctaagtgtcagaacactgtagatatagttagtttgaaggaattcattcattctttgaacgaaaaatgtagtatrtattatgagtctggtaccatgctagatcctgtaacaaggagcttagaatgaaatgtgcgatacagctaggtcagtagatatctatgttctaagtattattgtattaagtgcttggataatatagtaatgaggatgataatgatgatgccatagagaccacttatgtagatcttctagtttctgttgctgtgtaacaagttataccaaaagtttagtaactaaaaccaccgttgtattcagctcatggtttctgtgggtcagggattcagaaagcataaggtaatagctttttctctacatcacaatgtcttcaccctcagctgggaagacatgaatgctagggctgacttgactggaaatgggaatgatctgaagactcatgttcatacattcatctgtttgggctaggaggacccacagatgaggatktctaactgaaatgcctacatactccttgtggcctggcttgcttgtggtttggcagcctcagggtagttggatttacatgaaagtgcaaggtttcatgcccatgcattctagtcagcaaagcagaagctgcatcagaagtttttctgacttattcttggaagtcacacgtacacactgattcaagggaaggggacacggataccaccttctggtgggaggatagtcatgttgaagatcaaatggaattggagatattgtatgtgacttcattatgtgctagacattattcatactgctttctagcaagtagttcatttaatcctcactacaattcatgaggtaagtagtattagcattgcctcctttaaacaagaatctgaagtcatggagctaagtagcttgcctaaggtcacataataagtggcaaagctggacttcaaactcaggcagtctggctccagtgtttatgctcttaatcagtggaggtgatcaggttactagggacatatgcagaagacctgcctaaccctgacacaggacagggagcagggagtagataaaggaaggctcccttgaagaagtgatacctaaactgagttatgaaggattaacagaccctagtttgagacttgaaggactaataaaatggacagtagttagctgggctgtgggtagatggttggaatgggaaaatgcctcatgaagggagaacggcatgtasaaagcccccaggcaagtgagtacggcatattcaggcaattgcaagttgctcctcagtgctagaattcagagctgtggtggcragtttcgaatggtgaggctggagagattgacaggaataaaattagaagggcccaagcaatccaatgattgcttgatcaccatactgagagatcaccaggatggtgatgttactgaattgactcttctgttttcctcctagcaattagccatgtatttattagcatttgccttttttattgtagtaaaatatataaaacttaaaattcaccatttaaatcatttttaagtgtacagttcagtggcgttaagtaccttcacattgtggtaccacgatgaccaccatccatctccagaatcttttcatcctgcaaaactgaaactccatactcattaaacactaacttcccattcactcctcccctctagaatccaccattctactttctatatctgtgaacttcactactctaagtacctcatataaatgaaattaatattatgtggacttttgtgcttacttatttcgcttagcataatgtcctcaaaattcatccatgcagcagcatgtgtcaaaatttcctttcttttttaggctgaataatatccaattgtatctatatgccacattttgtttattcattcatcttgttgatggtcatttgggctgcttctgccttttatctattatgaatagctctgtacatggatgtacaaatgcttcttaagacctatagataaatctttgagaccttgtttccgattcttctgagtatatatacagatttaaaatggccagattatgtagtaattttatttttaatttcttaaagagttaccatactgttttccatagcagctgtaccattttacaatcctaccaacaatgcacatgattccaattattccacaggctcatcaacatttattattttctgatttttgcttgtttgctcgcttttaaaaatagctatcctaatggatataaggtggtatctcattgtggttttgatttgcctttccccatcttttcatgtgctcattagccatttgtatactttctttggggcaatgtctaagaattgactttttagaatgatccctctggggagaagtaaaagggtagaaggagggtcagaatggaggcagggagatcaggtaggaagttgcactaaactagccaagatgtgataaggcttccatgatgcaactaatgaaattgtatggggcagtggtggtggtagatagcattgaaagattgttttgcaaattaagcagaacaaaaaaaaaaaaaacaagaaaamtcaatgttaagtggatgatggcaccatgactggtattcagtcagtatgtacctgtgtagccattctggctgaaatacttccatggcagctcccccaagagtgccccttcattgcccctcccatccaggtcttcaaaatccttaaactgcctgtatgcccccataattccctaaataataatgaatgctgggtacagtagggggtaggggaaccttggactctgctccagctcagtagccagggtccattcagatttgtcagcccccttcccctctgatttactcctggatagcagtaccatttcttgacacatgtactgatgtggaaaagatttttggaaggtatgaagggagttcaccaaaggtgataagttttatttggggcctgtttgtgtattcaygtggagagagttagcattcttggttctagagaaaaagatttaggaattttcaacatatgatagtcatagaacccaagaacttaccatccaatggaaatattttccctctgcagtgacaccattctttcataaaattattcacaatttagcaactatgaacaggaataaaacctctaaccaatattccaaagaggtcagctgtgcctaaaatgcatgttggcagaatgtagtcacattcccagattttaggaagccaggaatccaggaaggagtcttcctctttctgtatagcaacttaagcttatttgaaggtggttgttcactccctcctggagtgcccttagctgcagacaaagagagtgggattcgtgatgatcatttggcatcatgtccctgacagatagcctacaatgttaccagaagctgatgaggcttattttggttttgtttcgttttgtggaaaaccagaagggatctcagtgttgctgcctgcaggataagtaaagatawcctactatgtattttattggcaatcctgatagcattttctccattggtggtttatgtgtaatagagaccaaactgcaattttctgacctgccaagatccattatgtctggtaaatatagtttatgcttgacagaatacacacttagggtggaaagccatgcaaattaaactaaggtttaggctaatttttggtagtgaaaattattctcccttggtgaccttattcagcatgaaataaaacaaccagaaagctattcatgcagtccactctttctttaatcaaaataatgaaagctttggatagcccagctcctgattctcatagctcttgtctttcatggagcctaatcttttatggtcataagaagcttttttgcatgaataggttagagattaggtagtaaaatgccttatttaaggtaactgttcttagtctactttgaagtctatgcaaattatatctgtctatggatttatggagactgtatcaccacagagtcttgatctgttaacataaatgatattttaaaaatatttacccattgtctgggctaccaaactttagtcttatgttggaatagtgtctgattgctgacaagctgagcagtagttttgacagagctaaataaggagaaaagccaagctttaataatgttgaccataagttaggaataatctcattgattgcttagtacagctaattctattttctgatgataatttgcattaatatattcagtttatgtagcttagtctccaatattatctcggtaatcccatcttcattcacagtggaacagaaaagacagagttggaaggcttgtaggtcaacgtaacaaacttgttctatctgctggctctcagattcttttcttttaaaatatgtttttaaatcaacagacaaaaattgtatatgtttgtcatgtacaaatgttttgaattatgaatacactgtggaatggctgaaaggggttaaataatacagattgagtatcccttatctgaaatggcactggaagtattttggatttcacattttttgggattttagaatatttgtattatacttaccagctgagcatcccagatctgaaaatcaaaaatccaaaatgctccagtgagcattttttttgagtgtcacattggtgtccaacaagtttcagatttttgagtatttaggatatcagattctcagattggggtgcttaacctgtatgtgcattgtgtcacatagtttattatttttttttgtagtgagaatgctcaaaatatactcttagtaattttcaagaatacaacatattgttataatctatagtcaccctgttgtacaataggtttcttgaacttatttctcctatttaattgaaattttgtatcctttgaccaatatcttcccaacttacttatactcccagcagtccccagtaaccaccattctcctctctgcttcaatgagtttaacttttttaggatccacatataagtgagatcatgtggtatttgtctttctttgccmggcatattttactaaacataatctccaggttcatccatgttgttgcaaatgacaagatgtcctttattaaggctaaatagtagttcattgtgtacaagtrcaccacactttcttaatccattcattcattgatggaaccgtagactgattccatactttggttattgtgaataattgctgcataggagtgcagatatctctcctacatactgatttcatttcttttggatacattcatttcttttggtgggattgctaggttatatgtataataactgtatttttaattgaggaatctccatactgttttttaacttacattcccactggtaatgtacatgggttccctttttcccacatccttatgaatacttaccttctagctttttgataatagccattttaacagatgtgaagtgatatctcattttggttttaatttgcattccctgatgattaatggtgttaaacattttttatacacctgttgatcatttgtatgtcttcttttgaaatatgtctgttcaggtcctttgcccatattttaattgggttgtttgcttaataatgagttgtttgagtccttatacatttttttatattaaccccttatcagatgcatggtttgcaaatattttctcccattctgtaggttatcttttcactctgttgactgtttcttttgatgagcagaagctttttagtttgatgtaatcccaattatttatttttgcttttgttgcctatgcttttggggtgacatccaaaaagtcattgcccagactaatgacatggagttttcccctatgtttccttctagtggtttcgctgcttcagstcttatgttgaagtctttaatccactttgagttgattttattatatggtatgagataagggtctaatttttttcttctgttgtggatattcagttttcccaacattgtttattgaggagaccgtcctttctgcattgtgtgttcttggtacctttgtggaaaaccagttgactgtaaatgtgtggatttatttctgggctttctattctgttccattagtctatgtgtctttatggctttcaaatattgtgagacagaagaacacaggatacaccctcttcacacttgccattaatagcccagtgcagccagaatgaacaaggtgttacagaatgtgatgcaacaacaagggagtgataattttattttaatttaaaaaggcattctcagaaactgaagtttaaataaaccatttgtttaatggctttaatgtggacactagaaggcacaaaggtctgggctattgggattccagtccattttctggaatctttgccttcagagggcataaggtaatcaagtacgtgggaggtaagagtccaaatgttctgtattactctcatctttctgtgaatgaccaaattcttctgcttttcactggcaatcatatattttgtcaacttgtgaaaaaatactctacaaagatgaaaattgaccttataaagattcttcacatgtatcacatttgagaaggttgtgttcctgactgaagaatcttgccttggtttgttgactctggggttacactgtgtccagttatggctccttggatgaaggccctgtgttgtttttgagtcagctcactcagctttctggagggcagttgattccatgaaaatacttgtctatgtgatcaagcagtgggggctgaatgtgtggctcttcacaacagaatgcaaggcggattactactattcctacagtgctactgttattattaattttaaaaacatacaatgtcattatcaaccttgatctgctctgcttttgtattttagtaattgattggatgagaatgtgcccaggcatgctttaatcactggaagggcaccagggtttaatcttccaaaggggtttttcccattgttatttcctgaaacatgcttgccattactcaagtggcatacaaaataaaattcaaatcaaaacagcaaaagagatgtgatccctctcttttgtgccttcttttaggcttaattctcakaagtagaacatatctaagaagagtaggcttttgagttccaggcatactacttctaaactcttcacttaaagctagcacattcacctgaccttgaaaaggtgaatagatacacactgctgagattaaataaggcaccacagaagaataactacaggaggagcaagtaagtgcaataccctcttgtatgaagtgtgaccaacctgaattaaaccatatttctagtcctccctcagctccaaacttttcagagcttttgctcaatgactccaccccattgtatccttggctgactctcataattgcctcattattatattttctatataatatgcatctttggattcatagcccaacaatctcagctggttctcctctgtagtttgttyagcagacaattgtagtcattgcccctcagcccatacaacatgggggatctggatggaaatgaaacgcagacttggctcatcagagggcagcttggcttcacttgtatgccacaaacattgtcacctcataacactgacartagtyactgrtgagcacatytgaacccattcccaaaagtgcattgcctccacaccacatgaattagagccatttgtgttattttgcttatgtgttctttttcttttctctgttgtgtattcagattcccatattagttttccttaatctaagacttacattagatgactctagccagactgtcaaattatttgagaactctctttgtagctctaaatctagggtagtacctggtagtcaataattatttatcaaatgaatggatatttttcaacacttactggcaatcaagaaataattgtatttctaaaacagtgtgaaaacacgatgaattgaattgaattggcgagaatagaatataaactgcataactgtaagagatagtactatacaatagtgctgatgacattttgttttgctttattttattttatttattttctggggctgcctgatacaaaaagttccttgtgaaaagagaagattggaatccaattagtagattggaattgatgagttagttaagggctttagcatcctaccatgggctgtggtttttccccctgaacctatgggcatgttttgattgaagatgatggctggaagctgccaygtttgaagggctagagaaagagcctgggtttcctgtgtcagatgatacaaactagaaactagaaacgctacatggtagggaggcagtgggggacagaagaaaagacatcattattctttgtctcttcttttccctgggggaaatgttggcatccaaatattcaacagtaggttgacatgtggaaagtggcctagccaaaggatctgtggtgatcgggagtcataaatcagatatgagagggagagaccatatggtgcagaaagaaagtgacgatgcgattctttcagctatagccactcacgtgcactctcttacccagtagagagaggggcccctttccactgtttcttttctacttccccagtgaacctgcaggaatgtcagctgaaataccttgctcttttctacacatttctgaatcagccaagatgtcagtgacctggaaaggactcaggtgagagccagagaaatgattaaagagccggtgatgccgatgatccagtgggtgtctcctctccgcaccactagaactgacttatgggaagatagtcaaataactagatatgtgttgtttggcccagggcagacaagaaggaaggtatggggtaacttgtctccaatggagttgccaacagccaatgaattattgtgtcttttcctctccaaatggactgtcagtatacatatatatattttcaagttttattgaaaatagttacctcaaatttacttgcacttattttcctgagagtctgaggaatcacattctcattgctgcaggcccccagaagttttgaaacagcctctgccacgccacgcaactctactcacccagagaaattgccttccctcttttccctcaacttgtctggagatgaaaaggatgagattgaaaccccttttcttagagacacgtcccctcccttgctggtttctggcttctcttttcggtgtgtgagcaaaatcattttattaaaccatttgtcagggggcagatgggaagtctgtctttcccattagttagcagaaagtgaccccagcagctgtggagggaatcggtcaagccattgctaccaaccagaccagggtggagaaggaggccgggctttgctcagttgtcacaaggtyccaggcggctccccaggagccttggaactgatgaggccctgtttttattggccatgcctgtggtaggctgacttccttcactctgagcttcaggccagccagggaagggggcaggggccactagcattgggaagctttcgtactttgcccttaacactccatatccctgtttaattaatttcctaactttgtgggggaaaaagatgaaataaataaggccaactgaccacttcataatttgtttctgaagcttggctggacataaaagtctcccttccaaaaccacacggcataatttattttacgattccctctcggcaccaggtctgggctaaccttgagtttggaggctgtgccttcgcttcctggtgctggtggtcacagtgtgtcctttcttggcagtggccatgggcccagcaaaacagacctctgaaaggcgagcagattaatcattttgaaggcatgctcgcctcaacagttcccctgcaggatgtcggagaaccggagagaggggactgctgtagttcacaaggggcatagggaaatgcctgaagactcacaaaaacaagggggtgaacaacagaaaaagaatgagtgcttttaaattgtacatgctggagttttcactaaccgaaaagtattaccaaaaaatatattgccactcctagagcacaaactgtgatgagtccaacccttttattacaatcaggctttctctaaatatattatgccctgcaggtcaaaatgatttacttctctattttgggacatctgagttctattctactgttgccagtatgttttcagctgtgccagaaccgagcaggtctgcggctcctttgtaacatcaaaacggagacatttatcattgagatttatcatgggacagcctgccagatggtttgggtattttaaaggtgaactgtttgggccttgattagctcatgcggacttctagctaaagacaactctatcagctgctcagtggaaagacactgacgtccccctccccccagctccctccctctgttcttctagtaatgcagaaaatattaatgtaatggcagatgtggcatagattgtcatttcaggaagaaaaccaagccataaccaaytccactgattgcattctaattataatgtgacctcctgttgctttgcatagaggcagtattcatttcagtacaccactgtaaaacttgcctagtcaacgaccctcaaaggggcaattgtaagatttaagcttggatttttttgctcataccaaagtcctttattctgccaagcctctgctgattgggccagaaagaatgcatttgattatatagactaaacttattgggaacagaacctctgtgctttgaaatgcttttcattcaaattacattcagacattcaatcaacattgattatgatatggattggcaacagggaatgccttgggtttttggtctggcttgaaagtttgctgagtttcgtaccagataacaactgggaagccagctgagtttccttaaccttttccatgagtttctcagaaaaggatggtttctcttgggaggccaggagttccttattcccacttgatgcagtattccaagatcatttcttcacttggaaaatttgggtctttggggcttccaaatttaattaacctctgatagctttgggaaatgtgtgctcatttgtgtttatgttaataaagtaggtccttgactttgtgcatgaaaatctaggagaatgcatcttagattcagattccaggtctaaaattttgtatcatggaagaaagtgatcatcactaattctggtcatagatgttgtctgtgtgatttagagcaaggctcagttttctcatctgcaaaatgaaataaaggtgatcccaaggtttaatttctaataaagttgatttgaaaatactaagaaacaatataatattgttattattatttacatgtcagtgtatgtgcttgtgtttttgaggggcctttgcctgcatctagacctctctgtctctggaaaaatcctggtgggatcagttttcgaagtagttggctcttggcagactcgcagacatactaaagtttttgttttgacttgaaggtcctcttccggcccttctgaataactttaacctaaaagtcaggctagaattcccacaagaagagagttgccagggcatcctcattccaagctataaaatcactggagatagctccattttctttatccaatcacatgccatgagctgtcatttgtgtacagatgtctctcaaatatagatttccagccttcatagcattcctgaaatttagcattgctaagtatatggtcaccttgaatagtattctaggatctcgaattcagtacgttctctttttycccccaaaacaatggcaaccagcctctcctctgttctctctttctcttaactgctcctgtagttccagttactagagttcaaaaccttggaacttttattttctcccttgtctttacttcccacatagaactagttgccaagtcctgtgaattataccacttgaaaatatctgttcttcctaaagttagtgctttttcattgagtctaatcatttccttcatggcctgtgtaatttagtctttccaccaatccagtcatcctaccatgatgtggcagcagcttctaagatggtccttataatatctgttatctggtgttcatacccttgtgagatctcctccccttatgtgtggatgggacctgtgatttgcttgtaaccagcagattatcgaaaaaagtaatgggatgtcactttcatgattaagtgacataggattgtgacttctgccttagtagaaaacttttttcctsctgatcttgatgaagtaagaagctatgttggagaggcccacacggcagcagcagagggtggcctctggccarcagccagtaaggaactatggccctctacccaagaccccacaagaaactgaatcctgtcaacaatcttttgagcttggaagcttccccagttaagcctcagatgagaccccagccctggtctgtaccttgataacagtcttgtgagatgcctaaaacagaggacacagctaagctgtatccagattcctgacccacagaaagtgtgagacaacaaatatgtattattttaagctgttagatttgtggtaatttgttacctaatattagacagctgtatcctagagcagctagattactgcctgacaatatcagtcttttgctcagaaatactcagtgtcttcatgattctttgtctttggccttgaactccctattcaagctgttttccaattctccttcctgagcacaattacctctgtactgttcatatttctggctttctgccttttaccttttgctgacatcgttaccatttcctggattttctttatgactaaatctcacatcttttttaaaggcccacttaaatgtcacctctttcataaaagcttttttgatctctgaagctatatagatctctgagctgccatcgttctatacctcaggttcctattcattttctacctcataggggactggtttgagaacattgctgtatctgtactacaggttgaataccccttatcaaaaatacttcaggtcagaagtgttgagaatttggggttttgggggagattttggaatatctgcattatatgcttacctgttgagcatccccagtctgaaaatccaaaatgctcatttgagcatttcctttgagggtcatgttggtacataaaacattttgggtttcggagcattttggattttggattttcagcttagggatactcaacctgtgctaggctgcaaattatatgaaggaggcttcttctgattcatctttccatgcccttgagcttccaatataatgacttaatggatggtatgctctcagtggatgagactcaatggatggtatgctccartgactcaatggatggtatgttcttgttcatgaagagcaagccagtgtgcccacaggacagcaaaacagaagtggtttgtggaactattcgtttatttacttgcttattcttttattccttcctttaccgcatacctggcattgtcctaggggctgatgtggactcatgggcatcatgcttagaaagggaccttgttcttggggttttatgtttaagcatcaccatcttcttgagactcttaatcattttatttttgaatctgtgttttctgagtgaagtcccagaaggtagtggggtatatgctaggggctcagagaatttgccagtgccttctgcctccctgacatagattctaacccacttgttctcctcaccctcccaccatggcagaggcctgggcacaaccacagggagagttggggttgggtacacatgccctgtattccaggtcacagagtaaggaccctgggtacctgggaggatctgtactygctgcatagtcaggaagtaactatgtaagtatcatattaaataagaaatactatgacaggttgagagaaagagaggagagcattagtgagcttacagacaaacaggaaaagcttttctcttgccttttgaacaagtgcctgcattttcatttgtactggaccctggaaattatgtagctggccctgactaggggtatagtgggaaaccaaaggggcagggatacagctgtggcagcagaggtggggtcgggggaaacagcaaacaacagacaataaacaagatgatttcagaaagtcataagtactatgactttytgagaatcaaatgaggtgatatgctggtgagtccctgagtatggtgcaggaagcatgttaccttaaagaaagatgatgagggaaccgtygctgagaaggtggcatttgagtggacatctgcaggaggtaaagaggttaggccgttccaggaatatggggcagtttctaggcagaataatgtgctaggtcaaaatccttggggctggaacaagcttgaaatagccaagagctagacacaaaagccagtgctgcagtagcctagagactgtggaagagaggaggcttggggcatttactaaggtaagatgaagctgatcctttattttattttattgttctttttttagaattaggttcttgctgtgtcacccaggctagagtgcagtggtgggatcatggctcactgcagcctcaaactcctggatcaagcaatcctcccactttagccttctgagtagctgggactacaggcgtgtgtcaccactcctggctaatttttaatctttttttgtagaggtagggtctaggtatgttgcactggctggtctccaacttctggccccaggcaatcctcccgccttgatcaccataagtgctgggattacaggcaggagccactgtgcatggtccagctggttctttaacaccaacaccatactggccatagtgaggacacagcttgcctctgggcttgtctaggtctgtagtccagtattttcacacctaagaattactaaggagggattttacagcaatgcgctccctgcattttctaccttaatttaattcctttttctttgtcaacatagctattctgcattctttaaaatagagattttttcagagacatgtaacttacaaggatgtaaataatcataggtgggccaaggaatgtgtagttcctagggagagctttgcaaatgagattggttcctttcccacagaacctcaaggactgttggatttgtttcagaggtcacaaatgggcaccttatggcccaaactggagccccagaagtgttttatttgttctgcatgttgcccttcatcaaacaggagtgccccagcaatggccctgtgctccccagatagctctgtcctaatctctcctatagtctcctgcttgtgcttcttccctttatgcctgaactctttttaattgtttctcattaaaaaaattatactccactgtatagtgcagacgtggaaatgttggcatgtggatagaccctgtaccaaaaacccagcagaagattcagagtccctgagatgcttcctcctcatcttcttcgccaagcacctcttgtcactgatcttggaagttagaggtgggaaaaggcaggtaagagggccaagaagtcaaagtcctaattcatgcatgcctgggcccacccgtcttcccgtcttgcatgcccattctgtggactccctatatgtagatgctaacccaggaaacccctcagggccagtggtgcatggctggctcccttcctacagactgttcctttaaaaatttggggctttaactgagaagaaaattaagtaattttgttattttttccttcataaagctaaaattattaatcttcagagataagtactgttcagtgcataatgagttcgaattgttgataattataattttgaagagtttcagcttgctgtcagccaagtaattaaaggggtgggaccagggttctattttgttcatgatggttatgcttctggtaagaactctctctgtgtggcaaaaatgccctcattctagtcacatggtgcagtgaaagggttaattaaatcaagtaaagtaatccactgggttgtgaagagttctcttttcctagtttcccccctggccttccatctcttccttaagatcttcccattgtcttagcaaagctggacaccctcaatggtgcccgctctccactagtgaaacagatgcaggatgcctgggtcctgcctgagcccagggaagaggctcarttcctttccctctttcgcaactgcccccttcacccaattgcccatgagtcaccttaaaaaaaaatgtcttgcatatactagcactggactaaaaaaattgaaccaaaagaaaagaggaagagaaaatggaaaactaatgattcaagaaatcacatagcacgagataattctattttgaaatcacagcagtggcacccagaggcggacrctccccaaattactagtgaaaaccctttgatgtatccagttgtaagaaagcccaaggcacttttttattattattatgagtgtttcacattccccaaaagaaacatttagcagtaatttttaaatgtctgtgtgtgagcaagctaaataaaatgaaataaaataaaataaatccctaaaaaatctycaaccctaaatgtgcttacttgatggctggcttttacttacaataaaagccaaggtcttacaatggtgtatgaggcccccatgagatctctctgccctcatctgcccctttatcttccctggctcattccactatagccacactggctcgctagctgttcagggacacactgggtgtgttccctgctcagtctgttcccttgctatattcccagcctggatgctctttcctgggtatatgaatggctcaatcgtttctttccttgagctgtttcctccaaagtctccttctcattgaagcgttcccttgccatgctgtataaaacctcaacttcccacttttgacactcttaaagggactttgcagatgtgattaagttaaggaacttgagatggagagattatcctggaccatgtgggtgggcccggtatgaaaacaaaaatccttataaaaaggaaacagcagggatacaaacagggaaaggagatgttacaacagaaatagaagttggagtgatgtaagttgaagatgaaggaagggtccacaagccaagaaatgcaggcagcctctagaaactggaaaggcaaaaggaaatgatttttttctggggccttcagcagtaaccagagcagttgacacctagatgttattagctcggtgagaccctttttggacttctgatctccagactgtaagataataaatctgtgttgttttaagccactgagtttaatttgttacaacagcaataaaaaactaatacaattggcaggacccagactcataagaccccaaagaatttgaccatcttggtccccggttcttctgtgcaatattcaaagtttctattttctgtcaggatttcctttctgacttgaagacagaggaaagaaacctttgcagtacatgcattctggtctccttttgtacctgaggccagctttcgtcactaggtgcaataaacgctgcattagattttgatgggaggtatggtgcccaggtgtgtttcaacacagttcagatgagggacaggggagctggggagaagcaaatgcagccctgccaggaacagtgcgctgctgyttatacaacagggtaaaggaccagacttgtcattattttaacccaagtagacagttctcgcctgtctaaggatgtgattgactggtggtatcttttcatggttatgcagcagattgaacttcagaagtcagagctcacaactgacgggatgtgtttgtaattggacctggtaagaactggacctctaaatagggaagaaagagcagtggagacaatcacattgtggccttttgctagttattcattcatagagttcttcctgttttaattctggaggattaaaacattaaagaataatttattcctatactctcctcagcccccgtgcgttcctttttccttttctgtgtctcttgttttatctttctctctctgtgtcatacttttccctgaccttccatttcctgaaaattgtctgtatttgtgagggtaaccttagtgcttgaaactttttccagctttattttaaaaagatgaccattttatcaggcagtctgaaaatccaaaagtattctctgctccaaatgtcctcttatttaactggccagcgaggaaaacccacaaattgccaaacaagaggaacaacaggaagcggtgatggagctcatttacatctgcatatgttctttatttaaaaccaggggaagtgctgagtggatgggtttgggaaatatggccggcattccggaaagggtggctgtgcacaagtccacacatcctgtactaacaggcggaaagggaacatcatggcatttatgtttccgtgccatcttttaatgtctgttctgtggcatcttcattagatcccaacatgacccacaaactgttaacatatcaaaggcagtagggagagaggtgtgaatatcctaaaagggcttctgatgaactatcgtattttcttatactctaaatacatggaacagagatgttgggataggtacacatttgggttttattaacaaaatagcagtaagatgtataggcagttggagatacccgttgagcctctatgttctaaagacaaatgttccagcctctcatggtcttttggtggcacaaaatgtttcctcctgaagaggtgaaaaggtgaccacagtggtccttctcactttgctctgcctctgtggctgtcatgggagtagagttggctatgacatctgccctgcattgatacacaaggctgattcagggtgggttgtcaggtgtcctttcattcatcatgaccctgagtatgtcccttctgaaaggaggcatacatggtgaaaaaaggggccttccctggagcagatttgtgaagcaaaacatgaaaccttattattggtccatagaatgagcccgagaggcccttgagatggtctttgatcctactcatattttaaggtagaaaaacttcaaagttttaaaaaaactcagaaaggctggaataattgttccagatctcagtacagttgagctacagttcactcagtcatctttcccacttcagaatctgcccattcgtgcaacctttgatccctccatccacccacaaacatttgttgaatgcccataaataagatccagtccatgcctcaaaaagytcatatgcacaggaaggatgggaatgtagggctgtggactaggtgttacgcagagatgtggcagctgaagggtgcacagaacagggagtgtgcacatcagcctgggctctgtggtggagagtggaggaaggcagggagtgatactcaaagttgcggatatgtcttaagagaaaaatagttgtttgccaggtgctccatatgtgggaagactctgtcctatcctatttctatttgcttttaaataataataacaaacaaaatttctattgtttcattgattctctcattcactcaaaatttgagggcctgagatacccagaggagttggaacacacaatctgtactcacgtggggacttgcaaaataatgaataaattaatgttctagaagttactgggaccagttttcatccaatgcaagaataacttctaagttcttctcaaccttgagatttgatgaattagaataacgaacctttgtctcgttatctcatgcaactcacaacaaccctgtaaaatagattttatgatcactgtcagttttataggtaagtaaaaagagayacaggaggggttaagaaatatgcacaagatttcatagccaaagggtgaccacatgagagccaaaactgtctgctatccttaaatcctaggttatttcttttgcattactttgtgttgcttatatatagttgaactcaataaatgacttcatataggtagggcaatttcttcatttaactacacttaataggagaccaaattagaacatttgttttgaattaaaatatgatctttaagacattcctattaagaagggcagtatgttaaacatagagttttagattatcagagctggaccttgtacaaggagataataactctcaatacaattatgtcattttctgccatattacagatgagagagaacacagttttaaaatcatagccaagaacgcaagtttccctactcctcccagtgttatctcaactaacacttactgctttttattatattcagcacctgtaaggatcataacccaaagaaaggaaaatgcagaacaattgggttttgatgagagtctgagcttcagaagggtttggaacatacaatgaaatttctcattccgtggttatttgagtgttgggatgaggacaccagcgcacaactgtggtaatgtctgtggtcaacagagagcaccaggtactagctggatttggtggagcccaagtagaactagacagagggccttgaatggtcatctaactatataaaacactcacctttgattaggtctgctctctagtcataattctgacctctgtggagtttacttaaaagcataattctcattgattatgtaccgagaattatgttctcataattctcattgattctgtaaggaaatgtcctatgcacatggttctagaaatataaattactcctgtcaatatttaaccaaaaaccagacttggtccttcaggcrccagggcagagattgctcatttatattgatgtgattttcactaaataagagctgtaatgtttgaggatcaaactgtccagtttttgaaattagctgctttttgaaatttcctctgaagtttgcctttttcattttcccttttgtttttctgctggtttcttctttctcctccaaagccgcaggactcctgctacattgctcaattctactttccacctccactgctgggcaatttcttccttcctcactcccgggaagaaataattctcctcttgacagctttcctttggtggtttgcatactcccctcatgtagtagtcacattataaacatgcacagatggcttcggaaccctgggcttattttctccctattgtggtacaaggcatttagcacctggtaggagctcaaaaaatattttaggaatgaatgaatgatggaagcaaacaaagaaggaatatttgcctctcattactaccatctggagactccaaggaggccctatggttcagtctactttctttcagtttaccactttgtrtcacttgtccaggtgattttaaataaacattcattcattcattctgtctctctctacaagaggatggacacgtaccacactcaataatggtgagattgtcagtgattttcgtactcttttcctttgagctttttggtagtttgacrtttttctgcaatgagaatattttattttgtagttcaaaagtattagcccttttatgcccagtgttccattattggaatgctaagcttgtgggagttatttatatcctactactcaaggtcattgccaaggtctgattttttgtatacaaaaatagcaacctctggcacaaatgagttaacattagatttttaaaattatattttgtattctaaaaatgtttattttataaaatttagacaattagtaatattgggagaaaaaaactacccataattctgatacccacaatccattgctaacccgttcactttacttctagcctttttttagtgcatacattttgatatgtagttgtgatcctgttgaaaattgacatttttattttactttttcaatgaacatgtataaagtggttttatgttatatatctccatgaatttcacttttattgactgcatgctagtctttttaaatattaatatcaagtgcatggtcaactttagcatttcccaatatgtaatagcaacactaaagtgagcatttattaaatgcttgctacttactgggcagtgtccagaataaactggtaggcaaaatgaacttctgctctcccagaggatagaatctacaaaaacaaatttatgctagcgactcaatatggtaacagctttatagtgaacatgcagagttatgggaacatttgaaggaatgtagaatccaattttaagcaaggattagggaagtcttcctggaagaggtaacattgaagcctcgacaaccgtatcacaactgaccagggagaaatgtgagaagagttcaccttgggggaacagcatgtataatgggccagagggcagaggcatggaatgttgaaggcacggaattgtagtttggccagagatcattgtgggaggggatagagagagaaaaaggagagtaaggaggtgatcgaggagctaatagcggaggtgcatggggtaagatcatgaagaactttacatgcaaatttaaagagtagggattatgtcatagaggcttggaaaaatcactttctttcttttttttttttttttttttttttttttgagatagggtctcactctgtgacccaggctggagtgcagtggtgcaaccatggctcgctgcagtatcaacctcttggtctcaagtgatcctcccatctcagcatcctaagtagctgggactataggcacataccaacatgcctggctaggtttcaaattttttgtagagacagagttttgccatgttgcccaggctagtcttgaactcctaggcttaagcaatcctcctgccttggcttcccaaagtgctgggattataggcatgagccaccgtggcccagcccccatcaagaagctttaggctggagaagctgaaagattacattggcttattacaaagatcattctggctgggagtggctcacacctataatcccagcactttgggaggccaaggggggtggatcacttgaagtcaggagtttgagaccagcctggccaacatggtgaaaccctgtctctactaaatgtacaaaaattatccaggcatggtggtgagcgcctgtaatcccagcaggctgaggtaggataattgcttgaaccctggaggcagaggctgcagtgagccgagatcgcaccattgcactccagcctgggcaacagagcgagactccatctccaaaacaaaacaaaacaccagaaagatcattctggctgccatccacagatatatgcagggagaccatagagggggttggagcaagagatgcaattcatgcaagagatgtttgtcatttacctgttgttgtttttatttcaccatcataataaccatgagaggaaatttttatgcatagctatcttgagtactattttattagaaaagaataaaaggaaaatgcgagctgatcttagtgttacaacttgtcagcgtcacttgcaggctgagtttgttctcatgcccacctaccaagtcatttcagtagtacctgttggagatgcgtaaagggcaccttcttgaggatggctctccatagtatacgtggttcagaccagatttcatccagatttatgctgcatcatttgctgggatctcaacttccactctaagcctagtgccagttctgtacaaatgatttttaaaaatccaacataattaggatgattatatacaccttacagccatgtttcatggactccctgggtggaatgcatttgcctaaggtcaacgacattatttccctaaagggacagtcctattgttggacttcagataaattcctcactatttttcaagtgctccagtttatatgattccactttcttggccaaaattctgcttatggcatagtgttgcccattgtgggatctcaaagcacattcattatcatgtgctgacggctgttctgcaggagtggaaaatggaggtagagagragtgaatgcaacggtgmcagcagtgggggatggagccacgcccctgacagggggcacagtctctgaactcagcaccaggctgggaagctttgccggggcctccctgtgctcttttggggcaggccactttggagacataacaaatataaccagggtagagctctgccagaaagcaacagcggggacagtgatggaaaacagatggaggcgctggccttcacttggtgagaaatccactgagggaatggagaatgtttgcaaaatctccgagtgctattgggacacctcttagtgcatttacaaggcgccagcctctgtttgccaatggtttagtttggttttgatgagaccaaattaccctttgaattctctcgaaattttgaacatttcccaaattttgtttgactcaccagctggaggcttggaattaaaaatccagcatgagtgcctgagaaaaataagtgaaatcttgccttattttggaggaatggttaagaaaaggtgcttgtagctgcctagcttgtggttggctccccacattgtgtaattcttagcctggaacaaatcttgagttgtcattttgtattttctcctgcttctacatagggagggagggctctgcctccccaaagtatttcggaaagatggtggactcttctgatgtaagacttcagaaaggaaggcacacaaccttatttgttcttctgattcatggataaagggttaaccatactgtggctttttgtagcacatgcagtttgaacatagctctatattcaacatcttgtggtgagaaggaaggacacaaaaaagagttcatctcctttctctgggggactctgccctttctaggtgagatgatggtgtatgactctaggaatatagataagtgtccttacatacaaagcagtatgattcgctgtctaggggaaagatacaggggaattgaatgaggaatgattctgcattcttagtctctaagatgttgaacctatacaatattcagtaagtagttttgattcttctgtgatgcccctatgcccacaaacatcctcccatcatctcagcctgaaaacaccattcctgcaatcttcctcctttccctctctcttgctctcatgccaccttctttgttttgctgctaaatgctaaaagaataatttagacttgttgcctttcctctctctctttcctgctctcccttccttctccacttcttcactcctagtcccctgacttccttcctcctctctggattacagctgttctcctggtcagcaatccaacctcctcttcacattctttgccttactgactctttggatgagtcctggtgattccagaaccctctgtctctgagcttttatgccactctctcgatgcttctcacatatctctatctgctccctttctcttcttctcacatcccttaattgtgaccttttttcaagattctgtctttgagccctttctttcttttcgacactcctagccaccatgggatctttagcatctctcctacatagatgcctccatttttagctttccagctctgacttttgcatgagccacatcacatctgtattagtctgttctcacactgctaataaagacatacccaagaccaggtaatgcacacagaaaaagaggtttaatggagtcaccgttcyacctggctggggagacctcataatcattgaggagggcaaaaggcacatcttacatggcagcaagcaagaaagaatgaaagccaagtgaaaggggtaatcccttacaaaaccatcagatcccctgagacttactcactaccatgagaacagtatgggggaaactgaccccatgactcaattatctcccaccgggtccctcccacaacacatgggaatgatgggagttacagttcaagatgagatttgggtgaggacacagccaaaccatatcaccatctgattctcaaactaaaaaatagtataaaatttatctattttatttattgcatggtgttcctttttagaagaaagctccccaaaggcagggatgtctgtctgtgttgctgttctatcccaggggcctaaactagagcttggcacacagtattggctcaccaaatatgtgttgaactaatgaatgaatgttacctacatttattgagcacttgcctggtaaagaaaatttctaataagatgattatctcacatcatcctgacaaaatcctatgaggttagcccattcataatacaattttgcaaacaaggactgtgaaacaccaagaaggcaactctcctgaggccataaggccatatggctggtgagaggcagaatgtagacttcaaacccaggcagaatgacctaagcccaagctttcaagcactaggttgtacttggaggtgattgatctctgccattgactagctatatgaacttggacatgctttttaagttatctgagcttcagcttcctcatctagtgaaaggacattacctctgacttaacagtgttatatctaagaactttgcaaacagtaaaatacagcattaatgttattcctcaaataaggtatcactaatatttatgagaaaaattacatacaaactctattaggacttacagagccacaaaacaaaccagaaaccaaccaaacagcaacaaaaacaacaaaccacaaattatgaagttatggtgctatacttcaaggaatgcccatcctttctttttccctcccttccttccctctctcaaatatttattgcaaccctacaagtgctgggcctgggctagagataaaaggataaaaataattagttgagattaagaattagtaattagttgagattaagagattgatttatacttctgataagggaaagaataatgttgactggagttcttgtggaacgctgtcatgagagggcctggaaaaggagtttagaagactcaagcaacagagaaaaatggaagaactatattcctctgtgttctcctcttctgtgtgtaagatttgtaaccctgagaaaactggttgagccatggcttagctggctgcccgagtcatgggccccttaaaatcttcacttaggtccccatggatgccagagagggctttaaaggtgactgctagatcaccagcctagataagaaccaggggaatgggaaagtggctaggaaaggagactcatatttgaattggagatgtcaggatagtcaggcagaggcatctgcagttatgcagcagagtaagaagaaaaggagagcgaggcttcataagcacttggttctttggctgagggtctgaagaaatcctccaagacatgtggcatccgccacaactctttgcccacatccaggcccttccctcttgggagcctgtcagaggggaaaagcaagtggctccatgtgtctctgcctttgtggtaacttggcttctttgctggagggatcagttgagcatgtcttcaatacattggtctggggaccttctggttctctaaagctgacagatttctgcccctttttggacttcctaaggttccatttaagttttacagttaagggttgacataaagacatcagtycagagtctgaatcttctcctgccttgtttaagacctgctacaagggctttctgtccagaagagctttagttccatttggggaaaggtagataaagctgggtgctgtcatttttttttgagaagtagcttagtatggacacaagagctgtactctgagaataaggagtcttggattctagctcctgggtttgtttgtgtgacctggaatatgttctgtcccatacgttctaggcttcagtttcttccataaaaagtaggagttggactaaatggtatctaacaccagtttccatattaacattctctcatctttggctggggcgtgtatgtgtgtgtgtgtgtgtgtgcacgtgtgtgtatacagatttttctggaaaagaaagattaaggatacgatcccatacacactatcatcaccatatgtgcgtgcattcctgacatggctatgggccccacccatgccatatgctccccacactttgtcagcctggctgtcctttattgcccatcatagctcagcctgccacatgttcctgtgcgcacgagatgcactgacacaggctttgtgaaggctgactccatgtcttgttctcctcgctgcttcttgaggaatcctaaatccagctgcaacctccacacttgcatggctttgtagaaggggaaatgtaagagtaggcttttaatcagctcacacatattttgtgaggcaaggtctgagagggctttgtgaagccgctattcactgcatcatgttgtgggatcaagcctacactttgtatcatatggaaacactgatagtgccagataaatactgagacttaggaagaagcatactgtacttccaaccatccaaatcgtggcagaacctgaggacaaagcattcaactaatatggcagaactctacaaggcaggactgggatggaagtttcggaaaggaaagatttgtgactctctgaaggtggttcacatgacccttgctgtggagggaaatggagtgccacctggaatcatgcttcccctgtcctgctgaggttcgtgtggatatgtgtcaaatatttttcagagattttaaagaaattaaaattaacacttgattcaaccctcagatctatcacttataatgcggcctcggacaggccatctaacttctttaagcttttttgtcctaatctttagaataatatattacctactatgctgccttttttcccaggttagttatgaaattcaaagaagatgatgtttgtaaaagcaatttgtaaacaataaattaaccagtggttatgtgctcaacactgtggagcctttcactccaaataaaaacaaatcaaaacaaaaaccacctccatggatatataggcaattttgacatgtaacttctaagggtctgcttaacaggctcatgtgtcagaatttgacaatccatgaaatagagatcaagtagtcrtaataatatcactgccttcatggcagaggctgcatatctgtttctcctattccacttcatctccccagtgctcacacatacaccctgttggtttgtagttagtgaatgattaaggaaatgtgcgtgtgcctgtgtgtgcttgtatgttgtataggtgtgtctgcactgcccattcttgcatttctatcttttaactgttatggatgtataagcactatctatgatggacgaggcatagtgcatctcctaggccggaaatgtttcactcactaatgagctggacaattctactctgtgaatttaactttcctgactcccttatgcaggttaattttggtaacatatcatattttactctggcttggtgggattaggtgggaaattacagattgcatcaacaatttggtctgcctggatacaatttggtctgtttcagtcacagcctgggtcacacctgttgatatatatttttaaactgattcctctctagatcattctttctgatcagcacaaggcaatatgctgaaatttctcttttatatctgttttattagcatgtctttcaagtgctccttaatcttccaaagaaaatggaaagagttcttatattgtgctacagcctttgtattcacttggcaattgccaacttattttaaaataaacttttaaagtgaactatgacgtatctatacaatatgcacaaatcatagtatacaactttatgaattatcatgagctgtcaccacccagacaaaaaaaaaaatactggcaatggcccctgccccccacaaactctctcatatcgcaccctaggcactacttcttcctccataaaggtagccaacattcagacatcatattctatggattagttttgattacttttaaattttctataaatggaagagtgaagtatgtatatttggggatttttgttgttgttgttcaatgttaaacagtattccaaaatatwggagttcaatgtattagtctttttccttatggttagtatttttgaagtcctgtctaagcaacatttgtctactcaaaggtcmtgacggtattatcctgtgttatcctttagaagtgttgtattttacattcacatttagaactacagtacacctaacatttttatatggtgtgtagtaagggggtcagtaattattttttcataaggatatmtgaaaagacctgacattcctcactgcttttttcataaatcaattgtcttcatatatgtgaagttgtcttggactctctattctgtcccattagtattcttgtctcttctgggtcaatgcccttatctgtcaatgactacagttttataataatgtctaatatctagtcatgtatcaaaaccatattggctatccttggctctttgaatctccatacaagttttagaatcatatgtgtcctaataataacaacaacaatgaaaaaagatgatattttgattgggattattttgaatttataggccaatttgtgaaggattgatatgtttgcaatgtgacatcttctaattcatgaccatgggaatgttcttccacttatttaggtcttctttagttaactcaataataatttttagtttttcttgtgtgtgtgtgtgtgtgtgtgtatgcatgcatgtgtgtggcagtcttgtacatatttcattatatttatatgtatatgatttttcaaaatagtatggtaatatgatttacttattttttgatgctagtatataaagattgaaataattctcatatgtttattttgaagccagaaaccttgctaaattcacttatttattctaagagtttctagagtttttggttttctgtacacaaatctccctgtaataatttttttctttatacctattccttttatttcatttcttatcttatagaattggccatgacctctagtacaatattgaacataaatggtcttgaaagatacccttgtctcattttcaatctcagcttttaattttattatgtctaatgagtgctatagaactgttatcattatcctttatcaattagaaaagkcatcttttcttttgttatgagttttcaacatcaatgggtattgaattttgtcaaatattaaatattttgtgcctctgtagaggtgatcatttgcttttctcctttattatattaatgtgatgaattacattgatcattttttaaaatagactttattttargaagaagtttcaggttcaaagcaaatttggacagaaaatagagtaacttcccagatactccctgccttgacacttggacagcctttcacacgatcagcatctcacaccaaagtggtacatttgttacaattgattaatctacattaacacattattatcacccaaagtccatggttgacatcagggttcactsttagtggtgtatawtctatgggttttcatagatatgaaattacatgtttccactattagagcatcatacagaatagtttcactgccctgaaaatcttttttgcttcacctattctatccctccctcctaactattccctggtaaccactgatctttttattgtctccatagtttttccttttccataatgtaatataaatggaatcatacagcatgtatccttttcaaattagctttttttcagttggtaatatgcatttaagtttcctccatgtcatgttatcacttgatagcatgtttccttttagtgctgaataacattcattgtctggatgtaccacaatatatttatccattcacctacttcaattttgacaattgtttataaatctgccgtaaacatctgtgtgcaggtttttgtgtggatgtaagttttcaattcattgggtgaataccagggagtgtggttgctggatggtatggaaagagtatctcttgtaagaaactgccagattattttccataatggctgtaccattttgcattcccaccagcagttattgagcattccttacttattttccacctgtatatcttctttgataaagtgtctgttcaggtcttttatccatttttaaaattgggttgttcatttggttattattgagttttaagtgttttgtatattttcgataacagtcttttatctattgtttggaaatattttctcccagtcttttaaacattaaagcaacttgcagtcctgaaacttacccaactttattgtgttatgtgaatacacattgccacatatatgaacacaaaattgaactgttaatattttgtttatggattttgaatctgtgtttatgacaaagattgtcctagaatttttctttctggtaatgctcttattaaatgtcagtataaaattttactaccctcataaaagaagttgaggaattttcttgttttttctattctttggaagagttcatttaatattggtgttatttctttcttatgtatttggaaaaattcatggctaaactgtctaggcctggagttttctttgtggtaaggcatttaattacagatttaatttctttaagatatatgactattctattctttattatacctgttttgttgtatttttaaaagatttttaaaaattgatttaaatgtcaaatttatttgcataaaattgttcctagtatccttttatctatttttcaggtactatattgatactccccatttcttttctgatattgtaatttggtaccttttctattttactcttgagcagtctcattcctacccccatcccagaaattataattttataagtcttaaaaaagttttggctttgttggctgttttaatgtacatttattaatttcatttattttctgtttttactgtttccttcattccagtttgttggttttattttctgttccttaatttcttaggatgaataattagatcactgatgttaggctttcttcttttctaatatatgcatttattgatatatatgtctctaagcgtggctttagctgtatcctacatttttttatgacatactttcatagtcattcaattcaagatcttttctaatttctatgctgatttttttgactgttgagatatttagaagtatgtagcttaatttcccagcacttaagtgtttcttagttatcttttgttaataatttacaggtaatttcattccggtcagagaatatacttggcacaatttctgccttttcaaatttcctgatacttgctttatagcctggaatatgtttaatttgggtgaatgttctctgttgtgcaatgtctttagtcctcacgtgcagtattcttcatttgcgtgtgtgtatatacatgtgcgtatgatcaagtttgaagattgttaattatatttttcaaatcttttatttaattcctttttgttatctgcttcttttacttactgagagaagtatgctaaaacctcccactatgattgtgaaattctcctttttgtcccctatagttctgttgatttttgtttcatgtgtttttgaacttatacatttagaatttctacatcttcctgaacaaccacctcttttgtcattatgaaatattttccctttatttttagttatggtccttgtcttaaagtttagtttatttggtatttgtaaacatacactttctcttatggctagtatttgctttgtgtagtttcttttcacttctctactctcaaattctctgaaggcttttatttaaaatatgtttcttgtaagcagtatattactttgaaatccattatgaaaaccttccttttaatggtgatatatagactatttaacaattaatatagtgacatcttaactaacatttaatatagcttccttgtgacacagccgccctttttctaatagtctcaattatgtctcatttgttaaatataccaattaaattattagtttaagctatcgtatgtttcggccttgaatttttatttgactctgttgtatagttgtcatttcttttctaaattccttcatttgctgttttgcatctttagaatatatgtgattgatatgttccagtccgtggctaataactccaatatccatttcttttgtagcttgttatctcttattgattgatggtttggatctttgggcatttggttttgtctcttcgtatgccacatgatatttcatacttgacactgagtacaaaaattataggaaaaaacttgaggctctgaataatgttatattccttcagagaagacatattttgtttctgggaggaaggtctggtgggggaagattgccttagtccagttagggatttattccatgggaaactgggctgcagacttggtgaggacagatctatttccagttgcccttccacctgtgatgtagtttttcagggtcctcgctgaaagtctgggatgtctacctggaccccttctccttggcatatcttcagtctaattttgtccaccaagacttataagactgtgaagtttggttcagctactcagcctcttcattgcaggttgagaattgaaaattgcttcatgagagacagtagcactgaatgtgggactcaggtctccacacgctcactctccccaagatcttatcctctcaggtcgtcactgccttagtaactcactgaggccctgacgtaagattttctacacatatttagctcagcatttttagtttttctcagtgggagcattggtcttcagccagctagtctatctacttcactctcactctcatcaaattattttattcacactttacagatcttgaatttgaggctaaatcatccacattacaaagacagaaacccagccccgccatgctctcctcagtctgtctaatcataagacataaaaagctaagcctctttctactcaggcccctatttcatgtctcattctagggtcagttgtcaaagaaatcttgataagaaagtattaattcttaaggggaagctcttcctcatggataactgcattttattaatagagctgttttgaaggcctacagcctttgatggaaataactattttggaagaatagaagtgaaaggtttgctgttgtttgcttgggtctcagtaatacccctggggcatctacccctacacatacagccaactttgcctttgaatctcccctctccatctgaagtctttgttctttccaatgsatttatagcaatttacttcctcatgaaaaaagaacttgcattcctgaatctctgcaatgaactgaagaagctaactgtacaactcaatcctgcccacaagtgggcaaaccaacaaaaccctttgagaaagttatatcctattttatctaataatggtcaagatgcaaaagacgtgaatgtcctcttttatagcaaggacaaaaaactccacgaagatgagtgtatttaaaaaacaaaattgaggccaggcgtagtggcacatgcctgtaatcccagcactttgggaggctgacgcaggcagatcgcttgagtccaggagtttgaagccagactgagtaacatggcaaaaccctgcctctacaaaaaatgtaaaaattagccgagtgtgatggtgcacacctcagtcccagctacttgtgaggctgaggtgggaggatcgcttcagcccaggagatcgaggctgcagtgagccatgattgtgcctctacactccagcctaggcaacagagtgagactctgtctcaaaaatagtaataaaataaaataaaataaagctgcttattagttgtttgacctagacataaattcatttaacttaccatagccttgatttcttctctgacaaaatgggcatagcaatcataccctttcataaggttgttggctgggttgtatgaagtcattcatgtgattattgattaattgagtgatttttcagatttcacaagagtttgaaataaaataattaaaaattaataaattttgttataaagggaatggcactgtttcaaacttagctgctgctattgctgctgtttggtaataaattctagtccccttttgacttcgatcaaaatctgatgccctaactcagctagaatgagttttcccattgcccatgtgtctatttttgttaaacggtggaccctaatcaaccgaggaggtgtttgttatagaaaaccaatgactaggaatcaccttctcagatacagaatatgaggccccaaggggtgaggggaggtgtccatggttactagacctgggggtctcctgacttctaggctgcgagggaaaatatcacagagtatgctctgattcctagagggccagaggggctcctttgtgatcccaagttctggttcaccttctatatggagttgtgttctggtcttaagggacttacccttccattccatcactttctgccatcaaaactttcctttctgttttctragacaatatcaatggctgtggatattgaacaattgtctgataaaagtgatttttgacattaaggatctaagtgctcatatttgagagtctgatctagtgaccctcatgaataacaatcacaccttacttagtactgggattttccctttacagttgatgtttacttacatgattgacctgcgtaacagtttaaaacaggtaggaccacgaggtcaggagattgagaccatcctgacaaayatggtgaaaccctgtctctactaaaaatacaaaaaaaacaaaaaaattagtcaggcgtggtggcaggcacctgtagtcccagctacttgggaggctgaggcaggagaattgcrtgaacctgggaggctgagcttgcagtgagccaagatcgtgccactgcactccagcctgggccacagagcaagactccatctcaaaaaacaaaaacaaaaacaaaaacaggtaggaccacaacagtaacaataactgccattcatcaagtgtattttgtttgcaaaaatatyttcactttcatttcttatttaattcatatgctaatccttcaaagtgggtgatatcattacccatttaataaaatggcaattgcagctcagaaggcaaagaatgtgctcaggatcataaagccagtaagtgatgtagagagattttcaacccagtttgttgattaggcaaaacagtagtcttttcacggcaccttactgtctttcccaagttatttctccaacctgtacagagagattgtgccttgactaaaaagcgccagcaagtttatgatgggtggttgagtcaggagtagagttttaatcttctaaaccttaacccatctctctttctattgaccatacacttttctccccattagcatctcagcttttagaaatggacattttgtgaacctccccattgcattgcatctcagttgttgtatttgagrtgctggaacgtggagatgcaatgcagtgaactcaacaatccaaaatagccaatccaaaattttggtgtctaaagagttaccatttccactataacagatcgccatcaaatttacttaatgtcaatatcacattatgtacactttaatttccaactcagaaaaaaaggtctagatctgtttgtggctttattaccaatgtcaccattatttttgagccattagtataaggagttcagatgtttgagttcctagagtattaaataagagagaatttagacaaccttaattttttttctttttttttcttttttaaccattgtcatgagacagactcaagttcaaatcccaactcagtcatttattgattgtgtggacttggccaagttrcttaacctctgcgtctcaatttcttaacttttaaaatggagataaaatctaccttgaaggattataaggaagaaaggttatttgtaggcagtacttggcatgcaaaagctataacttactaataataattattattttatttatttatttatttttcatatatattttttattatactttaagttctagggtacatgtgcacaatgttcaagtttgttacatatgtatacatgtgtcatgttggtgtgctgcacccattaacttgtcatttacattaggtgtatctcctaatgctatccctcccccctccctccaccccacaacgggcgctggtgtgtgatgttccccttcctgtgtccaagtgttctcattgttcagttcccacctatgagtgagaacatgcagtgtttggttttttgtccttgtgatattttgctgagaatgatggtttccagcttcatccatgtccctacaaaggacatgaactcatcatttttatggctgcatagtattccatggtgtatatgtgccacgttttcttaatccagtctatcattgttggacatttgggttggttccaagtctttgctattgtgagtagtgccgcaaataaacatacgtgtgcatgtgtctttatagcagcatgatttatattcctttgggtatatagccagtaatgggatggctgggtcaaatggtatttctagttctagatccctgcagaatcaccacactgacttccacaatggttgaactagttttcagtcccatcaacagtttaaagtgttcctatttctccacatcctctccagcacctgttgtttcctgactttttaatgatcgctattctaactggtgtgagatgatatctcattgtggttttgatttgcatttctctgatggccagtgatgatgagcattttttcatgtgtctgttggctgcataaatgtcttcttttgagaagtgtctgttcatatccttcacccactttttgatggagttgtttgtttttttcttgtaaatttgttggagttcattgtagattctggatattagccctttgtcagatgagtagattgcaaaaattttctcccattctgtaggttgcctgttcactctgatggtagtttgttttgcygtgcagaagctcttgagtttaattagatcccatttgtcaattttggcttttgttgccattgcttttggtgttttagacatgaagtccttggccatacctatgtcctgaatggtattacctrggttttcttctagggtttttatggttttaggtctaacatttaagtctttaatccatcttgaattaatttttgcataaggtgtaaggaagggatctagtttcagctttctacatatggctagccagttttcccagcaccatttgttaaatagggaatcctttccccatttcttgttttttgtcaggtttgtcaaagatcagagagttgtagatgtgtggtattatttctgagggctgtgttctgttccattggtctgtgtctctgttttggtaccagtaccatgctgttttggttactgtagccttgtagtatagtttgaagtcaggtagcctgatgcctcctgctttgttcttttggcttaggattgacttggcgatgyggactcttttttggttccatatgaactttaaagtagttttttccaattctgtgaagaaagtcattggtagcttgatggggatggcattgaatttataaattaccttgggcagtatggccattttcacaattttattcttcctatccatgaacatggaatattcttccatttgtttgtatcctcttttatttcattgagcagtggtttgtagttctccttgaagaggtccttcacatcccttgtaagttggattcctaggtattttattctctttgaagcaattgtgaatgggagttcactcatgatttggctctctgtttgtctgttattggtgtataagaatgcttgtgatttttgcacattgattttgtatcttgagactttgctgaagttgcttatcagcttaatgagattttgggctgagacgatggggttttctagatatacaatgatgtcatctgcaaacagggacaattagacttcctcttttcctaattgaatgccctttatttccttctcctgcctgattgccctggccagaacctccaacactatgttgaataggagtggtgagagagggcatccctgtcttgtgcccgttttcaaagggaatgcttccagtttttgcccattcagtatgatattggctgtgggtttgtcataaatagctcttattattttgagataagtcccatcaatacctaatttattgagagtttttagtatgaaggactgttgaattttgtcaaaggccttttctgcatctattgagataatcatgtggtgtttgtctttggttctgtttatatgctggattatgtctattgatttgcatatgttgaaccagccttgcatcccagggatgaagcccagttgatcatggtggatacgctttttgatttgctcctggattcggtttgccagtattttattgaggatttttgcatcaatgttcatcagggatattggtctaaaattctctttttttttgttgtgtctctgccaggctttggacaaccttaatttcttattatgctcactacttcttgtggctgagccaaaacactcatgctacaagactaaatcagtttctggagtttagaagtctttagtgctttcttctactttattgaattagttcttcattgagagagagagagcatatctaggaggagccagcctgtcttggattgtagtgatattttgaatggttcctttacttgtttttgaaagctcataaacccctgttaagtagactaggtgtccagaccttcatccttgatgctggctcaggcccatctgtggagattgacatggctttaacttcatgatgaagttaatttcatcttttaacttcatgatgaagttaatttcatcatttaacttcatgagctatagacccatcatagatccatcgatccagttttccttccaggccccacattaactgtgccaagaccagaaaacacagagacttggcctagacttttttcttggatactcctttcttgtgagattgccactggagctcagcatcttggcctctccctatgagatacagtgggggtgaatgaggagggtaaaccggctgaggatgcaaaaaagagaatgactcactagctgtgcatcttagcaaggcatggaacttctagcacgtggctgctggcaaaagctcaaataactgtatatctgaacaaagaaaccatattcaggactgctaaatcccagcaacttaaggctctgccaggcaaagcaagagaaagaaaggggaaggatttgagaaggggttaattgagggtgaggtaaagaagttttactctgttatcatgttgaccaatttgtatccatttgcctttctcctttgagtcattgtcatttcagttgctgagaagtggactgaaaccttgctgttagatgaggaaataaccctgccaattatacacacacacacacacaaacacacacacacacacattccccacactggcatgccactgcctttttcaagataggaggaatcccttaactagttatttcatcatgcatgaaaaaccccaaagtaaaaatgttggagaattaacaaaaaaaaaaaagttacagccgccaagccaatgttgcattattttctcaaaaactcatgatgtcatggacttagctcacctttagtgcagccatgcgaataatgtgtactgagctttctatcatgtaccattataattagctctgtcaggtcttagccctgcaaccctcatgcagataatatgataatatgtcttcataaccaagtgaccttacatgcacaatatttctccccttatgaagattgcatgtcaataaagtaattgagtctcagaggctgcagcgagggaagatttaggtgattggacgtggagagcagtgatgtatgatgattattattcctcttgtcagggaggcgcgtacaagcgaggatggccagaagatgacagggatgacgggttgcgtttcattaaaaaaaaaattgctgttaatcaccactctattcttttcaaagtcactgaggaaagaaactcttttttcattgtagctacaatgaacatccccaaatgggagcacatcgtaagatttttagcctcagtcccctttcacagtgtctttcttctgttgcaaagaggctaaattaagattttaattaatagatcagccatgggggcctgggcaggggccacccagcttccctgctgtagggctccttgggtttccaaatgcagaaaaggcgcctgccgagatggaattgcacttcctctcctctctgcgttgagagaagtgtgctggtgagctctataaaaagaaagcaaatgtgagagaaccagatccgagacaactatttttacttgaattaatttgtttggacagttttaacacttggaacatttatatttccatactttataaaagcaaacatgctgtttctctagctgtaaatttatcttatgatatcataacagctggaaacttgtagcctggtaggattttgtttcatatttaaacagcttgagaaatatgtcggaaacaaggtatattttcccccatctctgtgtgttttctcctctcgtattaggctaccttaggagtgtyggcagtatcattcagaagatactgaggctccaggatttttattagcctggcattgttaattgctgctcccttgcaaacctcttcctataaatgctgagaacacactggagccccttccagaggagttcaagaatcttttcaaggggaaagaaagctaacagtaaaagcatcttttgttggcagaggggcttctgaagtctttaaatctttgttcataagtaattgactaagatctaacagccttgaaggaaaggagctgatggtatcactttttagtcatagtattaaccttgtgatttatggtacaaaattagccactgcatcctctcattacgggtgctgagtgatttctccaggcaggcaggagggaattgagagctggatttttgtctcctggagctctactgtttcctcctagggaaccacagtgagtgtttttagggataggaatattgttttccttccattttctctgctctgtaaaagaaaatatcaaatgtaagtaaataaataacctaagggagctagaatgttcagaggaaatgttaacccaagggtggtccaagggtggcagtatagaatatagagtttcagatagggtcagtgagtgatttcaacctcctaattgtcccacaaccccctcctctgcctccacaaattcaaggccaaagctttctgagtattttttccattgaatagtatctggagtagagattatatccatttctccatctggatagttttttcctaatgaattaaaaaccacctaatagacttcagggacactaggaagactctgatgatttcaagaattcataatccttattctatgctgacattgaaattttacaagtggagctttatctctacagttcaaggctttggtttctggtgaaaaatatgtctctccctgggaggaagaagcagattaacctattatcagttatttacatctgggtggaaaaaaaagatctaaatattttctgaatgctttaagtagagaacaagcaagataataaccaggtgcttggggagtgaatttacgtgtttgaggcgggctgatgcagagaggagcagggatgcgaacgggcccataactaggagctttttgctgttgaaaagcaactttgctgactgcacagtttgtgtgagccctcctacagctcagttctctcctcacatcagcctgcttccctgggtgacgacagtgttaaaagcacagacttcagagttagactgcataagttcaaatcacttctctactacttgcaaattctggggcttgagaaagtcactagtctcctgtatgtagctcagttttctcatttttaaaagtgacaataatggtgccttgctctagggcagttataaatgtaacatcctcataataaccaataataagagtataatcagtgctgcctgttgttattatcccagtggatgataacttagacctatgctggattcgttgtcattggtgatggtggtggtgctgtggatgataaagagatgatagatcctgatatggtttggttgtgtccccacctaattctcaacttgaattcccacatgttgtgggaggaacctggtgggaggtaattgaataatgggggtggtctcccgtgctgttcacatgatagcgaataagtttcacaagattttatggctttaaaaaacgggaatttccctgtacaagctcccttctcttgtctgctgccatgtgagacatgcctttcaccttctgccatgattgtgaggcctccccagccacgtgaaactgtaagtccaataaacctctttattttgtaaattgtccagtctcaggtatgtctttatcagcagtgtgaaaatggactaatacagatcctaaatatagcaagtgtactggtgcttaatttccctttgtaaaacttgagtcctggctgattatctccaaactttcccttgacttctttccctgtattttagttccagtgtgtataaaagtgaaagctgaactttctgaaatgtcgtgggtgtgggcctgggggtgctgctggtgtggtgctcctttactggctctgtcttgccatagatctccacagagccctgagctgtagggctgttgatgacaaaaagagaacataaaatgctagaggaaagatcattctaacacggtgcaaatccccaaaccttccctacaatttctctgtctcccatgcctcacccaaagcaacatttggcctagaagggaactttgagatgatctggccccatgcctttcacactgagctatgcggaattctagcattccaatgagacttgtcagaggtgcagggggaacaagtggtgacccatcagggtggagctaacagggctcccaaagctggcttccaaatccatttttatccattcaatacactggggtctaaaggaaaatatcatttaatgaaaaaattttattgtctaatgtaacaacagaaggttcaagcatcagtgatctagtccatcttgttcattttacagatgaggcgcagaataggcttatcactggctcatgtcactgccagttagtcatggaccctagccttgaaattgctctttggaaaccccactgtttccagtattgtgtctgcatagtggcttccacgggccgagggctcacctcattgccccctccccacatgccctagctggtctcttgaatgactatagcactagcatgtggtggccatgtgtgccaccagtgccaccaccctaatggcagctgtgattatcagcacagaggcccaggaagaaggacagaatggactgctggcggatgaattgggaggggagggaatgggcagaagtggagccacattgaactcagaagtataagtgaagaacccactataatgttgcatggggccttgttcagcaaaggaagattgctgtctcccagtccagtgcagctgaattaagtgatctggccagggtggcagtggggcctgtgttccttctcacaggtatctgtgttaatgggcacccctgcctggagccgccagtgtagctgcttggatttcttattcttttatttccatcctgtctccttgttttctgtcactgtgtcatgtcaaatcattgtcaggtggcagacaccacaccccccaagtacaaaggtatcaggtttcaggacacaggctgaaatgaatataataatgggagccagaacgaggcacagaccacttagcaggcaaggaaacagctaataagtgttgttagtggtttccatggggaggacctggcgtgcatttcttggacaggcaggtggagcacggcctgtcctggggtccagctacagacaggcttgtgcgattagtattgatgcctgtcactttgtggctgccaagctgttgattctgtgaaagaccaaagactctggttatctggtaatcaacactgctctcaggaacgcactggggaaacagaaataggctttcctgagtattgactgaagccatggatcatgttgctggtttgtgttttcctctagccccagccctgagattgctccagcctgttcttcacctgcagtgccaggtaaccattcttatttgtcatgggatcaaattctaaccctcttagagtgagcccatccaaatgctctgactcagctgaacactgatgtaaccagggtgacttgggcgacagcataggaaataagaatgcatttgcatgtcaaggtggaaattcagtctctcacctttgacaaattcccacacctttgacaaattcccaaatccaaatgcatggttgacgcttaggcttcttcttatcccactccacctcacctttgcttttttaaaggctctttaaaaatataaacattaaaatccaaaagggttagtaacagaagaataaaaaatataattcgttttctctcctaattcattttcttggtaactgttgccttctcatatcctcttctttctttyttttttgtattcaagaactttaatatcttatttttccaaaacatcaatgtcctgattatagtgaaccttgaacagacatctcctcctgcccatggaaaatgagttctgacttttcttgggttttgttaagttttaatctctttttttctctctctctttcttattcactctctctctctctctttaattttcttcctttctctcccctcctatctcttcactccctctttctctcccctttttctcccactccccttcccaaagctaaaaaatgctgaaacatgattgcttctttctttcttatgtaaggagcaatgggaactgaggttacacagaatgtgtcacaaactggatatcaccacttagctaacccataaatccacccacttacctacccacccatcagttcatccatccatgagtaccttaggccatccactcatccatctgtccatccatccattcattcatccatccatccaataagtgccactgagcatttaccattggccaggctctggcaagatgctcaggatacaacaataaatgagctttccatcttcaaagagctcaccatctagaaaaataaaaccagtgctggatggtaagtgatctgtgataaatggtatggatatatgtatgtgtgtgtgaatgtgtatacctacctgtacacgcacacactgccacccaaccattaagtgtctgcttggcttttgagttgtattcatttgtagattaatcaaacaactcttcattaatgccagtagccaggcactgtgttaggagttgggtttacagaggtaattaagatacagacccttcttattcttaagtttctcatgaaacacagcctggattatccttccctcccacccygccacgtttctgccccataarctagaccattctctggtaatctacttagttttttagataaactaagaataatctatatgacatagtccttcccagtacttaaggaagggaaagtatcattgaatatatcacttgcaaaggagcttagagattatcggcccaagcacatctctttgtgaatgagaacactgaggctctggaggagatgaagtgacttctccaggccacacaggaaggcattggcagaactataacttggccttgccaagatgtggcctttcagtccttcccaatgttctcaccccaagtttctctttcatgaggccccagaagctgcttagattcagacaggccactagaggctgatgcagtcatctgaggccatggcatgttacctctcagagcagaagggagaggcttccctctgtggaggggactgagaaggctacccatgactctgaatcaagagtggttttataagtcaagcactttgtcttcctgctcttcagagaagctaaaacaagaaataaccaaaaggagacaatgtctgggtcagcaactgattacatttttgatgtcacactgccttctgggttgggagaagttgaaagacttcatagaatcacccccgctcatcttattcttggtgaatactcttcacacaaatgtcccaagtgccatgctcatagaggggttggtgcttgggtcatcagtaccttaggccatagcagttctcagaagacattatccagaagcaaaaagccattatctagaagcaaagttcaggaatgaagattcggtctctcataggtcctgctaacacttatctttctggcaaaggataatgataaaaagaccgaacagatgacaaaaagaaagcctacattccagatggattgtgagggttagggagaaactgggctgaagcaaaatgctttaatttttgggatattggttatttccccagtttttactttaaatctgttgctccagaaataaaaggacacgctaggctttagttatatgaaaacatgatattggttctgtatgctgagaggagccagaggtgggttgagagcccagctctgtggtgatgggccttggaaccatgtctctgatgttctcatgtgagaagcagatgagtagaggttggtggcagagttagtgaaatagaggctggctcccgcttcccacagtgctcagggacaaatgtggagtatattaataaatgcagagtcattaatgctttctgtgagtgaaaaataagtgtgtgaagaaaagactccattgtcattggactgtaaatggtgaaagggtggaaaatgaaaccaggcttgtgttgccctcctaggatggctgtgatgacccaggccacttggggttccacatgagccctgtggaatgtgggctgggccacctgcaggtcaggctgttcatgctgttgccctcaccttctctacgggtttcaaagtgaacccttgtgcagggaggtgtggcactccctgtgcctttgcttctcaagctgctgagtgacagtgacaagatgctggctttggagcaggcactacaggttcctatgyggagagcatcggtgctcagggaagggaaatccacccctgtgctcttcacacccagacagatgctcacagkttccagggatatacagggacatttctaaatctgtcttggacgtccattcactttatctttagccatggaatgctgacaagtattcagtacggttgagtgaccttctataggtcagagcaggctgtgttctgattgagtttagaaaactcataactctggccaagccttcarttggtcaggtggatggggctttgttaggggagactgcagccagagccagtgtcgcccaccttccttctccctccacctacctgagctgccagtcccttcccactcctcaaacaggacttctctggtttgtgaacacattttctcctcttggtgtgcagagcttttggttccagccctgtcagatagtgatggcacagacccagtggtcttttaatcatagcaatgggctcattgctttgaacttgcatagtctaaaaaaataaataaataaaacaggaccagcaagaacagctggaagaaatagaaggaacttgagtttaaaaagttggacacagcgatggatccaggctcagctggtctcattcctctgcctgaacagcttagcagaccagataacaaagaatccttttgcagctgtttttcttcaagttagagaattttagagccacaaaggaaactggagattatctttayagatgaagaatctgatgtccaaagaaattttccaaggttaaagagatatctgttgccagagccaagataagagcacagcttcttccaacaccttaattttattgttttgttttgattgttttcctttcagttagccccctaggaaatgtttattgaggacctactgtgctcaaagttctgggcaggcttctctgggtaaatcctgaattcaggtgtgtacatctggtgaggaaaacagtaaacaagagtaaaataagacagtcaggcaagagaagacaatgcccagaatccagtgacattcacaccaaggcttaaagtgcaacagaaaatgtgacagcagaggaaccaggaaaacctttccggaaggagccctgggaagagcagaatgggtgcattcaccacctctcctcacctactttgggatgctcatttgattgaatttgtaacaaacaaggcctttgggtcagtcctgcttcttccaccaacctaagggatgrtggtcattgctaaagcttcctctgagccagtccttcgccaagtggctttacctgtttattttatttggtcctcataacaaccataaggtaggttgtatcactgattttcagatgaggaaactgaagagcagggaagctagtgacttatcgcaagtcactcacctagtcagcggcaactctctgttattgatggggcttcacttacccttagtgtgaaacagaagtgtccttgagatcacatatgcccaaagacattatcaaaacacagacgtgtggtgatgcaggaagcctgagaacccttggcatctgtgcttttcacatgtagaaggaagaatctcattgcttggacatgaggggatataagcagcgggtcagggcccagcatcacactgaatagagctccaggaggctcacaggaccctcatcagaggctctctgtgtgttttatggttgattgagctttatgaccccaaagaatccgttatttgttttctttatagcaggcctcaaacactgggctttgsttattctttaaacttacaatactcattgcatgacagaattatttttcatttctctctttctttcagagccttggaatcccattaggaaatttctagtacaagcatttgtgggagatactagtactcgggttgggcatctgggagagatagacaagctcttattacagcatggaggatggggagattacctggccaagtatcatttcaggttgtggcagaaagagattagctccaatttatcaccgctcacattttcctcttttcccccgttttctgagtgtcatggaaatgatatttgtgaatcccaggggcctctcacagtggtgtcagtttagagatcttcccagatacatctaaatgtggacataaaatgtaatgggaagaaattgaaaaaatatctgtttctcgattctttattactgtggagttaagaaagctatttctcatgccgtttcataaatttgaatccaaatgtatatgttaatgtgtattcagatggcttttggatgattcaaacatgcagactcttttttttaataaagtttgtcaaatttctggcaatttagagatacatgtttagacaatgtatatgtgcatacctgccatatgtacatacactgtgttgtcaaaattgagcctaagtgaactatgatgaaaatttaaaataagtaagcttatgatgaatacttagtagttgaactcagtatttgatttgtaaaatataaacatgagtgaaattaatttttggctgcttagtccattaatattttacctaaattaaatttgaatctaacaaagacaaacatacacatttctctccaggtctattattatctctgtgacacaaaagcacagagggagagttcagactctaaaagaaatgcagtagcaagccccaaagagaatttttttaaatttcagggaaggttttatgagacaggaaagctcaaagacatatctgtgacatttaaatgtctaccatcagcttgtttcctaatattgccattagttttgctaattagggccaattacttaatgcttgcctgggttgtggttgggttgagggtgcatggtggttcatgcacaatctgttcttctgattcaaaaacaccattctctccttgcactgcttgatccttagcagggaaagcgcccagttagaagatgtgcctaaactaacacaaaggaaaggtgttgtctctgaagtttagaaagaattcagtgagctcctaacctcactcaagtgagtttgaaccacaggaccaagctggctgagtgatctcaggattagacaagaagatcaggagtgctccttgatcctcactgctggctgcaggctctcaaagtgccactgcgcctgcacccagtgcttctgagaggtgccagcagggatggatggtaacagtggtagtcccctgtgctaaatgcaggcgtatgggtggggaatatcttttggggtttccctctaaatagtgtcatatctgaaatctcagaaacagaagaacagtcagcatcatgtcttctgaaccaatgctgatcaggaaggttctttacggcagagttttcgaactgtagggtatagaacgaccccttggggaagtctttaaaaatcttacccatcactcaccagaagttctgattcccaaggttgggagtaaagtgtaggagctcacctcactcttggttgcatctcatgagctacattcctcaagcttaagtaactgacactgtacatagatcgttaagttaaagatacaagagcgattaagaatccagcataatctgtaagtcagtgataccaagggtatgggaggcaatgagggcaaagagagtggtgcagtctgggaaggcctctggaaaggtttggaacttgagcaaagctcattggccatgtaagatttagataatatcaggcaatagtgaatgggatgagtcctatcatttgtggacaaattgactaaacaatcacaatgcacataatttcaaatggccaaataaataatcttcatagtcatggttcagggtgggtaaaatattgagggtattacttctcaccccaaaatggcctccatttccctaataccccatctagacctgaaataaggtcagccctcttttagtttcgctgagttcagtagaactgtctgtaactagctttgcaactgatcttgtacaaggcaattaacttcacttagtctgatttccctcgtttgtataatgggagggttgtggtggatgatttcagatccctttcactctagcattccatttgacccagttaaatgcttctcattattacatgactggaaataggccaggtcaaatgatgccccttcaagcagaaccatcagatccggctgtacacggtaaagatggatattagactgctcaacttatcatcattagtcccgtagtctcataatgggaatgcactatagttcatatctgtcatagttagtatttggaagactcaaagctggtgagattattcacatatttattcctgtgtaccgcatatgccaccccacgtctccccttcatcatgtgtctatgacaatatattgaacagaaaatctccatcagctgactctgacagagtgtattatttacagtggtgtcaaaatgtgctgcttataattgactgggctcataataaaccaacctaagaatcttttcttctcatattccttcttactggtaaatcttccgcttgcattccttccttccatcaacaccttcttcattatttacagaggagggaacacacaccagatggtgcatgagtgatattgtagggtgactctttcatcttgggaaggcctctctctcttctctctctttctctctgacttaagattttgctgtggtaattaagggtgagagaaatcaagtcaattggacttagtttctaaagcaaacagaatacacttctccatttctctgagcttcaggagacaatgtggggtgacactaatagttgcatgggcaatttcattttttatcctcatgttttcacttactatctgtgaaacctcgagaaaattactgaccttctatgtgccacggttatgtcatctgtaaaatggggatactgatagtatctaacccataggaatgttgggactgttaaacaagtaatgcacataaagggctaaacccaaactaagaacaacaacaaatacacctaggccaaggcacacataaagtacggtcattcatgttccccattcatcaatagagagccccctaaaatgttcctgtaccagaatgtgtttggaattgcacaggsggagtggcagcctttccagcccccatccagcaggatgtggatgtgcgaggctctgcccccctctcctctccccagctgtgtacctcctcttgttcttctttcaaagactcattacacttggcatacacatgagattcttacctagcctgaggaagatttccaatttttattttgtggctccaataatcataggtattaagtatgactgcctctcctaggctaacctgcaaaagccagaggctgggtttctgtggcaccgtgctcactgaagcagtattttcctagtcatagcagccacctcccatctgccacctcgtctctctgcctggaatatccagaaacactttggtgtattattcccacatttaaatggacaaagtttgctcatagaaagtactaatttygatgagcatttctttttaatttaattgctctgatgaaaaccctcataatcatgtaattcttaaagattagtgtaaggttattgccctgaaaatatgtctagtttggcacacagggtaaatacgtgattattgctaacccttggttttacgcaagaaaattatcattatccatcaaagcaaaaatgtttagtagaatgaagtaactgacggaaaaaatgcctgaacatggggtcctgtgactgagattgatggaacacttatcatgtggctttaatcccagacatttgcatattttctcacaaccttgcttctcctctcagaggtttaggttcttagcttaaaatgagaaggtaaaactaaatcataggccagatgtggtggcttacacctataatcctagcgctttgggaggcttaggcagaagactgcttgagcccaggagttcgagaccagcctgggcacatagtgagaccctgtctctacaaataaaacataaaaaattatctgggcatggtgacatgtgcctgtggtcccagctactcaggaggctggggttagaagattgcttgagtggggaggtgaaggctgcagtgagctgtgaacacaccactgcactgggtggagtcacagagtgagaccctatctcaaaaacccccataaaaaccaatacrtaaatcatatgtatagtcaagtattttatcttaaaaatcagttgatttctctttttaggcgtgcatagaaatatttgtttgctgagcttctgcgacaagtcttacgtaatgaataaactctggtgttcagttgtcttctaatatagaacattttaatttctgagggaagatgcaatcattcttccatttgtgtgatttctttatttggatggacataagtgaagatttactccacctaggtctcaaaaaattgttcaattttacggtatacaaaaacataatagtggactaatcttatttaactgatgaggaaactgaggcaaaaacacggccaaggatgaattagctatggagtcaggaataggattggggtgccttcattcctagcacagtgtttcttcacctgtacctcctagaatcatgaaagccataaggtacctggtacctgaacttagatcaaacagctttaagacaaacagatgtgtacagtttcaaatgcaaaacccaacatgaacatatttgtttggtttaagggggctttctattttgcattctcttgcaaatgctgttttccaaaatgcttaccgttcaagttgggtaatagccatccttccattgactgatcatccactaccggctcttgactctggcatcacatcttcgagataatccgarctagagtttggctgtcatctagaattcacagttttagtttagcactttgctgactagtactttgcggattagataatggtagttagctttctgagactctgggatggcaagcacatgggccatgatatttgtagtagctagtgttatattgagaaaaactaaggggtctcaccagatgaaaccatctttaatatcactttgctagctatcaatacagcatagtgtagagtttaaagtgctttatccacatttacatttcaaccacagccttgttccctctagacatggtaggtgagatttttcatatgcctatcaccaccagctatatagatttgtaacttaccatgggttgtaaggttatattttggcatttcagaagctgtcctcattggatgccagaatatttgaaatcttttggaataaacaagtaattggttctgtgagagcttatgagttaaaattaacttaatattacccttctgggtttatattggtttcttctcctgatttttattttattaagcacctttctaagtcctggtaaggttgggtgtatggacaaggaaaccttctacttggatgaaagaaagccccatggaaggctgagtggatgagcgccgactcaccttggtatttaacatgactacagaatggataggtcttcacttctcaggcctctgcttcccattccacaaaaccaaagctttgttcagctattccctgggtggggtgtttgcctttcctctgagaaaatatgctggcattatagaaaagggagttgaggggtgcggttttcctctggcatagatcactttcatctaatctgaacctcatagaaagcctctgctgattcagaggacaatgactttgacctatttatttcaaggacccacccaggctcagcccagcaaaggagtacacagtgcttgctcagaacacagctgaaagaggaggtggtgttcaatgggaatcacaaaggctatggtagaagtgagtaatgagagctgggctcgagccctggtctgagttcagtgtggatgtttaaaggcgaccattcttaagaggcaagagaattcgatactgggttcaaatctcaattttattttaaaagtgcatcagtaacttgtagctcatttgatggcctgcagcccagcttgtttagaaatcccttctattctctctggtactccaagtcccaaagaatctgttctgatggtgtggttacacaaccagccaagcacagccttaggttgctctcaactcagaactcaccctatcacacgttgacgaatgcaagagcctgttagagacactggaacccaagatggtgagtaatactaaacaaaggccaaactctctaaaatgcttaggccaggaagaaggacaatggggaaaaaaagtttggatcagtatgtatatgtgtgtgtgtatctgtatgtgtactatatgtgtgtgcatagtgtatacatatgtgcatatatttgtaatatgtaaaaattatatctataattgtattcatgtacatatatacatatatgttcatgtgtacatatatatgtatatttatatccatatatatttatattcatatgtgtatataggtattcccatcrtatgtgcatgtatagtgtgcctatgaaggacaaagcgcggtgcaaagcactgtggggaatacttggtagattaagacacaggtcttcctctcaaggatctagagggcatgtagttattaaaagctgttaactatcccaggaatgcctacccttctccatgatttggtagctgatataggataatttgcccctggattttgtgaataataaagaacagaaggctggtatcacaacacttgctgtggtcagtttctctcctctctcctgaaaggcagtaatcacattttctagttgtactgcctgcttttagaaaaggtctctgctgctatccaaccagcacagtccctctttgcttcagggtcttggcaagagcaggttctgattctgaagcattaacattcttcagggctctgactcccctcagaggtctgtttgcttctgaccctgcagatgcagggcatcacggatgtttatttgtctgttacctaaactcaggacacatgcacagcagtaaattcttcatttgccagagttaatcacagccatgctatagcttatatcattcccactgcccattgggaaagccttgaaaatatagatgggatttgttctccagcaaataagttcaacaaaccagattggtgagactacacagagggagaggtttgagttggagtccctccttgggtaatatcttattccattcctgccaaggatcaaatttaagacttgctgcattccaaaaaaatagactagtgacaacttggagtggagggaaacaagaaaaggttctgtttgtttgctttttcattaaacatttttaaaaattaagaagtaatggagaaaaatataatgttactcatgttttcccaattcaactgaatatgaaaaagtgctaacattttgtcatatggacttcagatcatttttattattaagaaataaaatatttagaaataaytgaagtccctcacattcctctccctagtcccagcttccccaaagcaaatattgtcatgcatttggtgtgtagctagtccttttatccttttattgcgtagatctgtatacagctataaatagtatacggcattgttttagtacttttaaaaattattatcacagtgttatactataccttttaacaatgtgtttttattttatcaacattgcgtttttcagaattatctgtgttgaggtatatacattgtgttcactcattttaactgctatacagtactccatcatataaatttgatgcagcttatttattcattcctacacagatgatcatttccaaatttttgctattgtgagcaaagctgcaatgcacacccatatatagtcaaccctccatatccatggtttttcatctgtggatttaactgtggattgaaaatatttgaaaaataattgtgtctgtactgaacatgaaacagacttattttcttgtcattattccctaataatgagttctacagatatcttctatgtcaagattgctaatcatgctgctttttcttctaaatttaattttttcttaatattttgtaaccatgtttatgtgtttctcataaaggtgttttattaatgaagttaagctagtaactagtacttccaaaatctagtaggttaacacaacaaaaatcttgtacaaagtgagctatgtaattgtgtgattcctgcagtccacttggtgactcacagatccaggttttcatctcaagaaaaagcaggttggagctgccacgttgcgtggaaaacttacacccacttacttatgctttggctgggaagtggcacatgttaattccactcagagccctttgggcagacctgccttgtatttctaggtgcagagtggtctttatttattatgctcagctgagttggtgtgtgcctttagtgtgagaatttagagttttccttagttatggaaaagttctctattgttagctgtttaaattgcttctcagtagtcctgctgtggcctaaattctggaaattgtgttcggtatatgttggagactccatactacttgatttctttcttttttttttttaacctcgttatgtctcagtgctgcactcagaattatttcctcactactgccttccagttcactagtgttctctttaaccatggaaactcttgcgttaatttcatttatagagtttggagatttcaattatattatttctgtcttctagtttctatattgattattttgttagtcatttttctcattttatatctattagtttacatagtgctttcttattcaaaaggatattatcttttactttaagtattttttaaggtttttcagagacaattatgtgcacttttttctgtagtcaaattttcctctgattgttgagttctgtggatatcttcttggttctgtttttccttattggttttgaattttaggttgcttgctcatctagagtgaaaattatctttaaaaataaacctttaaatatccatcatgttttgcagattttcagtagtttccatgtggctccctgagaatctcaggccagaaacaacttctatgttagtggactaggattcctgtctcatagtggtattggggatattgcagatccagtacttagcagcttgtcacatatctggtctgtgtgacttgctctgttcattcctgtctcacatgtacatggtgatatagttcacagccttaatttttctcattttacccattcaggttggagaccctacgagttttatgctgtgagtcaggcttgtgtccctaaatcagtgttcagtgacagccttctctttgcctttgtctgtttctaacctagagttcaacaaccccatggttccagcattttttccttgatgtctgtttcagtacttttccagtgtataagagatattcatcttgtattgggtatagatacaacttctaatttttgaaatttcagctagaattgctttttgtggtgtagcaaggaaaatgtattgaatgtttaagtttacaatgttatcttgactagaaatcttttacatttattttaaagagtttattttgatagtaaaagaatagatgttcattaacatcttgaaaagcatatagaaaatatttaaataaccaaaaatataactgcataaaataattacagttaacatgtcagtgtgttgtcatctatattttgcttttcactgaatagaattcacactatatatttcgttttatatccttctcttttataccagccattatagggtggatttaccatgccataaaataatcttcaaaagcaatttttttaacagccccttaatgtcccaacatatggaggtactataaaaacataaatcatccaaattttaatatctctcttagcataaattaacaagtaattacttagtaaaagagtatgaatatttgtaaggcacttgatacataatgaaacattttgatccaaatacgctatttccaatttacattccaatggtagcgtaatcattctctagccagtactaggtattttctctccaattttaccagtaggatagatgaaaagtgccgtctgttgacatgttagtgctctgaaatattccgatatctcttttgatattatttcttaaattctaattctttagctgtatttttttctaaatgagactctagattcctctccttttctggttttcccagagaacctgttttaatattttccatttttcatgatttttgcttacatgcattttttcttctttagccttttgttgtgcaagcattcttattttatgactctttaggctgattgtttaattaattaattttagtaatctcctgtcaattcacaggcttacatgctttgttaacttctgagtctatattctgtaagtcttgatatgaatttgcttattttcatttatttccaaagtaggtatagcagatgtttatttactttgtgatctaatgtttattgaggaaatccccagatttatttcatcttttaacttagatttctgacattataattttattaaattgaagtttgagaatacagtttttttctttcaagaactttatcaaatatactaaatgaattgacaaattttaaaatgcctcaggggtatttgaaaagaacttacattttctttttgaagggtataaggaaatatatgtatatatatgagtttatgtatttatttataattatgttattcaaagatttcattccttttaatatttgtttaatctggctgacaattgtataatatttttcagctcttcacttctggtagtttttgctaaatagattttggtgtttgatgaatatattatatgtgtcataagttatatgtcctttatatcttcattgcagaggattccttttctcagcacaaaatattatcttcttttcccagatattgctttctgacttatatattgttgctatcattgttttttgcaagactttctcgtatactattgtttcaataaaaccatcttttacattttatttaaatatttttggtgagctgtatgtacttgattttgtaacacctattaggaaaacttaaggcattyatatctgttgctatagcatatatttgggcttaattttatarctttgtttaatgctttcttgctttttcctttttattctgggttttgtctgttttcatcttatgtagaggtttggaagatcaaaatattttcattaattgtactagtgataatccttttgtttataaactatatactaaatcctatattcctctgtcaaattcaagtaccagtttctaatgagaaatgtaaattatctggacttttcctgactttctacttctctgtatttatcagtgtttattccttttacctggtgttatgctatcaacattttatgataaaatcctgatttttaaaaatatatgacttttccagactttgaatttaattttgtgcccatgttacaacagttcttcatatgttttcctaaaaagttaattgatttcaaagttccttgccattttctttatagtttagctattgcagtcttgatttcacagtcttgagttcttgatttctctttttctttattagttgacagacattcatttttcgtgtgctttctcaggaagagaataaaaatgattaatgtttttatgattttaagcttagtaaaatgtcttcctgcaacctttttacatgaacaacttggacataaacctcttaagttatagacttttctagtcattgctctggacaaatcgtttcattgtcttctgacatttatttgattttgcaaagaagggtgaggccagccttatttttgctactttagagataagctctcattcctcttttcatttttgtaggattttaaatttatcattgagatttaaaacacaatagaacttccctaatatttctagtcactaaaaaagttcatttcatttggttctcactaagccattttatttaaagccttataagcatataaaacttataaagtctttctctggggcaatttctattttattaattcttttgtgataaattttctgttccttcctcagtaacacttcatctggatctaaattgtcctccacgtctgtcatcttctcttctatatttttcctcggaatattgagaaatattctttaaattttcttccacattattattttacattgtttcagttttacttctgtttatattgcctcaaatatggactttcattttaccattggattttgggtttcctaggttaatttcttaattcggccagtttactaattatctcttcattcatctcagaataatttttcctttgacactctgattctcttttacagagtctgttttacagagtttttgaggatagcaaacagatgagttctaaatcttgcttttgtctcatgtaaaaataaaatttcaaatatatcctcctcatctgagtcaacatggaagagctcctattctagatgatattgttgtctttttttgtagaatccatagtggcagatgtatacatatgtttttctatgctcatttttgaatagggattgttgtgctctaagaccaacaagcaggttctgtggcatgttccttgcttctrtgtcactctaatttggtaggattctactcttgaagtttgaagtgatgtacttaatttgggatgtctaggaagcattcttctgtgtgtttctgatttgcatttttttttttttgagacagagtctcgctctatcgcccaggctggagtgcagtggtgtgatctcggctcactgcaagctctgcctcccaggttcatgccattctcctgcctaagcctcccaagtagctgggactacaggtgcctgccaccatgcctggctaatttttttgttatattttcagtacagacggggtttcaccgtgtttgccaggatgggcttgatctcctgacctcgtgatccgcccgcctcggcctcccaaagtgctgggattacaggcgtgagccactgcacccggcctctgatttgcatttttatagacttttattgacagctggatattttgagcaagctagggagccagatatacttttccattttcctttgaacggtgctgcatgtgaagactatgttcttcaggaagtgcttctccaatgcttttttttttttttttttgtggaggagggtggtggacagagtttcaatcttgttgccctggctggagtgcaatggtgtgctcttgtctcaacacaacctccacctcttgggtacaagtgattctcctgcctcagcctcccgagtagctgggattacaggcatgtgccaccacacccagcaaattttgtatttttagttgagatggggtttctccatgttggtcaggctggtctcgatctcccgacctcaggtgatctgcccacctcggcctcccaaaatgctgggattacaggcgtgagccaccatgcctggcccgatgctttgtctttacccatttataattattttcttcaaaggaatgacctatccctaaaatcttcctgtattttcttcattgcttgattgaggaagtatgaagagaattctagccctctatggctctgaggtcacttatcagatggctcatcagtgtggacaggaagtgggtggcatcttgacatgctttaagtcaactagattgtgtatgcctatgtcctatgctcttattttgcttcttcaaatacacctaagtgtgagggagcattcaatttggatgtagacaataatatatggtaagaagctctgggatctgggtcagggcctcaaggtccatctgattgcagcagggatgtgggaaggccatgtggggtccagaacacttaactctcttttaaatgaaacacctaatcactcacctgtttctgctgccctcagaattttagaaaatcactgaaatggaatgaaattaaaacttacctactccaactcctttaacaggcagatggtgtgaaatttaagatgggaactgaatgaaaaaaaaaaagatatccatcaggtaaagatgagaacagaggatgcagatggctagaaagctggtacaaagatgtgaagtagagggtctaaaagaaagccaggaatagttgacgtatagtgggctagcaagaaaatggaaarcagtgtccaggaagaagatatttttatgttggggtaaggagtttggatttaattaaagtgttattggaaggccctgggggaggatggtttaaaaagttaagtaacctaatatgatcagttaacagcaaaatgtttatgtatttgttttattcactcatacacttgtatattctttcattcaataagtaaactcatatttatcaaataaccrctacatgtgatggagttatatcctaggattccaaattcctagtataaggggtatttctattatgccatgcaacttctctactggacagtaaactttgtgtgaacagggtctggacttctatatatttgaatctcctaagacttcaacagtcataggagtacctgacttatggtagcccctaaataaatatacttgatagatgaatgataagtaatattctataatgttcacagaggtctctgaaatagaagaatatttctaaagcacagttaaagatagtcatcattagcagtgaccaggattccctgcagggcacagttccataaagctcttgtaaggactgatcagtgggttggatccattgactcttttaatcaggctaaatatgctgtcccttctatgcatatatttgctgggattctgccatgccagtactagtttggccatgttgatatgaaagagtaaggatttgtctatttagttgccaactaaggtgtaatgaaatctcatggcaaagtgtatatgaattcaaataggagccaagcccttcacctctactgtgggttatatgacatacagagtcttcttgaaacatgtattcccaagactttcaacagtgcaacatctgttttactttgagggggctatgataagcatctgcttagaggaatgatctgaacaaaaccagggcacatttgtttgccatgctatagattatctagtcttacattgttaatgaataaatcatgcaggatggataaaccggtaaccacaacagcatgtttcatactgcatttaagacattaatttatgcattcatatatttttcctgtagacactaaaaaatttatgttttaaatagaagatcacatggattttgatgtagctcagcagttggatgtagattccagaaattcctttattaaattagagcccagttggctgattagggttctaatgttcataattgtaccatttgatgcattaagataagtgagccaaagataaaaatatagtgttttatgagaacataaaatgcatatctatgtacatattccatgtttgtatgagacattacatttaatcctcaaaactcatttcaaagttcatgtcgtgaacgtttacaaaagttcaggaacctcttaaagtcacataggcaattagtagcagagtctgaactgagaatcacatcttctcaggcataatctagttttcctggcttaccacgacaaccgtttcattgataagttattttgaaatcacatttgggggccatcactcacatgtagtatgaagctaaatctagaacaacattcattttgaattctttggtctggtacacataaatagttcttaggatgaatcacatagatggaggagaaagatagacaaaacgttgatctttgggtgattgcattgaggattctaatctctactgacgtgctaaatgttggaattgaactaaaaagagtcactaatcatattacttccatagtgaaagtagcagtgtctgcattgtatgctcttttgttgtttaatgcagactccctaaaaaggcagattttggtcactccgaggctgcattattctttgtaccaacttggctatcctaaaacgagcaaaacaagcaagcagagaatcgagacatagtaaataaacattcttaaaacccacatgttcctttaaacataaagaaaaaaaatgacccagtgagaattggaggtgatttgggtctgcattcgctcagctagaccaagctgttctcaccgccaccccccaccccgcccgactttgacttcctttttatttgtatcttccatttcctttccctgggccagatgtgtggattcccctgttgtgcccaatgacagagtagacttttctggaaactgccaggactatttgtaatctcctgactttacagaggtctcatatgctgagaaggacaaattctgatgtttcacagcaacaggaagagggttagggatgttgagagaaggacaatttgggtggagttttcacatatgtttctctttgatggagaatccagggcagggatctggtttgactggggccaagttgtatttctgctctctttattccatgtgacttgagagagcaaccacatgagtacagagttttagtttggagcatgacttcctcatcctagaatgccagagtcggagaggccattaaaggtcatgttgtccaacttcccataaaattaattttagatgaagtctgcaggagagagtaagagagcctctgtttatagaagaaattgtctcctagaatctaaaactgtctgttgcccattggatcaacatctatggccacccagaattggtgaatattatagaaagaaagtgtgggatggtgttaaaggacattagttcaactcgtcacccaacgcccaaatcccttgattagaaatggaaaatataagatatattgatggtattgaattggtatgaaattctgaaggttttaaaatgctgtttatccccaagaccaaaataagtgaatcctaggctcggctggtcacctcttcctgcaaggtcctgaggtaagagtatgcatcgatgctaatccctgatgggatgagactttgatattagccagggcctttaggaatacaccccagtaaaaacactgatgggctaggatgaatgtcacaggaggctccttaccttagtcagcttagggtaacttaagggtctatgctagaacaaaagcaggccaaaaggtctgttctccttgtggtcacctctaaactcaaattcaagttgcaaatcttatcacttctctgggagacaaggccttacacaccggttagcagcagatgaaagcataaaaattagagtttgtggcccattgtctggcatagatgtgtaggggaagtggcaggggatcagagggtatatgacaagggcaagtgttatcttctgggaccatcctacttagttatgtgggagaggagaaagcccctgaataatggaagggaatgtcccaagggatatatcctgttgttactctggctgtgtggcagagtcgggtagtaaggaatctagaagggccacatcaacttgtataggcccagtgattccaactgtatgcaccacagtgaagaaaaggtattctatgctggccaaccctgctagtatttctcctcttcctccttaggggctgggttgttgggcttgggaaagggtatgaatatccctcagagaacatccccttgcatagcatctctacccgaaaatagtcgttcggtctccattttgttcctggtgtcatctaaaataaggaacaacaaatagccagattcaatttcagcattatggtttgagcaagggcctggcttctagagtggggtgtgttgagatsgttttcccactatttttatttaactcaccaaatatattctgtaattgggcatgacccagcaaaatgttccactctgaagttttatcatggaggccaaagagcatgttcaatgtctgccaagttctcaaaggaaatagtagtgggagggcaggccctgagctggagcttccctggtgactacaaaagcaattgcagaggaccacgtgatgtggctccagagcacatgactcagatgtccattgaaaagctgtatttgctcagggtgatggctaagaaaaatgtcttatgccctttaagaaaagagtcttgttttgaagtgagataatccttccattttcataaggtagttactgaaaataagtgttcattttctttgtgcagaccaaggagtaggccttctgagaaagttgcactcttattaaaaaaaaaaaaaaaaaggcactatttcagatgaaagcctgagatgcagatttgagatcttaaaacttgaagtaaaagtcagcactctgatgtgcccagcctgtcctttctaccttcccgttgttaagaggtgttcttttctagctcttgaaggaagactttcattcttaccatgtcacctccttcttcccttcttttttattttttggggtctgaaatagtaatcctgcaacacagaacttgtttggaattctgactgttttaatccttgccttaatttactgaggttaagttgaagataggaagttgagtgttggttttttcaaattgtggtcttagccgtaactccgactttgaacattttcggcagttccatggatgtctgcggatggtcagagtcacrtttcattgtctccaagaactgtcatgaccctgtctttagcattccttcaggcttctctttactacagatcaagaaagtacttggcaacagtctcccattaggagagagcattcagggttttagtttcaacttttcgaagtttaatgcttttccattttcttttctccgcgtcagccatgggacaagtaacgtatagttgatcttcagtattccctgattctgtgttkgcaaatttgcctgcccactaaaatctgtagcccccaaatcaatattcatgacacactttctcagtcattcatagtcatgcacaaagcagtgaaatgttgagttgcccgatgtgcatgtttccagctgaggttgaacaaggtgacactgctttttcgttgcagctctcagactgtatgcaaatgtctttccaatggtctatttagtgctatgcttttcatgtgtttgtgttttttttggtgattttgcagtttaaagtggctgccaagtattgtgctgaagttctgtatggtattcctaagcccaagaaggccatgatgtgccctgtagagaaaatccatgtgttagataagctttcttcaggcataagttatagtgctatgggccataagttcgacattaatgaatcaacaaaatatcttaaataagtttccttaaacagaaatatagaaacaacaaggttacgtctcaatcagttgacagaaatgttgtgaccagaggctttcaggaacctaactctgtatcttccttaggagcaatcgttcagtatttgctaattcagtgtttgcagagactttatagggtgtagctgctgcaaatgacaagaatcaactgtaatcatttactaagtatcagctgtaatggtgaagataaatattctagacttaatatgccaggagggatgtgcgtgcctcatatgctctatggacatgttacagtaagggaaataggaggtgtccccctcaacctggaactcctctaacaagccagatagaaatgcatcattttttaggccatttcacttggatcgaagcttgttttctttcacactcctagtgctttcaaaaaaaaaaaaaacttggctgtttaattaaaaaaaatttggcctgttttgtatatatttgcagtctgagcacccatagaggggagtcacccctctcctccagacaagggtgggttgttgaattttatgtgaaatcttgacattgcaataaatctctgaacctgaaccagcctgcaytggatatttaatactgttttcatttccaatactaatcaatcctggaagaatgtgctgttattttttagttacatgtaaacatttagatgaatataaaatggcttattsatagcttacatgcaggcaagtttattgatacttttgtcaaattctgtttgattgattgatttggccatcgtactgctatggatatggaatagaaccaatatgacatttttatttcctggcagtggtacctgagggtgaatgggatatggggaagcttgagctctgtctcttggatgagagcactatcagagcctgatcagtggagctcctttctttaaggaatgacctcaactctgtttcacatcagacacagtttggaagaccccacaggccattgcactgttgtatcattcatgtgggaagcccagctkcacaggggycacagaaatctcctctatgtgacacttctggctacagtgcattattttgttttattctgattttttaaggaggtccctagtaggcaycttaggaaactttgaaaatatattaagaagattcggcatttgatgcacagatacaaataaggccattttcctcagcctgcaagcccagtctgagactttgcaacctttctctcttctgattgtgaattccaagtgtcaagacaaaatagcactargaaatcagtaaaatgtgacggtttttctcaagygtctactaagagcctagccagatgcacatttcttattccttttggtaaatagattcagatttggtatgattcaatgaactaaaaaatatcccctgctcaaagcttgtctatgcctgctaattgcatgaagcttaacagatcytccacacacggcaccaaataagggctggctggaaatcaaaacctccttgccaagcactttggattttccaaaggaactgtaatgttcctggagatgtttattaatggaaatggggaactttgtggaccagggtgaagtcccagagattgatagcctgttactagtgtttattatttttgactgcaggttttgaaagcttttcctcctatcctccctaaaaggaactttctccgtcacttgggactgaaaatgggggtggagttcaacacctcatggagcaatccaaaatagacgcacagaatgttaataagcccaggattttgccctctgttttgtattgctctgccccaaaatacaaaacctaattagtgcatccagagaagcgttaaatggatttcatgctgtttaataaatgctttacgtgctttggtgccactgcgaaatgtgtggttgagtgagggtgggaatagggagaggaaatggttgctgtaaatgcttcctaccaatgtcaagcactataggatgagcatcagagatgcgtgtttataactcaggtgcttcatgttttcacccgaattttcctccttttggctagcctgttattttccttttgggcttttgtttttttaattttattattattatactttaagttttggggtacaacgtgcaggtttgttaatatgtatacatgtgctcccagacatcgtctccaaaggctcaacccacaattgtctacactcagaacaatgagaaattgtgagtgacagatgtgcactgagtgctcactgggtgatgagccctgaatgggacatgggaattagaaggtgtggccattgcctctggagagcttatgtccctatggggaagatagaacacataatatcctattttcaagatagaccgtcagtctggtgttcaaagcctttcataatgtgtcccctatttagtgactggcctgtgacatctctcctagaggctggtctttattgtcttatatgttggtcagtggttgtgagacttcgctgcacagtagaactgtcaggagagctttgaaaaagccccagtgttcacactgcaccctctatcagtgctttgagatctttaacctgcatcaggatcacccagaggatatgtggaaacacacatttctgggcttcacacccagcatttctaagtcagcaggtagagggctctaaaaatttgtatttctagaagttattgctaatgctgctagtccaaaatcacacttgaggaggattggccttcatcaattaaatcagaattgctgtgtgtctgatgattccagcatgcagccaagatggagatctgtgttccacacattctttaatgcatgtggtggagacagatgatcacatatcgtgaatgcctctgattattttccatgatttagctatttttctctgactagacagtaaaagtcgtaatagcaagaactgtgtatctttaccttttcttgattctctcagggtgcccagcccagggtggtcacacagaagtgtaacttgaatagtgttaaccaaggaaacgtagaagggtggatgggaagcattgcagataccaccagcactcttcatttccctactctccaaaacctctaaggaaagttctttccctctatttgtggactctaagatgcattgcagagctactttctctctcctcttccctccataggggagggtgcattttcagcatttacttttaaagaaagcaactgcaaagagtactgtattcatagataaaaactgcattcacatcctggctctgatgtttcttcttatatgatcttggtgacactacttaacattttcaagtccccatttattcataaataaaatacgtataagaacatctctttcacagacttctggaaattaaacgagtttgtgcttaaaacacttctaaggacaatataaaacacaaaaggcacagtaggccttttgtttataaccacattgtagcaaacacacatttttcctggaaacataatgggagtgctcttgggttatgggaagtagcaaggggagatgagcaaatatttgtgcctcatcctgacctcgccatgcatggtgtgaaatgtctaggtatgccatcaagaaccaaagtcctgtgtaacagaaaatctccagtgagcctgtcatgatgatggagacaagcctctgttgaacttcactgccagtgaactctactaaaatgtcagtcctgtattcgcatagcctatcagtcagggagcaggctatgagcactgagatttccacagcaacctgttggtgcctttagtgcattgcttccagaatgattcccatgaaataaagagatctagcattgtacttactggttcttagcaaatgttcttccccgtaggtagagtgccttaactctagaaccataaatttgttttcagaatgcaacaagattgcatagttgtgtaataaagctcctgacagagtgttaaagataggagggggagatggtgaactgggagagccaggaatcctcatcaaactattatgggaggctctgccctctgagaagagaagtgctgtcttaagaaatttccttgatactcaaagggtgttttacacagaatcacctrggcttttgttaagaatgtggactcaggccgggtacaggggcacacacctataattccagaactttgggaggccgaggcgggcaggtcctttgagtccaggagtccaaggctagcctgggcaacatagagaaaccccatctctacgaaaaatacaaaaatcagccaggtgtgatggcatgcacctgtagtcccagctacttggtgtggcttgaactcccttgaaccagggaggtcaaggctgcagtgaactgcaattgtgccagagtgaggaccacagagggaactctgtctcaaaaaaaaaaaaaaammaccacacacacacacacaaaaacaacaacaaccaaaaaaaccagaatgtgaacaacaaccaccaaaaaaaccagaatgtgaactcaaacactcagacaataccctagaccttctgaatcagaatctgcattttttttttcaggagtcccaggcaatttgtatacacttaaatgtttgaggagaaagatagaagagtctcttagaactagactgggaattaagacacctgacttggtattcttttagttccatcttcacctcagtttctccatatgaaaaaaacagataagtagaataagttccttcccatcagttgacaggaattggtagtaaaagaatccccatagaaaagatttagaagtctaaggtccagaagaaccatcctcttcctcttcacccagctcctttttgttaacattcttcgatgcccaatctcacttccagctgctttggggtttggccgctatagctagatgtctcagcagcttccaattcccattatgagaagttgaaattctcccataggtacacagttcttctggcatcccgcaccatctttgcctgtgctgagtggtgtgtggtctggccttcaagggagccgtttccagcagtacatgtgaggagaggacctgtctcttggctgctaggaagcactccagccagacaacagccctctccagctactcagtgcctcccacattggacaactgggaaagcacacagggaacagtgggggttgttgagctcagcgagtgtttcctatagtgcataattaaagaaaacacctgtgtagctgctaaatcacttcccgctgttcccctgtgcaaatgctgtgctcaataaccttacaagtgcctcattccttctacccaaccgaggcagtgcacagagccacaatgcataaagctggcaagttattagttcagggccccttaaaagatctcttargattgatttgttactagtccatggggtcccttggttagtctggtggcattttgctagactgcagcttcagggaggctcagggatgggtagtgggcctactttctccaaactgcccttctttgatcagcacttctctgtatccaaggcagtcccgtggaagagctctagagctgcaggagccagaaaaccttaaaccacaacttcaatactgtaattgtgggccagatgcttccccaggggaaaacagccaacaacagtgaaatgagatgcaagtgggacctatggattttgtttgaaattcaggaaagggaagtgmcaataaatcaaaaggaaaagctatcattctaaacagacctcttcctgctgctgaagtttatggggtgctttggttaccactaggatcttgtggggcactggctgcccaaagtgaagaagatagactcccttgtagcagcaggtggattggcaacaggattcagtgtgatgacaggctagctttgtaatttacttcttccagggcaaagcaacatggctttcactgcaagttttagagtgtttgagcagatgagtgaatgtgcctaagagacccagtgaagaggattgctggatgttgggcggtggcaggggaggggggaagggctttaaagaaacagaackgaggagaaaggacagctgcagattcactcagtctcttctgcttcactgctttgttctcttcatagccttggtcataactgaaattatcttgtctatgagtttgtccgcttgtgtattatgtatctccccaaataggatgtgaacgctgcaagagctagactcttatctaacttgtgcagagctggatcttcaaaactagtcagtccagtgcctggcacacagtaggtgcaaaataaatttttttttttttttttgtgagatggagtctttctgtgtcacccaggctggcatgcattggcgtgatctcggttcactgcacatcatccacctcccggttcaagcgattatcatgcctcagcctcctgagtagctgggattacaggcacgaaccaccacgcccagctaattttgtatttttagtagagacagggtttctccatgttgatcagggtggtctcaaactcccctcctcaggtcatccgcccgcctcggcctcccaaagtgctgggattacaggtgtaagccgctgcgcccggcagatattctgaatcttgaaggaggaataggaattgactctgggctaagctggcagagaagggtattcccggaagagagatgaggattatgatgcatagaggcaagagaacctggtgtgttgggaactgcaattgtaaggtatgagtggacgagtggcgagagactagaatggcctggtacccagtcaacatgcctacaacagacggggctgggaaaagagctcctaggtgaggacaatttctcagacatgagaatggccagggcagttaggtgaactctagtacagatgtacacactggacaatttaactaagaacaattcatgtgtctttacaaagggttatctttccagctgttacttcctctcttccagctcatctgttggccaccttgttgtttacccctttgagtaaaaataagcaaaaagccrgaagaatggggtaacctcaaatacctccttaattttgttttttgagcagctgcttaaaatgtctgaaacattttttgagttagaaatctgaaacaaaacaaggcttccaaatgattcatgagtttccattattcaagtttccctcatatcttcatcaccgtgtaggtaatgggtgtgaatctctgtgtgctcatatacatatgcttgattatatgatcatctcgtggaggacatgtgacacaggaagacaatagggcacatgatatgctctttgatctaaggtaagagtagcttctctctcctccctgtttcactatggctttatggacatgtgggcacacagaagaagcagaccgcactgcagaggctgtgcttatagacataactgcttctcaaggccacagataagaggatggacaggattgaggtaagtctatattttggcagacaagaactcttggtggcctctccattcagtgctagaatgttcctactatcacaccacttagttgatgtttgtgatttcaagtgctcaagtggtcagctcctctgataccactcctatgacactaaggggtcaccaggaatatttgtggccatgggcatatgagctccaagaaataaaagattcattaagggctgccatagagattttctggttcttttgtgacttgagctgaaattgtaagacctgtgtgtgtcatttcctttctgtaagtactctagtcctcccaggagcagcctcctgctccactgcctttggagctatcactactgccataagaaccaaggacagtagctatttgttcccgagacacttggtgcactatccacagtgacccatagcaataaagttaatttcaatacaactacctatgamaaaggaaagtgaaggatgtgtctaaaacaaccctggaaccccatctttgaggatctgttttgtacgaccactcctggacactagcgtatgagttatttttctgagataatttaagagaattgtttaagtagggtatgagatttctagggcttccataagaaatgccactcgctgggtgacttaaacaacagacatttattttctcccagttcgggaggctggaagcctaagatcaagatgttggtggggttgatttcctccgagaaccatgaggggaggagttgtttgtggcctctcccctcsccttgtaggtggctgtcttctccctgtgtcttcacatggtcttccctctgtgcctgtctgtgccccaatcttttcttacaaggacaccagttatatgggattagggcccaccccaatgacctcattttaacttaattctttatatacactatctccaatcatcagtcactttctgaggttctgggggtttagaacttcaacctgtgaatttttggtggggcacagttcagcctgtaacaaacagatataggaggactgaaaaggcaaggcaagggggaaacattgaaataacaaacatagtaattgcaagaagcaactaccataaccttaggactagaggaataaaaggaagaggctggagtcatgagaacttagcagcttggagaaggagtcttacaggactggtgcccagaactctgaggggcagagggtatgagcagctggtactggcaagtatgaggggtagacaaacagacagatgccgggagcatgggataaatggagaggagcgtttcctttctctcccctttcatcttcagatcttgcttttgtgcccctcgtaggcaggacctaacaggtgtccgctggcaaaaaagaagtgtaatctgcagcctacagcatgacaggccatgttattgaaggatggatttttactaagacacaataactttaataaccaacacaggctgggcgtggtggctcacacctgtaatcctagcactttgagaggctgacgtaggtggattgtttgagaccaggagtttgagaccagcctgggcaacatggtaaaacccctwctctacaaaaaggacaaaagttatccgggcatggtggtgtgtgcctgtagtcccagctactcacaaggcagaggcaagagrattgagcctgggagttcgagactgcagtgagctatgatcacaccactgcactccagcctgggtgacagagtgaaaccctgtctcaaagaaaagaaaagaaaaaagaaaataagcagcacagattccttcagcttcttttaaaaagtcgtatcttgctctgcagccttgcttttattacttagcagcacatacgaaaaagtctccagtgtccatcctcttccagcacatgaattctaatggctgcagagtatattccatcataaggatgtatcatcacttacttaaccaacttcctattcttagccattcggtgttttaaaattttgccactcttataaataggactgcaactcaataaatctaagcacacatccttaagtaatcccttaggattaatttttgaagtggaattactaaatcaaaaagtatgaggatttttcaggataaaaactcacttttctcagctatggaaaacgtgaattaagtgtggcttcttctgtcctgtagtacagtagggtgagattacaatgtactagaacatggggttgaggcaaggatttaaatactattggccgaaactgagtaataggatgtaatgatttcagagtgaaactaggcctactctttatgaaagcatttaaaggtgaggggacagttaacagtagcatctgccccagctggtggaaacgccatgttgttactgattttaatgcagttgcattcttagcagaactaattttgtaaagcatttctctaaataatccaattttacttggtgcttatggttggacaaaggagcaggcaggttttgtatcagtatttatggagtgtagccttgtaggaattactctggccagaggacattgctataaatctataatgatggttgtgtttttgattccatctttagtttctgaatttcagcctttgtaattaaaaatccatatcataaaattttggcctgtgacaattttatttttctcctgggatgctatgatttttctgaggcatgccttgctcggtccttcatggaggctaaaggtctgggggattttgagctgggtgtttggagcccatcctcatgacagatatttggcatgccagcttgggtgctacccttggaagatccgagtccaagcttttactggctccctgaggacaattctgagaaagttactatcccttgtactggtttctggtgctgggtatatacttgcttttgtaagactaaataaattgataaattcagctgattcagagcgtttacataatctttccaatgtcaacagtcatttaaattatcctaactttatactgaatctccaaaatccaattactagctaataataattgtcagttttactttaaacctttaatgataggtcacaagggaagtgtagcagcaggattaaatcgctgtagactgtagctatgcccagtcttaaattactcgcctcttatctctggctaacagagccactatatgttttgtcaccatttttgctaaatagaatatatgtcaccaaaattaatttcatctcccttaaattagcttcttagtgtgatttctcacttcagtcaaaatttatttcttcaggaatttaatttccttcttcatctcttttattcgagagagcaagactgttctggaacaaatgtcktttaatcactggctggcaagttttgaggcttgcttttcattaataattgctgacccctttagggggagtgttggaggatatttctgttttatttaagctattgtatgcttttaaacagagtagactgggctctttctgaatagtcttagagaagctgtaaaccttgcatagaacaggaaagatgaatttaccacaaagaaaacatttttttcacatgagggatgattsagcagggagtttgtaattaggcactttagttgtttttcctactttttaatcattttcaggtatacacatctgacaatagctatcctttaagtaaggcatgtgtttggaaaaaactgtagggatttaaaagttaaacttctcacagaacacataaatacacagaagacttgcccaactctgaaatgcatcctgaagatacgatagtagcacctgtaacaaattccctttgctcatcaacagaaacctcaaggcactaaaacattaagaggcatggagagggagaagagagaggaagtgagaaagagagggaaagagagggagagggaaagatccatttctagaaaggcaaagtgcgaggagctctgtgacctgctccccagtgaagcaaatgtaactggtgaagataatgaaaaaatatccaaccattcggagtctctggatattgtactaggagaatacagcaaatgaagaaacagttatttaagagcaactactaaaactcaaaaggaacaatgggattctgtggcacttaaaccatgacctgttcctttcctcctccccgcagcttactttgaaggaagctctctattacaggtaggtgtggctaagaaggtggggctcccttgcccctcatctcccaatcaagggatatggcatcttacccagaagagcaggctgccaacatttcttattccctccgactctgagatgcagaagttaagttcctggtgaggtcagccaagaagtcagagactactgttctctgcccactccccccaactcaaatgtggcagttctaccacaggtgaagctaactgagaacacttgggccctcatcattcttgctcaagaatgatggggtggagggtccacactgggagaggcaagctgagaagactggagagtgtcatatctgcctcagtctctggagcagtggcttggaggtttttctcagtgggagagcagtccataaatacatagagctctgaagctctgaagctctccttaggggaactgtctttgaaacagagtgagggaagttcaaggctaagggtactttcttccataatgaagattttggtggtaattaagaggagactaataactccatgagagcaaaaacttacaccagaggcaagcaagtttactagagagaaccatggaaacagatagctaagaactctcctgggttcacaaaaaacctaaaggactagcctcaaaaacttcccctacccatgtacaattcagtggcatctataacattcacagtattgtgcaatcatcaccactatctctttccaaaacactgtcatcatcccaagaagaaactctagaatgattaaaccaacaacttcccatcccttctcccctatgatcatggattaacaattagctttcmttagaaacaatggagaccagaaaccaataggatggcataatcaaagtgctggaaaaaaaataaaaaaactatcaagcaacaatcttatatccagcaaaactctctttcaaatatgaaggtgaaataaagacatttctaagtaaacaaaaactgagaagctttatttgctagcagacttcctttacaagaaatactaagggaagtaatacaggytgaaagcagtacaccccagacattaattcaaaaccacacgaataaacaaaaagcaccagtaaaggtaattatataataataaaaagatagtataaatacatattctcctttctgcccttaactaatttaaaaagcaattgtacgtaagcatggaattaccatataatctagcattttttacttctaggtatacaccccaaagaactgaaaacaagaactcaaacagatacttgtacacctatgttcatagcagccttattcacatggacaaaaggtagaaacaacccaaatgtccatcaagggattaatggataaaaaatgttggatatacgtacaatgtaatagtattcagccataaaaaggaatgatgtactgatatataatacaatatagttgggaaaagattattctaagtgaaataagctagactcaaaaggataaatattataggaatccacttaattgaggtatctaaaataggcaaatacatagagacagaaagcagaatagaatagaggttaacaaggactggtagcagaagggaagagtgaggacttgccagggagagaagagtaggcagttatagtttaataggtacagaattgcttttgggaaaataaaaatattctggaaatgtatactggtaatggttacacaaaattttaaatgtacctaacaccactgaattatgcacaataatgacaaaaatggtaaattttgttatgcacgttaaccacaataaaaataattaactctaaaaaagcaattatataaaataatatgtatgtaattatattattgggcttatatgtaaatgtaatatatttgacagtaacagcacaatggagatgggtgggaggaaacctgtattggtgtaaggaaatggcgccagatggtaacccaaatctataggaacaaatgaaaagaatcagaaatgataaatagaaagggaaatataacaagctctatgaatatatgcttactctcttctattctcttagcttctttaatagacataaaattatataaataataaaatgtattggtaggtttgtaatatatttaaatataatgtgtataacaatattagcacaaaaggaggaagatggaacagagctatataggygcaattttaaaattttttgtgaaattaagttagcatatatctgaaagagattctgatgagttaaccactaataaaatctaataaaataactcaaaatatagcgaaaaattattaaagaaattatattacactagaaatattcacttaaagcaaaaggaagcagtaaagaaggaacagggaagcaaacacacatggggcatataggaaacaactgaaatggaatatgtaaatcctatataaataataatatcaaatataaatggattaagcaactgaatcaatagtcagagattttcagaatggataaaaaaacaaaatccaactataggttgtttataaaacacacactttagattcaaagatacagatagtttgaaagtaaaagaattgaaaagatgtwtcatgcaaacaacaacaataagaaaattggagtggctatacgaatagcagaaaaaaatagactttaagacagaaaaagttactagagtaaaagaggacattttgtgatgataaaagtgtcaatttgtcaggtatgtaaaacaatcataaacatatagacatggctacatagccacagagccccaaaatacacgaaggaaaaactgacagaccagaagggaaaaataagctttcaacaataatagttgtagtgttcaataccccactcttaataacagatagaacaactagacaaaatatcaaggaaatagaagacttggacaacactataaaccaacttgacctaccagacatctgtagaccttccacccagcaacatcagaatgcacactcttctcaagaacatggaatagtctctaggatagaccatatattaggccataaaacaagcctcaataaatttaactgggtaaatcatgcagagtgtgttctctgataacaatagagtgaaaataaaaattaataaatttggggaattctcaaatatgtagaatataacacattgctgaattgccattagtcaaagaagaagcaataaagaaagttgaaaaacactttgagatgaatgaaaaagacacacaacataccaaaagttacagggtgcagctaaagctaaagtaaacagagggaaatttgtggttgtaaatgctactacaaactgagaaaagagttatctattcaataacttgattttccaccttaagacagtagaaaaacaagagaaaactaaactcaaagaagatagaaaccataaagagcagaagttaatgaaataaagaataaaaagcaatgaaaaaattaataaacccaaaagtttttctttaaaaggatcaacaaaaatgccaagtagttagctagattgaccaagaagactcaaatgattaaaatcaggaatgaaagagggagcattactatcaacctgacagaaataaaggattgtaaggcagtactatgatcaattaaatgccaatgaattagataacttggatgaaatggacaaatttctaaagacagactcaagaagaaatagaacattygaatggacctatagaaagttaattgattgagtttgtaaacaaacaaacaaaaaacaaccgtctacaaaaaaagaccccgggcccagaatttacttcactggtaaattctatcaagcatttaaagaaagtaaatgttaattcttcacaaagtcttcccaaaatagagaagggaatacttcccaatttattctctgagcccaccatcattctgattcctaaaccagaaaaaggcatcataagaaagaaaaatatgatatttcgtgaaatgaaaaatccttaacaaattattagcacatcccatctagcaatgtgtacaaatattayacacaatgaccaagtaggatttatttcggtaatgcaagattaatttaacattacaaaaccaattaacataatacaccatatcagaagaataaaggacaaaaaccacatgactatctccacaccattaaaaaaaaagtatttgacaaaagtccacatccacacacattcatggtaaaaacattcaacaaactaggaaaagaaagcttccccaacgcgataaaggacatctgtgaaaaactcttggttaccatcgtacttaatgggaaaagattgaatgttttcccccctatgatcaggaacaagaccaagaaatccactatctccacttttatttaacattacagttaaagtgttagcccagaaattagacaagaaaacaaaatcaactggatgcagattggaaagaaagaagtaatagtatttacttgcagatcttgtatacaggaaattctaaggattctgctaaaaaaaaaaagaaaaaagaaaaactgctaaaacaaataaatgagttcagtaatgttgcagaatacaagaccaatgtagaaacatccatcktaattgtgaaattaagaaaacaattccatttataatagcatcaaaagagtaaaagacttagaaataaacccaacaaaagaagtacaaaatctatgccctgaagaacaacaaaaacattcctgaaatacaatgaaaataacctaaataaatagaaatacatcctatgttcctggatgtaaagacaacagtactccacccacatttgatctacaggttcaacacaattgactctctagccccaatttcaaaacttattaaaagctacaataatcaagacagtgtggtactggcattggaatacacacatagatcaaaggaatagaactaggagtccagaaaaaagtcattgcatttacagtgaattgatttttgctgagagtacaaagataattcactgggggaaagcatagtaatttcaacaaatggcgctcaggtaactggatagtcacttgcaatagaatgcattaggaacctcgtgccatatacacctcacaccatctacaaagttaacttaatatattagtaaatcaaagccctaatatcaccactaaaagcataaaactcttagaagaaaacatagacataaatctgtgtgactttgggttaaggcagcagtgtcttaaatatgatatcaaaatcacaagggacaaaagaaaaaataagtaaattggacttcctcaaaatttaaaacttgggtgcctcaaagaacatcatcaggagtgtgaaaagataacctctagaactggagaaatttttataagtcatatatctgataaggtatccaaaatatataaagaacacctataactcaataataaaaagtcaattattatctcattttaaaaatggtcaaaggaattgaatatatttgtctccaaagaagatatagaaatagccaataaacacaccaccagaggctcaacatcattagccattaggaaaatgcaaatcaaaatcacagaaatatcacttcacatccactagaatggctataatcaaaaaagataaataataacaagtgtagggtgtggagaactggaaccctcatacattgctgttgagactgtaaaatgatgaagctgctttggaaaacagcttggcagtttcttaaaaggttaaatattgagcaattccactcctaggtatatacccaggagaggcgaaaacatacatacacaaatgcaaacaaaatttggtcattaatatctatagcagcattattcataatagtcaaagagtggaaataatctaaatgttcatcaattgatgagtgcataaataaaatgcagtatattcttacagtagaatatttggcaattaaaagaaatgaagtactgatatatgctacaatgtgggtaaaccttgaamacattatgctaagtaaaaaaacccagttaccaatgaacatatatagcttaaggtaaattcatagagaccaaaagaatagtggttgcttagggatgaggaggctagggaaaagagtcagacattactgatggtgggcatgggatttcttttgggattgatgaaaatgttttcagattgtggtgatgattgcacaattctgtgaatatgcataaagttttgaatatatattttaacgtagtaaattttacgctatgtttattatatctcaataaaacttttatttaagaaaagaygaatacaggagcacccagatttataaagcaagtccttagagacctacaaagagacttagactcccacacaataataatgcaagactttaacaccccactgttaacattggacagatcaatgagacagaaagttaacaaggatatccaggaattgaattcagctctgcaccaagcagacctaatagacatctacagaactctccaccccaaatcaacagaatatacattcttctcagcaccacaccacacttattccaaaattaaccacatagttggaagtaaagcactcctcagcaaatgtaaaagaacagaaattataacaacctgtctctcagaccacagtgcaatcaaactagaactcaggattaagaaactcactcaaaaccgctcaactacatggaaactgaacaacctgctcctgaatgactacttggtacataacgaaatgaaggcagaaataaagatgttctttgaaaccaacgagaacaaagacacaacataccagaatctctgggacacatgtcaagcagtgtgtagagggaaatttatagcactaaatgcccacaagagaaagcaggaaagatctaaaagtgacaccctaacatcacaattaaaagaagtagagaagcaagaggaaacacattcaaaagctagcagaaggcaagaaataactaagatcagagcagaactgaaggagatagagacacaaaaaacccttcaaaaaatcaatgaatccaggagctggttttttgaaaagatcaacaaaactgatagaccgctagcaagactaataaagaataaaagagagaagaatcaaatagacgcaataaaaaatgacaaaggggatatcaccaccgatcccacagaaatacaaactactatcagagaatactataaacacctctacgcaaataaactagaaaatctagaagaactggataaattcctcagcacatacacactcccaagactaaaccaggaagaagcaaaatcacttaatagaccaaaaacaggctctgaaattgaggcaataattaatagcttaccaaccaaaaaaagtccagaaccagacggattcacagccgaattctaccagagttacaaggaggagctggtaccattccttcagaaactattccaatcaatagaaaaagagggaatcctcactaactcattttatgaggccagcatcatcctgataccaaagcctggcagagacacaataaaaaaagagaattttagaccaatatccctgataagcatcgatgcaaaaatcctcaataaaatactagcaaactgaatccagcagcacatcaaaaaccttatccaccatgatcaagtgggcttcattcctgggatgcaaggctggttcaacatatgcaaatcaataaatgtaatccagcatataaacagaaccaaagacaaacaccacatgattatctcaatagatgcagaaaaggcctttgacaaaattcaacagcccttcatgctaaaaactctcaataaattagttattgatgggacgtatctcaaaataataagagctatttatgacaaacccacagccattatcatactgaatgggcaaaaactggaagcattccctttgaaaatgggcacaagacagggatgccctctctcaccactcctattcaacatagtgttggaagttctggccagggcaatcaggcaggataaataaataaagggcattcaattaggaaaagaggaagtctaattgtccctgtttgcagatgacatcattgtatatctagaaaaccccatygtctcagcccaaaatctccttaagctgataagcaacttcagcaaagtctcaggatacaaaatcaatgtgcaaaaatcacaagcattcttatacaccaataacagacaaacagagagccaaatcatgagtgaactcccattcacaattgcttcaaagagaataaaatacctaggaatccagcttacaagggatgtgaaggacctcttcaaggagaactacaaaccactgctcaacaaaataaaagaggagacaaacaaatggaagaayattccatgctcatggataggaagaatcaatatsgtgaaaatggccatactgcccaaggtaatttatagattcaatgccatccccatcaagctaccaatgactttcttcacagaattggaaaaaactactttaaagttcatatggaaccgaaaaagagcccgcatcgccaaggcaatcctaagccgaaagaacaaagctggaggcatcacactacctgacttcaaactatactacaaggctacagtaaccaaaacagcatggtactggtaccaaarcagagatatagaccaatggaacagaacagagccctcagaaataataccacacatgtacaactctctgatctttgacaaacttgacaaaaacaagaaatggggaaaggattccctatttaacaaatggtgctgggaaaactggctagccatatgtagaaagctgaaactggatcctttccttacaccttatagaaaaattaaatcaagatggattaaagagttaaatgttagacctaaaaccataaaaaccctagaagaaaacctaggcaataccattgaggacataggcacgggcaaggacttcatgtctaaaacaccaaaagcaatggcaacaaaagccaaaattgagaaatgggatctaattaaactcaagagcttctgcacagcaaaagaaactaccatcagagtgaataggcaacctacagatgggaaaaaatttttgcaatctactcatctgacaaagggctaatatccagaatctacaatgaactccaacaaatttacaagaaaaaaacaaccccatcaaaaagtaggcgaaggatatgaacagacacttctcaaaagaagacatttatgcagccaacagacacgtgaaaaaatgctcatcttcactggccatcagagaaatgcaaatcaaaacccaatgagataccatctcacaccagttcgaatgtcgatcattaaaaagtcaggaaacaacaggtgctggagaggatgtggagaaataggaagagttttacactgttgatgggactgtaaactagttcaaccattgtggaagtcagtgtggcaattcctcagggatctagaactagaaataccatttgacccagccatcccattactgggtatatacccaaaggattataaatgatgctgctataaagacacatgtacacgtatgtttattacagcactattcacaatagcaaagacttggaagcaacccaaatgtccaacaatgatagactggattaagaaaatgtggcacatatacaccatggaatactatgcagccataaaaaatgatgagttcatgtcctttgtagggacatggatgaagctggaaaccgtcattctcagcaaactatatcaaggagaaaaaaacaaacactgcatgttctcacttataggtgggaattgaacaatgagaacacttcgacacaggaaggggaacatcacacaccaaggcctgttgtggggtgtgggggaggggggagggatagcattaggagatatacctaatgtaaatgactagttaatgggtgcagcacaccaacatggcacatgtatacagatgtaacaaacctgcacgttgtacacatgtatcctagaacttaaagtataataaaaatatatatataaataaaaaaagatcacaaactaaatattgagcttataaaataaattagaatgaaaggtttcataataaaaaaagactaaaatagaagttggaaacattggatgcaatcctatatttgctttttcctaccaatatgactttggaaaattttcttatttgtggaccttagctttcttatcttatgataatgtttgcaccagcaaggtcttagaggaggtactaggcaatgtggggcaagggagagcgactttattagtggttacagtgaccaaagagggctcctctcacaaagccagcttcatggtgtgtaacctgtgcagtcacaccccacgccatgctcagaagggcccaggcttggtttaattctctgctgtatgttttgaacaagggttcctgcattttcattttggggggtcctatgaagaatgtaaccaattctgatcctactgatagtgagaaggggctagggagcctttaatgtcctgcagagcacagggcagccctgtgcagtgaataattgccctgtccaaaatgccctgatgagaaacaccaaatgctaagtcatggttgaactctgaagggctgcaatttttaactagcttactagaacctaatctgaaatgttcaagaatagtgtgtgtttttcaaaaaatttgctttgatttatttcatgtacctaaaaagagtatgacgggtcgaaggcgactgaacatttagttcctcattttttttcctgagactgataatataccctatatgagccttatatgctttgaccttgcttctcatccattaactgagctgttgaagtttagatgattatagccttaacttattttatttctggttattagatttgttaagaaattgccaactcagtaggctctgtggcaaaaacaattatgattcctggagaatctctgatgaataataacgttctaagctgagcattttacttacattatttcatttaattttcccatcaatcttttaggttgatcattattatcctaactttatagataaggaaactgagtctcagagggcttaagaaagattagatgaaaatgatgtgtcttcttttttgacttctcaactgctattagatgaaacctgaaatccgtgagtttctttcattccttgaattttcccccagatgtattaggcctcactggaagaattaatgttggaatctactgatatatgttactgttatatacttatactgtagtaagcccctaagttggtgatattttcatgttgcaccaaaatttattatctacttggttgagaatataatactgtacatgataaaaatatactgaattaggaagtgcaagatttaatcatttctgaagtcatagaatagtagagctggaagaaattttaaagcactcctgtgccaatccatacatttcacagatgttgaaactgaggttaagataggtttaatattttttctgtrttcacataatagatgtatggctttagtgacaaagccaggaatataatttatgagttaaagtgaattattggctcatcactcttcccaaacatttccttgcctccctttggtcagttttatctagatgaaataaracaaccaatttgatggtttgacagatttcttcttcaatggaaataacttgcatggagtttagatagtctgtggatttcctgtaatatgggagttgtaacattttggagcatgtttaactcaacatagaggtgtcctctttcaaaaggacttcaacttaggtttgactctatgaataacccagcgaaaaataatttcccagtaagttcgaagaataccttaaaggtaatcatatgtattgagaaacagtaagtcctgccattgggacagcgactcaatggtatgaataataggatgaaaaagaaattgaggcatttagggaggttagaagggatattctaatttatatttttggatcaatttagaattcagaagcacttatttgtagcttattgatattcactttttgggtccattaagatgtaaagatggtcaattttataaattaatgtggatcatgaggacttctagatttcctcctgctttctacaattctattaaatgatatttaaaccaaggagataaagcttacgtatattttctttattcaactgtagacttaaaagaaaataaaactcttcaagatacatctcagacccagtgtttgatttttagattgtagccttgatatgctcagccttctccttctcaggcctctgcaatgggcctgaaatgaccttttattggcctggttcctttgatgaatgaactcagcacatttttgacagagatgaaggctggcttttttaaggccttctttagggagatataaatctcttgctgctttggagctgcatactgtttataaaccaaacttcatgcttccaaaatgagaaaactttcctccttctagtcttgcagggtctcacaaggatcactgcgcatgtttatcagcatttaaaagaaatagctaattatggggagtggtctaactaattgggcaaaggtctcaggtatacatttagctcttattttttatctccaactttctttgtgcaataggaaaacagattaatgtttttctttcttaattcaacttacagaaaatgtagggtcagattaactcataagaccctgcatcccagttcataagtcctttccaataacaagcccttctctatactgggcttctctaatatttcctaaggtgctgaccatcagccatccttacttcttattgcattcatactccttgggtaatacattcatttcatgaccccaaacattatatacctcattgactcgcaaatgtgtatttcatgacctccatgtattgcttgatctgcaaactatgttttcaactgactgttagatgtttccacctagatttccttcaggaacctcccagttaaacagaaatcattatcattcttgtgtcaacaccacccgtctctgcctgtccaattttttctcttcatatattttccttcttggttcataacatgataatcttatccagtttgggcaattgaagtaacktagataaatcctcagctcttctctcttgccacccattttataggtcattaaatatgccttttgggcactttttattgaagtattaacatacatttataagtatttacaaattttaagtgtgcagttcattgaatgttcacaaagtgaacagacctgcaaccagtaactaaattattcgcacacttaaatcccccttttaccccactgtcttcattatctctgcccatcaggggtacttcttacttagcatttaataaaatagaatagttggcctgtttttgaacttaagataagtggaaccatactgtatgtattctttttgtctggatacttcgggccaaaattatgtttataaaattcatccatgttgttgcatgtagcagaactttgttcattctgattgtctagtatgtgctggatgaatatttcacagttcattgagtcattctactgttgatgatggacatttgatttgcttccagtttggggctatagtcatgttgcaatgagcattctcatacctgtcatttagttcacatatttatatatccctgctgagaaaacacaaggtcttgctgtgaatagaatgtgcatttgttcagcattagcagatgttgccagatagttttttaaagtggttgtaccagctcacattattcagttcaattcagcagttgttccatacagcatgttgttcaataccaattcagcagcatatgagaattttcggtttctccacatgctcactaatactgggtattatgagccttgctcatttttggcataatgttccatatgaagtggtagctcatcatatagttctcatttgcattttccctsttggctgatgaagttgaacactctttcatacatttcttgaccatttaaatttcctctattgtgaaatggattttcagtctttgttcattttttaaaattgaattatcttattatgtcctagtttcaagttctgcatcagattatgaattgcagtttttccttcccacattgtagtttgcatttttcattcccttaatggtgtattttgatgaacagaagttcttaattttaatgtagcacaatttatcattgctcccttaatgatgagtgtttttaattatctatttaagaaatattagctatgttttacaacatttaaaaactcatttgatggtagtatacagacaatgacactctgatgggtaaaaggcagaactctttgttactggcagctccaaatcagagaaggctgccaggcagggccccataggggatttcacccaagaccatggtaacaacaagctggagctacacggggcagcttatggtaagcaggatgtgtttagctaggtcttccaagcttctcacggattgcctaatctgaatgatctccggggctccagtgtatagggactatccttaattgtttcctacctggttctggggcaataggggcaggcgcacagtggccttagtgtgtgagatcaaaatagtagaaatagttgaagtgtggctttaatcagctgctcagaaaggaaaactgattgtcctctagccagggcttcaggactgggtcaagaaaccattaaaaaaaaaaaaaaagcaaatgtacagactaccataagaagcattgctttattttccatatttaggtctagagttaatctgaagttaacttttttatgtgaactgggtgcaagattcattattgtccacatggatagctacttgattcatcacaatttattggaaaaaarttccatttgcaaccatgatgcagctgtttatttacctctctttctactaataccatgccatagtaattactatagctttataactacagcatctgtagggatcttgatgtcttaacatctgctcatgttactctttcagctgctgttgtacatttgccgttttcattgtcatatgctcttcctccttcttttccctcatccccattccctttcccttcttcttcctcctctttctcccttttcttactttttcttgtcccatcctccttcttcttcctctcattctccttcttctctttctctttttctcctttacttcctcctcctccatcttctcctccttctccttctacttgtcattcttcttttcctccaatttttccttaactgttttagaaattatttagaagttctttgcctttctatagaaatcttaaaggacatttctcaaaatcccaacattttaattagggtagcaatgaaacaatagagcagttcaggggaagaaatgacatctttataatatgagtctttcattccatgaacatgatatggctttctattgatttggtcatctttgattttctcctttggtgcttggtagttttcaacatagaatcctgtatgtattttgttagatttatacttcaatatttttgagccatttaaatggtattgcttttatttaatttctactgttgtacagataaaactgatttttgtataatgatctttaatctgtgatcctgataaaatcattttagttttatgtagttttctgtaaattctattaggttatctatatagacaatcatgtcatacacagatagagacatattatatctaacttaattggatttgtttatttctgtttatttatttctccttgcagtcctagtacttttttgcctcatgtattttgatgctctgttgtcaggtgcatacctgataagtactcctacactttctcggagaattcactcttttaccattgtataatgtccctctttatctccgataattttcctttactaaagtcagctttgtctgaaattaaggtatctagtacagctttctttcgttagtattagtgtatctttacatatcccattttcaacctgtttctgtatttatacttaaaatagtttttctatagaccacatgtaattgggtcttgttttttatctgcttcaacaatctctttcctataataggtatatttagactattttcatttacagtgattaccgacatagttggattaacatctaccatgtttgtaacttttccacttaytgaacttgttcgttgtttcttttccccctctttttctgcctgccctatttttgactgagcattttatatgattctatatctctcctcttttatcatatcaactatatttctttaaaaatttttgtagtggttgacttaaagtttgtaatacaygtttacagctattctaagtttgacttcaaatagcactataccacattatggatagtgtgggtaccacataacagagtattcataattatttcacttatcctctatgaaattgctgtcattcatttcacttattcatatagtgttatcaccgaatacagtgctactattattacattaaccaaggagttatcttttagatcaattaaaattttttaaaaaatattttattttacctttgtttattctttccccaacactcttcctttcttcatatctatctggatttctgacatttgtcactttctttttccttcaataattattttaacatttctcatagaataagtttactggcaatgaatttttcagatttgtttgtgggagtctttatttcttccttactattgaaggataactccactgaaatatagaagtacctctttttgcttgcatagtttctgataagacatctactttaattcttattctgtttctctctcggggttttttactactgtgtctattagaagctttagtttgggactgctatagctcccaggctaggatatataaaaggcaaaaatgaaactatacaaacagaaaaagccaaacaggggctcactgaatctttctttgagtactgagatccttattcagttatcctgttgtgatccctttcagaatattctaatagatgcttcattatgcattttactccagagtttttggttacagatatggaggaaatagagtgacatatgcttactctatgttgtttgaaaccagaagtgacatttttaatactatgtgtgtgaggctaagtttcttgttaatatcctctgatacatagaaaattttttaaagccggcaatccacccagtgatatccataccgcaagttctgttttgccttctgtaggtggtaattccaatgtcaattaagtttgcacagccttttctatattccctgaagctgcccagtgcatgcattrgtcaaggcttcatctaggacttgggccatggattatattgtggatcattctggataccttcactgcggtggtttttgtttagatttgttttgttttttggctctgtgctgcacgtacataggtcaagtttgattctgcatcttatgccatatcatacacaaaattagaggactctgttatctagctgtctcttaggtttttcctacaatttaggactctgaagagtcccttttcctgattattttggctaaaaatttgggtttctttcagggttttattactctacactgtcacacagtggggaccttctttaggttcttactgggactttgtttggagagatgtagtgggaattttaaaaaagagaaaactgatggataccacctccccactctttggacaacagaggctactttcctagtaactgtctcaggaaacaagtcctctttctgggttttatgccattatgctgctgccactgccacagctgccatggaagctcaggtctctggatgacactggccttgggagaggtctagaagggaaaagaagagaagggaaaagtgaatattctttggtcttggggggctcccagatacagttttaactacttctacttggacaactaataaagatgctaaagatgaacaggttattattgtgttgctagatatgtagattaagggcaatctactcttacttaaactttagataagatggaaattttttttcttgggcagtaacaacattaagaacggtgatgatgaaagtgtggttcatgatccagctgcatgaagtccctctatgaaggatgttgaatgtgcatatttctaggccttaactttggctcttgaatcttgattcctagatttgcattctgtattcctgtacacactaaagatttaagacattacttttagatggtgatgaacccctaagtcattgaagtttaagagaccagtagatgattatattattgtatgcggaagatatcaggggcttgaagttgggcctaggcaacagaaatgaaaaatacagggaaaatagaagagatattattgaggtaaggaggacacctgggaactgattaacccttgaaggtaaagaaggggtatgttaaaagatgactcagaggaagtattttggatgcatgtgagaatgatgataccataataagataagggaatgtcaaagtaaactctagatgatttaattagactggatttgagtatggggatttgagtaattctggcatgtctgtatggggtttttgagactctgtttaaggtagggttagtataagacacaccttccaagaatttacaatctgttagtgggattgagaaataaggaaaaaaacaactaaagctaacttggattgagctctttctatatgccaaacacaaatgatgttctaaacattttacatagataggttacgcaacttgcccaagatcacacagctactaagtgaaagagctgagatttaaaaccctgtgttctagactctatgcttttaatgtctatacaattaatattaccaaatttatggcaatttgacctctctagccatcagtttccttatttctaaattaaggataataatctggtagaatgtgtgtgataacaaaatgacaccatatacagaacctagaaatagtaggtgttcaaattgcatgatttagttctcatttttttaagtggttcagattttttaaaatgctgtttgaaaatactgtatctgtaactacaagaccagttttctaaactttcacttatttttggagatcttcatggtgcttcaataaaaattttataacactagaagaaaaaaattatctgtttttcttttccttttctatagctttgtagaactattattgaaagacaataaactacacatatttacagcatacaattgaataaatttggacttatatatatgagaaattatcatccctaaatttccctaatgacctttgaaattccttactccttccctgtctgcctctgcctctgagaaatcactaaatgacttatcttgttatagattatttcacattttctagactattatataaaaaatacaatatgtactrttttttctggcttctttcagtataattattttgagattcaaccatgtgtgtatcaatagttcatttaaaaatattattgctgacaaatatttcattgtgtagatatacaatagtttgtttcttcacattttgatgggcatttatgtcagtccaatttttaactttattaaaaataaagcagccatgaatattagtgtatgcatgctttcacatggtacatttacatttaactttttaagaaactgctaaactattttctaaaggaactgtaccattttacatttctaccagcagtgtctaagagttgcagttgctccaaatcctcaccaacacttggtatggtgagtctttttaattatcatattggtttgtgtatgttgaaccatccttgaatttgcragatagatcctatttgatcatgatgaatgaagttttccatatgtggttgagtttggtttactagtattttcttggggatttttgcatcaatattcatcagggatattggcctatagttttctgtttttgatgtgtcttcatctggttttgatgtgtcttcatctggttttggtatcagaattgataccagaattagcatagcacgagtttagaagtattccctcttcctctattttttgtaatagtttgaataggattggtatttcttctttaaatatttgatagaattcagcagtgaatccatcaggtcccaggcttttctttgctgggagactttttattacagcttcgattttgttacttgttattggtcttttcagattttttatttcttcatggttcaattttggtaggtggtatatgtctagaaatttgtccattacttttagattttccaatttattggcatataattgctcatagtagccactaattatcctttacgttactgcaatatcaatagtaatgtctcatttttcatctctgatttttatttattttggtcatcgctctttttttcttaatctagctaaaggtttgtcaattttgtttaccttttcaaaaaaacaagctttaatttcattgatcttttgtattgtttttgcatttcaattttatttatttctgctctgatctttattatttattttcttctcctaattttgagttttgttgctcttgctcttctagcttctttaagacgcatccttaggttattcatttgaagtttttcttcttttctgatataggagcttatacactcccttgttagtactgctgtcatggtatctcctaggttttggtatgttgtgcttacattatcagtcatttcaaaaaatatttagattatactgcttgggtgataggtacaccaaaatctcacaaatcatcactaaagaatgtactcatgtaaacaaacactatctgttccccaattatatrtatatatatagcttccctcttcacttgacactcattctctctcctgctgccctgtgaagaggtgccttctgccatgattgtaagtttcctgaggcctcctcagccatgcagatctgtgagtcagttaaacctctttcctttataaattacccagtctcaggtattcataataaaatgaaaataaaaataaatttattcattaatttattcattgacccactggtcattcaggagcatattgtttaatttccagtgtttatatagtttctataattcttcttgttattgatttctagttttattccattgtgtcagagaagatgcttgatattagttcaatattttgagtgttttaagacttgttttgtcacctaacataagatttgtccttgagaatatgtgttctgagaagaatgtgtgttctgcagccgttagatgaaatattctgtaaatatctgttagatccatttggtctatagtccagtgtttctttgttatttttttggctggaagatctgtccaatgatgaaagtgaggtgctaaagtctccagctattattgtattagggtctctctctctctctctctctttagctctaatatttgcttcatatatctgggtactccagtgttcagtgcatatgtatttaaaattgttatattctcttgctgaattgaccctttttcattatacagtgatcttctttgtctcttcctatagtctttgtcttgaaatctattttgtctaatataagcatagctactcctgctcatttttggtttccattgacataggatatctttttccatcccttaattttcagtctatgtatgtctttataggtgaagtgtatttcctatagacaacagattattattattttttaatccattcagccactctgtgtcctttgattggagaattcagtccatttacatgtattattattgataaatagggacttgyttctggcattttgtgatttgttttctagttgttttgcggtcatctcttccttctttccttccttgctgtcttttagtgaaggtgrttttctcttgtggtatgatttaacgtcttgctttgttttttgtttctattgtatatttttttatttgaggttacaaataatatgaggcttgcaaataatatcttataactcatcatttgaaactgatgacaacactaattgcatcaacaaacaaaaggaaaactaataaaaaatcagcacattaactttttcctcctgctttttaatttttttttgtttctatgtatattgtattataatctctaygtcttgaaaagttgttgtagttattatttttggttcattcatctttcgtcttcctacttagaataagaatagtttacataccacaattgcagtgttataatattctgtgtttttctgtgtacttagtaagaccagtgagttttataccttaagatgatatcttactgttctttaacagccttttcttcctgattaaagaactgcttttagcatttcttgtagggcagtctggtgttgatgaaatccctcagcttttgtttgttttggaaagtcttcaattctccttcatgtgaaggacattttcaccagataagctattctagcataaaagttttttttcctttggcactttaaattaatgttatgccactctttcctgacctgtaaaggtttcctctgaaaagtctcctgccagatgtgttgcagatccatggtgtgttatttttttctcttgctacttttaggatcctttctttatccttggcctttgggggtttgattattaaatgtcttgaggtagtcttctttgggttaaaccttcttagtgttctataaccttcttatacttgaatattgatagctttctctagtttaggaaagtcctctgttattatccctttgaataaactttctactcttgtctctttctctacctcctctttaaggccaattactcttagatttgctcttttgaggctattttctagattttataggtgtgcttcattattttttattctttgttaatcttttttcttttatattctctgactgtatatttctaaatggcctgtcttcaatctcactgattctttcttctgcttatcagctctgctgataggagactctgatgcattcttccttatgtcaattgcatttttcaactccagaatttctgcttgtttcttttaaagtacttgaatctctttgttaaatttatctgataaaattctgaattccttctcttcgttatcttgaatttctttgagcttcctcgaaacagctattttgaattctctgtctgaaaggtcacatagctctgtttctccagaattggtccctggtggttttttaagttcactttgtgaggtcatgttttcctggattgtctcaatgcttgtgggtgttagtcactgtctgggcattcaagtagtagatatttattatagtcttcatagtctgggcttgttggtacccatccttcttggatagtctttccaagtgtttgatgagatttgagtgttgtaatctaagccatatctacattaaggaacacgccaaacccataacactatgcttcttgcagactcatagagataccaccttggtggtcttcagtaagagctggaagaattttctggtttactaggcaaagactcttgttctcttcccttactttctcccaaacaaatggagtttccctctgtgtgctgagctgccatcaaaactgggactctgttgggttagaccttgtattaattcgttttcatactgctatgaagaaatacctgagactgggtaatttacaaaggaaagaggtttaattgactcacagttctgcatggctggggaggcctcaggaaacttacaatcatggcagaaggtgcctcttcacagggcagaaggagagagaatgagtgctgacgaagaaggaagccctttataaaaccatcagatctcctgagaactaattcactatcatgagacacagcatgggggaaaccacctccatgattcaattcttcaatcatgattcaagggtcctgccttgacatgtgggaattattacaattcaaggtgagatttggatggggacacagagccaaaccatatcagacctgaagccagcacagcactgagtctcacccaaggtccactgtaaccactacctggttaccacatgtgattgttcaaggccccagggctctacaatcagcaggtataaatccagccagactcgtgttcctctaggacacagatgggtccagagatgccatctgggagtcagagattggagtgaaaaaccttagaaatctacctgatgctttatttattgcacctaagctggcactcaaaccatgaaacaaagttgtttccactcttcccttccctttccacgggtagatgagccgctccctattgtcaccattaccacaggcccatgaggagtactgccagtttaccaccaatgttcgcttaagactcaagggctcttgggtcagcttgtggtgaatgctgccaggcytgggacccattcttcagggcaatgggttcccactctggctcagggtaggtccagaaatgccatcaaagagccaaggcctggaatcagggatgatcccatttttaagaagattatcctttgcttattgaattgccttggcatctttgtaaaacggtattcaattatgtacgtatacatgtgagtatatttctagacgttctgttttctttcattaacctatatttctatcttaatgccaatatcacatagtcttcatttatatagctttatatttagtcttaaataaatcagggtaagttctccaagttgttcaccgtttttgaagttgttttagctattttaggtcccttgcatttctatggcaattttagaatcagtttgccaatgtctaaaaaaaatcctgctagaattttgattgggattgtcttaaatctatagaaaaatttgagtaatattaaaatattgtttcaatccatgcacatattatatttctcttgtttttagatttatttctctcagcaacatcttatagctttgtttataaattgatcccttaatttcatatttctgtgctattctttgatttctgacagtttattgcttttatatgtacctttaattgatttttatgtgttgatcttgtattatgttacttacataaactcattttatagtcccagaagattcttttgtacatttggtgtgattttctgtatagctgatcatgtcttttgcaaataataacagttttctttctttctttccaatgtagttggactgttattgcacttgtttctgtttctttccttattgcactggtttaaacctccagtcatatgtctaacagaagtggggaagtggccatccttgtcaactttctgatcgtaggtagagtttttaactaaaaatttagtttttaaaatacacgatactactcaggctacatagctttttttttttttttaaatgactgttartgttttgtaatttwaaaaaattttcaattttttcttagttgttaaaattattgacatgaaattgtttacaatgtccccttattatcccttaaatttccatagcatgatgtcacctcattcattcctgatattgataatttatctattttcttatttttcctgactgagtctggctaaagttacatggtgtttgtagtctttctcaaggccaactttggtttcatagatctttcttttttgttgttctcactattatggatytttgttctttattattatttctctactgcttacttagtgtttaatttcttcttttacaagtttataaatgtggaaatggaagtcattgatttgagatctttctttttttctaatatgacctctaatggtaaaaattttgctctgagtaatttttgttgcatcccacaattttggtatgttgtattttaatttgcaatttgtttaaaatattctctaagtattttggactcatatctctatttaatattttgtttctaaatattttggggttttacagttacttttctgtcactgacttctaacattattttggccagaaaatattctttgtctttgtayctttcttaacaatgtcacaatgtctttcatatagcaaatttttaaaaaaattttcctgagctctagtatgtcacattttcctctgatgaattgtattttttgctatcaactctaagaactcttttcctagtcctggatcatggggattttatattctggaagttttagtgttttatactttacatttaagtgcataatctattgtgctaaaattgtataaattgtgaggtttcgatggaggttcttttcatttcttatattttgttttgttttgctgatgaatgtccagctgcccatcataatttattgtaaactatctttctcttccattgaattgtttgttcctttattaaaaaataattgatcatatttgtgtagaacttttttgggttctgtatactgtttcattgattaatgtatctatcttgccaccaatactatactatcttgattattagacatatataataaaccatgacattgaggagagagatttctcccactttattcttccttttctttcccatataaattcaagaatatgtttctttatgtctataaagaatcttattgacaatttgataggcattgcattaaacctatagatcttataggaaaaaatatttttattcaacaattccacagtatattgagtcttccaattcatgaacatggtatacctcttcttgtatttaggtcttttaaaattactttcacctgaaattataaaatttcagaattttgtaatttttttatacaaattgtatatatactttattagatttatacctaagtatttcatgtatttgggtaattgtaaatggtattacattagttatttcagattccacctgtccattttcagtatatagaaaatgcaattgatttgtttgtattaatcttgtgtcctgacaccttattgaacttgcttattaatttcaggagttcttttatagactccttgaagtgttttatatagacaattatgctgtcttgtaacagagactttttttttcttttccagtttacctgccttttattttacttatttactttttaacatattgcctttcaagacttgttagttgggataaaaacagccttaatctacagctaattttgcccccactatatagagccaatgcctttctgggtcttgtrcccagtgcaccatggtttactagattttccactctagttggtgggaacatgaactatcccagctctgtgtaatgtctgaagattgtttcctctggtcctttcaggtagttttcttctagctcttttctaaaaactcatgtagttgcctcccacatatyccctgactagtattcagctgaagacttgcaggtaactctctgcaactttccagagcttttttgatacagctctatctgctgcagtaatctgcctattgagatctagtcatcttaccctcccagctccatctcagcaaactgaagcaatgcttgaaaatacctcatttgttttccctctattaggacacactgtcctacgttgctctatatccaatgtctttcgtatattttgttcagtattttagttgcttcaggtgggtggagggtgggtatgaaagtgattcctgttagtttatctggttggaattgaaagtatcataaaactctatgttgactcagtgtgtttttgaagcttattgggtcttgattattacatttcaaactctactatctgtaagcaaaagagacataggccaagttatccttgtaaagaactcataagaatttcctgacttacctggctgatgcttcctttggggacattgccttcatgatcatatgggtgttggagtgtttgtcatgccaaagagaatctgcatgtgtgactaataagtcagcatttcaagaggcctggctatactctgcttaaaagtgaaaaagcactggattggcaggcataacaaggagaaagtggcattgatatggtaatagtgactttttaatggtctaaggaaagattccctctattctttaactgtgcattggtggtagggtgttgtgtaggtttcttgtctgccaaggcaatgaacagatacattatggtcacttttgtggattataatagggaaaatgatgattcgaaggaaagttaaaaggtatttaataatgagaattgtattagctttcaaatatctgttttcccttcacttacttccttgttatctcttcactgggagatgtgcttccatggctttcatcttttttttcccctcttttaaaagatatttcaaactttcttttcatacatttctcttatatattttaggcaagtagaagaaacccaatgttgtctgcatttgtgtagtttatgtgtgcccaggcctatatgactagtgttttgataacacagaatcatgatctgctttgacattccaaaattatggaggagagaaagtaccactctttgcacccttgttttcttgtaggacccttaaagactaatattaaaacatttgcccttctcaagacaattcaacaccccctcttcttcaggtaatgtctgccaccatgcccaccacttcaactcaagtataccccactgactctattcagtagagagatggcaaaagtgtgaaattgtattctcttccccctatttcagttctctttttgaagaggaaaccaaccaaccaagtttatatcttgaaattactatctgtgggatatttgcagctgagactaagtcctagtgctttcttaataaaagctatgcatgtaaatagggtcagcttttgggctgacattgcatttgaattaaaatctggcatctccacaccattgacaaatctgacagctggagcagcagtcacctcatcatatctctcagttgtgtctttcctggtttttggcatccttcctgtctaaatttttatcagatgagcacttttccttggcaagtactttaaataccttcaacttgttttatctctgaactgtaaccctttgccctcagatgtcatatctcacatgtatgactggaggatattcagaacaaattagttaagaatgcaacaccagagtgcaatttcatttggtcttctccctgccccatcctcttcccaaatattggagcttcctgttgaagagacctttatggacattgattaatttcatggaagctacttaatggtcttgcaaattggaacagttgtaagttttgattgtgacactgcagggctaactccacctgtgctaagcattcagcattgttttctttggctttgcttcattcacgataatcaaggacttgggttcattaccagcattagcaagcctcaaaggcctctcataaatccaagccaaacactgtgttaggaggttccttagattaatggcagccctggttctctgaggctgtgttgagatctgagagaaggtaatgttcactcggcttcagcatttctacttgtagttcaaagccaaacctggaggtacaggatgatctgcaggcaacaagagatagaatgtgggcctgcaaaaggtaccacctgtatacatgatgagctcttcctgcctggcacgcaaagaactttagagttttcctcaagccttttcctatgaaaactctcaggttttgtcagctgggtcaatccattgcctttccaatacacctggagcatttcttccttgatgaattaagggctgaacaaggatgcatgtcaggggtgaaaccctttgaagagtgcaaaaataaaaattggttgtttagtaagtagaaagataaatcaaaaccaatctataaaagttagattcatatctcttttcagggtcacaatttgcctttgttttctagcatcttcatcggtgcttgcaactgaaatgggtcttcttttgactcttggtctttccttagttaagggtgagggagactctttggttctccagcggacaaaagaagacagctaacaaataagtcactctttcttccatagtctatttataagccttacaagttaatgctggaaaggccaatgagaagaaaaataaaacaacagtagtagtagtagtaataagcatgatcatcatcatcattggccgcatttttagagaatttgctatgtaccaggcactgttgaaaagaaaaataactttactgagatataatacacattcaataaaattcattcacttgaagtataacagttcagaagtttttaatatatttacagagttgtgcaactgtcaccactatctaatcttagaacatttttgtcacccccataagctgccctatatcatgagctgtcactctccattcctcttgagcccccaacccctgtcaagtactaatctactttctctatatatgtatttgcgcattctggacatttcacataaatgcaatcatatagtgtgatcttttgtgcctggtgtctttcacgtagcatgttttcaaggttcatcatattatagcccatgtcagtacttcagttctttttagagatgaataatattctattgtctaggtacagacatgccacattttgttaattaccatcagctgatgaatattttgactagaattcaggcattatacttttatttttaacctttcattttgaattaatttcacactgttgaaaaattagtaaaattatttcttatacacccttctcccagatttcccagttattaacagcttatataatcacagtacaatgatcaaacatcgatacaatactattatctcatctaaagaccttattcaaatttctccctctgttgtactaacattctttttctagcacaggatccaacccaggatcacatattgcatttaattatcatgtctccttagtctttttaaatctggaacatttcatcattttttaactttgagactttacatttttaactttaaatatatattatttttatgttatatattttttagaaatagggtctcactctgtaacctagactgagggcactggcatgattgtagcttactacagccccaaactccttggttcaagtgatcctcctgcctcagccttctgagtagctaggactacaggcatgtgatactgtacctggctaatatttaagatttttttgtttagagacaggattttgttttgttgccaaggctgatatcaaactcctggctttaagcaatccttctgtcccagcctcccaaaatgctggaattacaagtatcagccactgggcctggccttagttttatattttaaaagctaagcacgcttactgcagaagaatatataaaacatgtaagacagaatgaatagaaatcacccttatttcattaccattagatggtcactattgacaatttgatctatttctgtccttctattcatattattgaaaatataatttatattctcttttaaaccagcattatatcatgaccattttccatgcattaagaactcttaaaaaacataatagtttcataatggtccatcttgtggttaatacatactgccctccagcatatctgtgatattaaacatttaggttttctctggtgaaacaaaatgaaattagtcaatgtgtatgaactgttttaaggttactaatttgtattgctaaaatgacttccaaaatgatgatatcaatataaattcccttaggactctgtgaaagcctgtttcaccacaccatcctcagcactggggaaattcatctttttccaatgtttgaaaaattaaattccactgtgcctttagtttgcatttccttattagtgatattaacttttaaaaacagttatcaatttgtgtattttctttggtgaattgtctctttgtatgcaaaatataattttttaattataaaagaaatcaaggaaaaggtatgctttacacactatgcttattttctgcctttttttaaaaaaaaaataaaagtaacttcaacatttattttagattcagaggggtacatgtgcaggcttgttacatgggtctattgcgtgatgctgaggtttgggatatggatgatcccatcatgtaggtagtgagcatagtacctaagaggtagtttttcagcccacactccctttctccttctcctctctagtagtctccagtgttgatcgttgtttccatttgtatgtctatgtgtactcagttcttagctcccacttataagtgaaagcatgtggtatttggttttctggtcctgcattattttgtttaggattagcctgccgctgtatccatgttgctgcaaatgacatttcattatttgtatagctgtgcagcattctaaggtgaacatataccacagtttccttattcagtctactactgatgggcacttgggttgattccatgtctttggtattgtgaatggtgcagcaatgaacattcaagtacatgtgtctttttggtagaacaatttattttcttctgggtgtatamccagtaattgggttactggttgaatggtagctccgttttatgttctttgagaaatttacagactgccttccacagtggctggactaattttcattctgacagtgtgtaagcatttgcttttctccatggcctcaccagcatatgtcattttttgactttttaatatagcaattctgactggtgtgagatggttttccattgtggttttcatttgaatttctctaatgattagtgatgatgaggattttttcatgtttgttgtatgttttcttttgagatgtgtctgttcatgtccttttcccatttttgatgggattatttctttattgcttgttgatttttttaagttccctatagattctggatattaggtctttgttggatgcatagtttgtgaatatctgctcccattctttaggtagtttgtttgctctattgatagtttcttttgttgtacagaagttctttcgtttaattagggctcacttgtctatttttgttttagttacaattgcttttggggatttagcccaaaattctttgccaaggcctctgtcatgaagagtatttcctatgttgtcttccaggatttttatagtgtgaggtcttacatttaaatctttaatccattttgagttaattttttacatgtggtgaagggtagtggtccagcttcaatcttctgtatatggctagccagttatcccagcatcatttattgaaaagggagtccttttcccattgcctatttttgtcagccatgtcaaaaatcagatggttgtagttttgccactttatttctgtgttttcttttctcttccatttgtctatgtgtatgttttcataccagtagcaagctgttttgggtactgtggctttacaatatagattaaggtctggtagtgtggtgcctccagttttgttctttttgcttaggattgttttggctatttgagctctttttttgtttcatatgaattttaaaatagtttcttctaattctgtgaagaatgacattggcagtttgatagaagtarccttgaatctataaatttcyttgggcagtatggccatttttatattgcttcttctaatccatgaccatggaatgtttttccatttattcatgttgtctctgatttctttcaacagtgttttggagttctccttgtggagatmtttcaccctcttggttagctgtgttcctaagtattttaatttctttgtagtgattgtaagtgggattgttttcttgatttcactctcagcctggacattgttggtttatagaaatgctgctgatttttgtacattgatctttgcatcctgaaactttactacaatttttccttttttttctttcttttttttttgctaaagtggtttatgaattttgggagccttttggcagagtctttagggttttctaggtatagaatcattttgtcagagaagatagtttgatttcttctttgcctatttggatgccttttatttctttctcttgactgattgctctggctagggcttccaatactattttgaataggagtggggagagtggacatatttgtcttgttacagttctcccagggaataatgctttcagcttttgtctcttcagtatgacattggctatgggtttgtcatagatggctcttattattttgaagtatgttcttttaacacatagtctgttgagtgttttkatcatgaagggatgttggattttatctaaagctttttctgcatcwattgagatgatcctatggcttttggttttaattctgtttatgtgatggatcacatttattgatttgtatatattgaaccaacctcacatcacakgaataaagcctatttgatcttggcaaattaactttttaatgttgattcaccaagatcaagtagaatttattctggagcctacggactggcgctgacattgtagaatgagtaagggaggagcccctcatccctgattttttagaatagtttcagtaggattggtacccatttttctttgcatgtctggtaaaatttggctgagaatctatctggtctggggctttctttgattggtagtttttttttttcaattgttgattcaattttgaatgtgttattgttccgttcaggttttcactttcttcctggatcaatcttgggagattgtatgtttccacgaatttatccatttcctgtagattttctaatttctgtgcatcaagttgttcataatagtctctgaggatcttttgtatttctgtggtatcaattgtaatgtcatctttgtcacttctgattttgcttatttagatcttctgggtttttttcattattagtctagctagagatctatgaattttgtttattcttttgaagatctaggtcttggtttcattgatcttttgcatggrtttttgcatttcaatttcatttagttgttctctaattttaattatttatttctctgttatctttggggttggttcttttttttttttaagttcctctaagtatggtgttggattgttaacttgaggtctttctaacttcttgatgaaggtgtttagcactataaactatctccttttaacactgttttagctgcatcccaaagattttggtaagttgtgtctatattttcattaatttcaaagaattttttttatttctgccttaattattttgttcatgcaagagttactgaggagcaagttgtttaatttctctgtatttgtatagttttgagagatcttcttggtattgatttccatttttattatggtgtggtccaagagtgtgcacagtatgatatcaacttttttgaatttattgagacttccttaatgattgagcatatggttgatattagaatatgttccatgtgcagatgagaagaatatatattctgttgcagttgggtatagtattctttaaatgtctattgggtccaattggctgagtgtcatgtttaaatccataatttttttgttcatttctgcctcaatgatatgtcagtaaagtctgtcagtggagtgttgaagttttccattattattgtgtgggtcttcttgtagttgttttatgaatctggatgctccaatgttgggtacatatatgtttatgatagttaaatcttcttgttaaatcaaaacctttcattatgtaatgtccttctttctgctttttgtttgttgatgttttaaagtttgttttatctgatataagaatagtgagtagtgctcttttttccttcctgtttgcacggtagatcctgctacttttagcctgtggatgtcattacgtatgagatggatctctaaatgatggcagagagtttgatcttgtctttttatccagttggccactctatgccttttaagtggggtgtttagactgtttacattcagggttattattgatatctgagattttgaccctgtcatcatattgttagctggttgttttgtagaattgattgtgtagtttctttatagtgtctgtgggctatgtgcttaagtgtgtttttgtggtagcaggtatcattcttttgtttccatgtatagcactctgttaaggacctcttgtaaggttggtctagtggtaataaattccctcagtatttgcttgtctgagaaggattttatttctcttttgcttttgaagcttagtttggcagaatatgaaactgttggtatgaaatttctttttttttttttaaggatactggaaacaggctccctatgtcttctgccttgtaagaattctgctgagaagtccactgctagcttgatgggattccctttgtaaatgaacggatccttctctctagctacctttatgatgttctcttttgcatttaccttgatgattctggtaactatgttccttggggattgtcatcttgtatagtattttgcaggggttcttggtatttcttgaatttgcatgccagcctgtctagcaagattggagaartgttcatggattaataataatgtcaatgacttgtaggtttggtctctttatataaccatatatttctcagatgttttgttcattttttaaaaattattttttaaaaaatttttatctgagtttactcaaataactggtcttcaagctctgagattctttctgtggcttggtctattctgctgttaatgcttcttattgtattatgaaattctcatagtgaattttttcaattccagaagttcagtttggttcttttttgaaatggctattttgtcttttagctcttggatcattttactggattccgtgaatttctggattgggtttgaatgttcttcttgatctcaatgagcttccttgccatccacaatgaattctatgtgtgtcattttagtcatttcaaactgattggataccattgcttatgagctagggtgcttatttggagggaaaggaacactctgactttttgaattctcaggtttcttgcatggattctttctcatttgagaggactggtgtttctttagctgtagcataagttgagtataatcaattggctttgtttctgggygctttcagggtgccaatgcyctgtacaggatctgtacttaaagctggatttttgccccttctctaggagctatttggggccaggaactgtccctgacatttgacaaatctatgcagggttcccagcttcctccctcttcagccttggggtctgcctcacctctcttttgactcttggtattttctctttgaaaatctgttcaaaatatgttagyttacccaatttttggtctttcttggtgacagcagtgcttcctgactgtgtccagttggacgtcttgtccagaacccctggtgattatttttaaaatgaagctttgttgtagcactcttggccaatttaatataatgtccttttttccctttataagttagccttcatgtcttcagtctacacttagacattcaggtcctaaatattacctttgcatattcagtatacaccagctccattcatagctgaacacttcaccaggttcctaattcctgaaagaacagaagccatatctgtatcccaggaggctggggcgacaagatggtggatctccccttattttcttttcatacattttttcaccaaaatttgacttgtatttgcagctatctgctatcaaacactagaagttattctttctcactgtatttttgtagctatcaaccaacttttcttcatccctctctcccctctacttttctcaacctctgttaaccactattctactttttagctccatggcataagtattttttagttcccacatatgaattataacatacaatatttktctttttgtgcctggcttatttaacataatatcctccagttccatctatgttgctgcagaatgacaggatttcattctttttatggctgaatattccattgtgcgtatataacacattatccatttatctgttggtggacatttagcttgattccatatcttggctatggtgaatagtgttgcaacaaatataggagtacagatacctctgcaatatatttatttactttcttttggacatatacccagcagtgggatttctggatcatatggtagttctactgtttataaattttttrtactggctgtgctaattctaattcccaccgtaagtatatgaatgttcccctttctctgcatctttaccagcatctgttattttgtgtctttttgataatagccattttaactgaggtgagttaataattcattgtagttttgatttgcagttccttgatgattagcaatgttgaacattttttttttcatatacctattggcyatttgtatgtcttcttttgagaaatgtctattcagatcttttgcccattaaaaaaaaatcagattgttattaatattatttttgctattgatttccttatgtattttggttgttaatcccttggcacatgtataatttgcacatattttctcctattttgtaggttatgcattcatttgtttattgtttttgttttttgctatgcaaaactttttagtgtgatgtaatcctatttgtctctgagtcttcttatccttatcttagaaatgaatctaatactatttgtctgtctgtgttgttggctgtgcttttgaggtcttactcaaaaaatatttgctaagattgttatcctaaagtatttcctcattgttttcccctagtagtttcatagttttggttcttatattaagtttttaatccatttttattttatttttgtatgggctaagagataggggtctaattttattgttctgcatatgggtgtccagtttttcccacaccaatcattgaagagactatcctttccccagtgtatgttcttgatgcctctgtcaaaaatgagttggctataaatgcctgggtttatttctgggttctctatttttttccattggtctatgtatctgtttttgtgccagtaccatgtaactctggttactatagctttatagtacattttcaaatcaggcagtgtaatgcctccagctttgttctttttgctcaagactgctttgggtattccaggagaatgacatttttgaagaatactagccaattattttatgcaatatccctcaatttagaatttttagatgcttcttcatgagtaaatttagatgatgcatatttggccagaatagcatactgcatccttctcagtgcattgtatcaggaggtatgtgatatcaatttctcccagttgtggtgataccagctttgatcacttggttaaggggaaatctgtcaggtttctgaaaagagttcctgttttcctttgtatttaataagtatcttgtggggagatattttgagactgtgtaagtatcctgttccacatgataatctccttcactaagtttagcacctgttggtacttacctacaacagttattaccgtggtgtttgccaaatggtgattttctactctcatcacttcttatacatttatttctccaaatactgctgtgagaaagagtttaccatgctctcctatttatatatttacttatttataacattgtggtctcatggattcttactttattctatgggttataatccattactgttgttatttatgttgttgatcaaactgttttaagatttgcccattgggagactgttccatttgactcttgactttttttttttacatgcccttgttatttattgtgctattccttattttcttttataagttgatcttatacttttctttgtctggaattagccatttctccaaggaaatctgatgacttttactggaggaaggtacttagaaatcatgatctggaccgtgttctattttatcttctccctatgagttaggcacaattagcaatcctacatttttaatgaaataactgagaactcaagaagttaaataatacatctgatgccacacaactgaaggtgatagaacyactatttgaacccagtctaaagtttggtctccagtgtccatacttaaatttaatttctctctgggattggaaagcttttccagtgtctctgagtcttcttttccttgtcttagcaatgagtctagtactatttgcctctcagtgttgttgtgatggctaaatgaaaggacacatcggaaattgtctatacattatttgttccatagtggatactcaaatatacrttgaatttgagctatattcactcagtattcataaacacccactttgttcgcagcactgaggtagaaaatatgcaggtacatgcatatttcctggtaagagctcatatttcctggcaataatttctaatgtcactccttcctgtgcatccaatataggataccagaatcctttccaagatagaatttaggcagacactactgaacaaatgaaacgtatttgctgccctagacatgagtgatgaagggttgggagaacaggcgtgactctaccaaaaacaggcagataatccaggctcacatttcaaaacaccttgcaacttaagtttctaaccattttctaacagtccttgaaattatgctaatataaggacttccaggcaacatagaagactgggtgtacatgctaatacacaaatgacatagaggatcagcatcccaacttcttggaatatgccagacagtaataaatgtaacagccacaaaattccagccttgcttaatttggggaaatgagaatcagtttgttcttcccctgctggcactgaacagtggtttgcaggatcactgcgtgggaaagatctgacagtagagatctgagaggctgtctgtgtgaaggctgaatttcatgaactatctcattgttgggatggttccctttcagcctcgtggtaagtacaacactcaggtcactgtaagcgcagggcaggcaagcttaagccacaatgagtgaaaatatgtgtgtattgggttgggggaagggattttagtctggattatctgaagctcagactttaagctgagagcctgggctgccaagcaggtatatgtaaaggacagctcaaagctgaggtttaaaactagtatgctccaaccaggctgtgaaagtaactaaagtagctgagtgcctcagatcacctaatgtttatttttgttttgttktattttttgtttttccatttttgttgttgtttgtttgttgttttttctgagacagagtctggctttgttgtctaggctggagtggagtggcacgatctcggctcactgcaacctccgcctcccggattcaagcgattctcctgcctcaacctcctgagtagctgagactacaagcgtgtgccaccacgcttggctaatttttgtatttttagtagaaacggggtttcaccaagttagccaggctgttctcgaactcctgacctcagggaatccacccaccttggcctcccaaagtgctgggattacaggcgtgagccaccacccccagccgccctaatgttttacaagtttgagacataaacctgtggcatgcttttttttgggaacatgattcagaaatcactttttcctatcaaaaagcagaaaaatgagccatgatgattggaatccttcctgatcttataggtagactgggaaagcatagctgggaagagcacagacagggagatcagaagaacctcggactgccacaaaatgtgtaatgccaggtaacctaagccagccagtcaatttatctggggatcacttcttcacttgtacagcgaacaagatgaattagataattgtataattccttggagctctgaaattctactgcacaaatagatgcctcgtgatcgctgttgagatgaggtcttccagagcctgtgatcccagatgtgattgatcatcttgccagagctttagccaccttctcacctgttagacaattcctgcccctgtgtctctactgtatcgcctttcacagctcatatgctgcacctatgcagtcttcttcagggtaagctgtgtgaagtttaagtttcttataactattaaacttcatcttgcaaaggattcttcctttgaagaccaggttgcaaagtaaataaaaatgaaactacacttgataaagcagggatgggaagtctgtaaccttatccttattgtgggatatttgaattgtctctattttttgctatttgtcttcaagttgtcctaagaaggtgggatcaatatcccccatcctattggttcagagtcaagactaatgatgccacacatgcatgaagagtgtatggaaacatttattatttacatcatgaggctttctagggagagcagaggaaacacccaagcttttctattagatttgagtgaggaaggcacaagtggctttggtttctactgtgtgtgggtgtgggctggcattagggctcccgtgtacaggctcaagtttacgtggtttgacttctatgctagtgccaaggaaaggagggcctgggatttttttttaattggcttgctcatgtgtgaggggaaaagagaagtgggagaaaaggggtctgaaagctgtcagcagccagataatggagtcagatgatcttacatattagaaaattccaaggaaaccactaaaaacctattagaactaatacatgagttagcaagattgcaagatacaagatcaatatgtgaaaaatcaattttctttctatacatttacaaagaactatccaaaaatgaaattaagagaataatttcattcacaatagtatataaatatattaaatatataggaataaatttaatataatgtgtaaaacttacatggtgaaaactcaaaacattaaaaaattaaagaagagcaaaataatagaaagtccatattcatgaattaaaagtcttaatattatcaaaatgacaatatttctcaaatttatctagattcagcacaattcctatcaaaatctcagctggcttttttttttttgcagaaattgaccagctaattttaaaattcatattgaaaagcaagggatccagaataacaaaaataatcttgaaaaagaagacaaagtaggatgacttgctggtatggtttggttctgtgtccccacacaggtctcctcttaaattgtaatcttgtaattcccatatgttatgggagggacccagtgggagatgatttgaatcatggggatagtttcgcccatactgttctcgtggtagtgaataagtctcacgagatctgatggttttatcaggggtttctgcttttgcatcttcctcattttctcctgctgccactatgtaagaagtgcctttcatctcctgccatgattctgaggcctccccagccatgtgcaactgtaagtccaattaaacctctttttcttcccagtatcgggtatgtctttatcagcagtgtgaaaacggactaatacactcacacttcccaatttcaaaacttcaaaaacagttatgaagaaagtatagtactagtatgaggataaatgtatagatcaatgtaataaagttaaaaattcagaaataaagccttacatttaaggtcaattaatttttgacagtggtgccaagacatttcaatgggaaaagaacaaccttttygacaaatgatgatgaggcaacagaatatgcctgtactcataaataaagtttcaccccttccttatacaatatacaaaaattaactcaaaatggatcatagactaaatgtaacagctaaaatgataaaatttttagaagaaaacataggagtaagtcttcatgaccttgggctaaacttcttagcaatgataccaaaagcaaagcaaccaaagaaaaaatagtgacccttagaatcaccattaaataggaagatagtaccccttgtattatgggccttaatttctataggccttgtttttttaatctgtattgggacatattaactattttaaccagagatggattattctattttaggttcgtggtattccatttttttaagctgattttcaatgtcaaagatttaattttatttcaatttattactcattgggttaggtcatatctactacgtgatatatgttaaggcaacaggtgctaaggccatggagaatttagagaaggaaagtgtaccagtagtcaaggtgaggcatacctgtttgccctctactttgcatttggtaagcaccctaagagtatggtaactctttattacatatagatcaatgtaataaatttatgtttaaactcttaggggagttaccacatgcaaaatagaggacartttaaatttggtgagatccccaaacataactgtaatttgagccacagaattagttaagaccatgaaggtttgccaattcttttcagcttagcagattttagagttagtttcaaaccctgtgttttaaaatacaaaagctaattggcatcctttttacttttcaatttttattatatatttttagtacattttagatttctaattggatcaaattatggatctctgttttagtttcccccaccactcmcttttatttacttgcttttaaatttgacggttgctggatacactttaaaggggttgtgtcttctttgttcagatgtatatatacacattttcccttcagagagtaccaactcattatcatcaagctgagggacctctcccatggcagttgttttattggatagggtactggcttaagtagagtttgaattagccctttaacatgttgataagccacatcactcaatgaacaccgtgtctttgttggtcaattttatatataatagttgtctgttagtgtcctctggccctttaagtggggcagggataatgcattcaagtctacttctcataaaggtctgtgctttggcagccatggatactctttccctttaactttgaggatcaggttttcttttggtggcagagggataggcaggtcaggtatgtgtgaatgaactgttcctaggagtgtagacctcagtatgccacagggtgactgtttgtgacacaatggcacccaaagggtccatgtattacatagcttatcagtatcagtcttttctgtcattattgaataggrttctttcctggttgagacacagaacaaatagtattagggtaagaattgtttccctgaacctatcataaaccacagcttatgctagaatagagatttaatctgaggcacaaagataggcccaggctgagacatatgacctagggcaactttaagtagcaccccaatcccatactctcgtccctaaatgccaatattgaaacttcaacttaggttgattaagtctatagaagaggcacagtaggactcagcaaatgcagctcaaaatacatgctaacctgcagccttccaaagtgtctacttgcctgccagaagcagagcctgttagcccaccaaaagcaaaggacaaaagctccccaggtgatagtggccatcacctagatcatcctcatcaaagggccagttgtcaggtggttgcttagcagagaagtggaatcaatcaccccctcccaaaattggttcagatgtcaagacggacaatgccacaaaagcaccaggaaggtgtgaaaatattcattacatcatgaggctttctggagagagcagggcaggcatccaagtcagtttgtttggcttgagtgaaggaaggagcaaaagcctttggttttttattgtgcttagggagtagtgttggggagagagttcccacatgtgtgccaatttttgcatkatttgaacttccctccttgtgccaagcgagggagcacactggctttcttaccagcctgcccagatgtgrggctgggggaaaagtgaaggagtgcagcctgaaaactgtcaatggtcaaatatcaaaactggaatcacatactttattacrccatttaaagtaatgccattgtagcatgctggtgcacacgtcttcatgggatccatgaagaaatgggcttcctggaaagctagaaatatgaagatagtgcttttgttcaagtacaattggtactgactactacctctacctgcacaagaacgaagaaagttcttgcctataaaactgctaataaatggatgtgcataaattattgtaatatattcttctggcatgattatgcaagctttgagtgtaaagggcagttgtattgaaaaaaaatgagctgtcyattaccttgcaaagacatgtcccaacctactaaacatgcctttcagggactctgagaactaagaaataccatggtatgctgtgatgtgctgtttctgcttctgttctgtgtggccacttcacttatgggacttaatctaatcctaaaatgtgggagtatgtggaaatgtttgttcttgtaactccatagttcattgaaattaagtgtaaagcatttctgaattagctaaatgttcttcagctaaatgtctagaaaataaatttaaaggccagtgtatctatcaaaaaaaggttttggaaactttcattagttaaatatgattatttggggcaaattgaacctcgaatttagtggtgtaatttcactaacttaagtatttaagccattaaaaaataatgaatgtatattagaaagtatggtagattagacactctgaatacacgtctttttttctcttttttttgagacagggtttcactctgtcacccgggctggagtacagtggcrtgatcttggtttactgcaacctctgcctctcaggctcaagcaatcctcccacctcagcctcctgagtacttgggactacaggcttgtaccaccacacccagcaaatttttgtattttttgtagagacatagtttttcctgttgcccaggctggtcttgaactcctggactcaagcaatctgccgcctcggcctcccaaagtgttgggatttcagccgtgaggcaccatgcccagcccccatcctcttaaacagatcttatttctagataaataattattgttagtgcatttctgggtcagctakaaataggagctatcaccaaacaggagaaaacttaagaaaaatgccaagctgaaatcagagaaagaagtacgtgttttccccaaattcagacattgaaatatagagacaaagccttggacccaccatacactgggggatatgaataaaaaactcctttgttagatctggatccttgaagtttaatcaagtggtttcttatttgtagcacagatccttcctaaaagaaagtttcataagcttaggctgtcaagatttccacaggttgataaaaggcaaatatgagctcatgatcagaaattagcaaacacttaaggaaatctcacataagagttagcaaaagaaacagatttgaatgccaaaatggtatcagatattaaaattatcacaatcagaacataaagcaaatttgtatgaaatgattaaacaaataaaggtgggttaaaacagagaaagcaataagttttttttaaaattattttattattattatactttaagttttagggtacatgtgcacaatgtgcaggtttgttacatatgtatacatgtgccatgttggtgtgctgcacccattaactcgtcatttagcattaggtatatctcctaatgctatccctccccactacccccaccccacaacagtccccagagtgtgatgttccccttcttgtgtccatgtgttctcactgttcaattcccacctatgagtgagaacatgcagtgtttttttttgtccttgtgatagtttgctgagaatgatggtttccagtttcatccatgtccctacaaaggacacgaactcttcattttttatggctgcatagtattctatggtgtatatgtgccacattttcttaatccagtctatcgttgttggacatttgggttggttccaagtctttgctattgcgaatagtgccacaataaacatacgtgtgcatgtgtctttatagcagcatgatttataatcctttgggtatatacccagtaatgggatggctgggtcaaatgatatttctagtcctttttaacaagtaaccagtttgaaaaatatccaagtaaaactttcagtataaaaatattattgtatatactttaaaacccacagttaaatagactatcattgaagagagaatattagtaaactagtaagttgctctaaagatattaatatatacagaatgcaacactgaaataaccagaaatggaaagtctaagaggttagatgatatagaggcttgaatgagaaagtttttcattcaacaaatcaaagttccaggaagagagaataggaaaaagataggagagccatacttgaacaggtggcagctgagaattcttcaaaatgatgaaaaccatgaaaatatatacgatacatatggcaaagcatgcagataaacttaaaagccccacctaaccaaaaatattaaaactgcagagcaccaaaaacaaagagaagattttatgagtagccagaagacaaaagttacctataaagaaatgacaattagaaggcacaaggcagatttcttggcatcaaaatggaagcagggaagcagtggaattatattttcagagtgctgagagaaaaataaatatcagcttggaattgtgttagaagtaaatctatctctcaagaaggagtgcaaaataagaaatattggtatggacaaaatggaaagaatttactaactgtatattcaactaaaagaacttctaaagcaggtacatgagaaaaggtataaattatcctggaagaaaagtgtgaaatgatttaaaggaatcatgagaaaaaaatggcaaacatataagtaaatctaaaccaacactttctttattaaaacataatttgtagattttcacaaaaggacagaaggaaatcactgtcaaatgtaacatctaagtcaggaggaagtgatcagagtttaaatgttcaggcaaaggatttaagatattaatataagattttttagatcagcaatttgtgatatattttcacgaatcaccgccaaaaaaaagagtgtttaaatcccaacctagtgaagcagagaaatatatatatataaacatatatatatatatatgtaatcaagaaaagagaaaaagaagcttagaagtggaacaaatacaaattccgaagtaatatgctagaaacatgtctaaagggatcaaccatcacaatcactaaatggactgaactcacaagtgaactaccgacattgtcctattagatgaaaaaataaataaacccaactatatatcctttaaaatatatgtatgaaaatataaggacacacatgtttgaagatataccaggcaatggcaaccaaaacaaaatgagaatatctatctatatatctgtctatctacctacctacctacctatccatctatccatttatctatcatctatctatctatctatctatctatctatctatctatctatctatcatctctatctgtatctctgtcgaatagaatatatctctcatatatagaattcaagacaaaaagtattactggggacgaagaggacctcatgtaatgatagacctttcgattcaccaaaaagattttttaaaatctaagtttgtatgtacctgttaaaatattatatttcatcatacctaagataccgacatttgtaagacgtgctgttattttatctaccactgtcaacagtaaaaaactcctgcaactaaactatgaaataatggtttcatattatgtcaattataagagatcttcattttgagatgttaaatatgaaaaaaactgtcttagaattaatgaagtatgatagcttcacaccacttaaagcaactatttatgtaagagaaaaatatataaaaatctacataacagtaaaagatttcaaaatatttctttcaattgtgatagctcaaacagaacaaaaaaagatataagagatgaataacaagctgattttaatggacatatgtagaactgtgcacagagaacacacattcttaagcatatatggaacattttttaatttgaccacatcttaagctataaaagcaaatgttaacaaatttcaaaaactaagtatcacatgttctctgactacaataaaattttaatttagaaatttatactaaaaagttaactagaaaaaccccatctgttggccaggtgtggtggtttacatgtgtaatcccagcactttgggaggctgagaagggtggattgctggaggaaaggagttcgagaccagcctgggcaacgtggtgaaaccccatctctaccaaaaatacaaaaattagccagtctcataacccagcctcaaaaaaaatttttttttgaaattgaaacacatggctcataaaaaataatggaaattaaaaatccctagagttgaacatttatgaaaatacygtatattgaaaaagtggcatgcattcatttataatgaaaatctgtcaaggaacaaggagttgaatggaactttttagctaaataaagagtatctacctaaaacaaacaaaacctatagcatactttgttcttaatggtaaaaagttagaagcatttcttgtaaagtcaaaagtatattcaaagaaaagtaaattttcccttccatccagactgtcctgcagagacaaaaacatattcatatatgtttggcagggagaaggacataaagagaaagattttgttttggtttggcttgttttaagatttttttaaatgtttgatatacggtgacagctttcccacaaaactgtactaattgaaacttctaccaacagagtgtgagagcattcatttcactacatgatcacaaacattacgtactaccattttaaaaaatagcaaaatgcctctttaaaaaatttatatgatgccttgtgggactcaacttgctcaatgagtttattgactatttttatttttatgttataaacagctcttcttatggagctgttaataatgtttgcttttatttgtaagaaatgtttactaaagtaggtaataatccttcagctgtcatagatgataaaaagcatactttttttaagtttgtaatttgggttttacttttttatggtgttttaccatggcagaggaaaactttttacatggttagacctaacaatattttcttgtattttttcttcctttgcttttattgtatatccctagagattggagagtctctaatcgtttgtggtgatcgttgtctaatagttacttttcttgtgttggagtatctggttaggattgcaaattcatttagtcctaatatttattaaacagtgcttcatttcctcactgatagaaaatatcaactttatcatagtatatattattttgtgatagaatcttgttcttttccttctattttgtaayactaatctttcagtttttttttttacaagttccatgttgtttaactattgcagcattatttctgagatcatgataattcttattactcaccctgattattcttttttcttttttgctcctttttattggatactgttttaaaaattacaaacattatccaccctcttctatttcaagatgacgtcaactattctttttaaatgtattaactaagaggaatgcagaatcattttctaaagttaaaaataaaaacttgtccaatctctgatatatttttttaatagtgtttgacccataaaattagggacatctgaagtaggattctaaagtaagaaatatacctgtttgtttggaaaggtagaaaggaaatagttacattctcacgtaaccaaagttttaaaaaattatctagtgtcatttatctgacattatttctctaaagtgcctcatcaactccagccagacaaatctcttcattattcctgcttcaggccatgcacatttcaaattctcaggctttgctgagaatgttctttgccagggatattttttctctttctttctgtttattaaaatttgtttctttaaggccaaactctagctccttcatcatgaagcttcttttagtatatgttccacagagtttaaacattttagaactttttctaattataaaagcaagaaaataaactcatagaacatttgrtaaaaaatagagacatattttctataatattaactccctattatgaattatatatatttccttgcagtatttcatatgaatacatagttgtaactctagtgaacttacaatttcatgttctatgttagcatggtttcatgcttttctctgttgctccattctattcattattaccattttttttttttttttttgagacggagtctcgctctgtcgcccaggctggagtgccgtggcgcgatctcggctcactgcaagctccacctcccgggttcatgccattctcctgcctcagcctccagagtagctgggactacaggcgcctgccaccacgcccggctaatttttttgtatttttagtagagacggggtttcaccgtgttaaccaggatagtctcaatctcctgaccttgtgatctgcccgcctcgacctcccaaagtgctgggattacaggcgtgagccaccgcgcccagccccattattaccattttaatgactatccaatggtccatagagtcaatacataattatttaaataatctttgctttactacctgtcccttatcataaaaagctctgcagagaaaatctttgttgtgtagctttcctttctttggggaattagttccttagaataaacatcaagaattggaatttaggggagagaagcgaaaagcattttcaggctcttgaaatgttttttcaggtggctttcattcaccagttttatgtatgagagttctagtactccagttgacttgattccctcagatataaatattttttcgttattatttaagaggaaaaaagcatgttaagcattttgccccaattctctgttattgtgtattagttagctctcatgtattaattttgtttccccaaagagactgtaaggtccttgcatgagactagagataatgacttatatttattctttataccccacaatatctccccaaaagtgtggcagacacagttgtcttcagtatttgcttcttaagtgattgaaaccttcacaaaattcctttttgttcctcaaactcaaggccaattatgatagaaaatttggcaagtagcatatttgtggagtctcagctccaaaaataaacccttacccaaacctcacttgtaggggttaaacttatgcttggaatcaagattaactgaaattttcaataaacatgtgtatattgagtttttcttgaatttcagactcattttatcctagttcttatccaattaattcacaaaacataagctatttaaccaccaccattttcagagwttgctcataggaagaccaaagaacatagccctagtcctctaaaactggtgtcctaggaygctagaaagtcccttgcctccacaggaaagcaaaaggcaactataattgaagtaccctattgccatgtgttttcagctacacttgttccccactttatcctagttctagaacggtgccagggatatgataaacagtcaataaatatttgttgagtggttgaatgaatctgtgtgcataggttgaatgaatcaatcactctgcaaatatgtattgagctctcgcaagatgcaaagcccagtgtactggttactagaaaaacagataaagttgatggatcttatacgtggcagtgggctggatttaatgaccttgaggtttcatccagtgcatttttctacaactcatgtgcatttcttttgaaacttacacgtcacatccacaagccgaataaaactcctcaagctgcatttctaggatgatcccccgccacctctccctgagggcctgaaaagttgtatgctgctgatttctggtgcrggcaactcctgggcagggacaaggatggctccagatggatggatgcctttgtggagggctcccttttatccttagttgtaagccgcctgagcagttatattataaatgggtaatttaccgcctcatccccaaggcctcttctgtgggctctttcatggacactgttaccaaaagttaccaatatgcctggtgcctttgatatttgtgggcactgcagaccagagaaaaagarttgctgccttgtacagctgcacactggctttcacatgtcctgcaaatgggtacctgccagccatcttccccagatgtcatactgaccattgatttttttttttttctgcttgctattgcagttattaactacagtgaggcctgggcacttagctctccactttaattattcatccttatgaagaaaaatttcccccgtgtgctttattgtcctccagccccgacctgagctcacgcagactcttccttcyttccctccccaaagtggcttgtgtgtcgaagggctttccactggggtgcttattccatttatgcctttagtatgcattttgtgttctgccaagggggtcaggagggcacatggagaagccagatggcttacctcttccctcaggaaacacgccgctatttagctgggcaccttcccaactcaaggcggggtgagattccactgttggagagagagttggttcaaatgccactgtccctgagatcacagctccaagttcctctaggctatgcacttttctacttctctgccacttgctggagttttctgccagaaacagccttttaggagatattagaaaggggggtgggaagggagggatgggaaaaagcaactcttgttatttatggtcctcgttcaggcacaagtttctgttattttaatccggctgaaataagaaaccataatccatggatgaaaagatggtggacaaactcagttaaatcttgagcaccctgaggatgtgtgtttttccctatttctggtttttgacgttccttccctgctgccatttcccaactttaacttttgaaaagccaagcagtttggctggccaggcccagggaacttatttgtatgcagcacaaatttcagaatctgttctcagcctgtgccgagtgaaaaatggcctgcattttcttgatagcccatgtggttgtaaagaataaatggctaatgaattacagatgaacattgacgcaaattaatcttcccgctgtccctgggttatatggcagccatttaaaagtttaatcaatacactaaagttgaaaacatgcaggcactgcagttgtttggatgtaataaacatcagagggaaccgggaggtttgcacccagtccatgtatcataatgacaggtatttatgtttaatggactaaatattttttattggaagggagcaaatgtcagcttaactttgtgagccccgcattcaactttcctttgaggttggtgaaagayggctgacgtgtcattggaaatgaaatgttaagggagaaaaaaagcacaacggagacaaagcgaggatgggagccgtttggagacgtggtgcagcgcttacattctgcagcaattcattaacgaaaacgtaaactctgatatttctaatgttgctgtaaaatggtttactaggaacaactttaatggttattagtgaaaacaagtacccagatctgccagatatccttttcagtgcaggcttttgtttgaaaactctttaccaggtcatatttgctggagatttataattagtctttttccttaatgtgagaagtggaggagaaacagcgtgatggctctcagctcttgtattccatagatctttccttttgaacggtgtccaatgacttcgaataaccatgtgttctcttttggaatacttatatcttaattacttttcaagtcaatattttgtacctctgccgtgagtctggaaggaccagggtagctaaaagagaaaggaaattgccagtggcagtgccatctcgctggacaaaaacaggctgagacacaggagagcaatggcttcacttgaacagaaaaatacagacttagttcagcttttcattttttttcctccacatataaaataaactaaatatgtcagtggagcatggggtcttagaaaataacacacactttataaaaataattagaaacgttttagacaaaggatatcgtgtttttaatgtcccttctgcaaccaattgtctcaggtcctcttcagtgtctgagggcacattcaatggcagggcttggaagaaaattattcagtagatagcaagatgaggctgaaggatgagaaaaagggacaggggttgtgatacttatccagtgttcagatcttgcaaaagatatgaattgcacctttttatgtgttaaataattttgttaaaatcacaagaatttgtgtttctaatgggcctaagtttcataggtaatcagtattatgtgatactaaattagtaaaccaaactgatgggttcattggtccttcatcatcccttaagcaaaatggggagaaactttctgttatgaaaaccgaagcatggctcactgttaaccatgatgacatctcacccactactgctcctgaagtcctaaactctatttttcttcctacctctttctaccctcttagaggattgagtcctttacctgtttgttcactttgtgtttccgccgtgtgaatataagctccacagtagggggtaggaggcaagaacctgattttcttctttgcttctagtgtcctggggcctggcctataataggttcttgtaaatggcaggtaagtgaatggcggactacatttcttatggtctttagtaatttataactccggctattttttttgttagtcagtatgatttctagtcactgtgttagttgttttacatataatacaatacttgatcttagttgttaactctagaagataagagttattatcttcattttatagaggcaaaaactgatgtcaagagaattgaagctaattatttgtggttactgttagtatgtagcaattccagaatttgaatcctgacctgtttgtctctgtatcagctatacagtactccccaaattcctgtcactcatcttgtccctggggattaaaatctcattaagtgaccacaacatttaattctagactataaccagccagctccccaactggctgataatgaacagaagtattagattcacaatttgcaacctaaacctggtgtcctgagtcctacctatagaaagcaatctttgactgtacaaaagtagacattggctatttgatgatgggtgatatgtcactcaaatatgtgtgttctgtggtctagggaaatacaaggaactctctcaaatcatgagaaaagtgttcagcaacagaaatctaacaaatagtgactgaaatgcataggcattaatttcttcactcagaagtgagaatggaggtaggcagcccaggacagtgatagtggctgaaagagcagatcagtaggcacccaggtcctttctgtctttctgtcctactaccttttcagcatgtgcattttagcctcatggtctcaaaatggttgctactgctcctggcatcatttcctcacccaaagcaagatgaagaaggatgtctttcccttatgaggcattcgcttttcatttgtggatagacagcttcctaaagatgtctgtctctttctcattacccagatcatgtcattgggaggctggaaagtcaaatgtttcagttttcatgctgttatagtagaggaaggcaggataaaagggagccaatgcatagtgtctcctatgtaagataaatcgcattttttgtatacctaataaagacttgaaactttgctagatgccatatgcacatcaacttatatcatgtttacaaccaccttgttacagaagagtatttattcccattacactaagaagaggtgatctcattgttcaattcccacctatgagtgagaatatgcggtgtttgaaggggaatatcacactctggggactgttgtggggtggggggaggggggagggatagattgggagatatacctaatgctagatgacgagttagtgggtgcagcgcaccagcatggcacatgtatacatatgtaacctgcacaatgtgcacgtgtaccctaaaacgtaaagtataataaaataaataaataaataaataaataaataaataaataaataaataaaaatgccctaaattatcaggtctgacaaaaaaaaaaaaaaaaaagaagaggtggagctgggatttagagctacatttgtctgtttctatcataggtcttctctctaatgccatgtttctttggccaccattttgatgtcatagtgaaggatgatttcatagtgaaggccattcccagttgttccagctcatggtgaatgtgctgtcttctgagggcacttaacagttgggtctgcctctttgataattaagtatgcactaccatgtgccagcttccatttttgtgtattctgtacagagtgtttaagaaggtgggtcagagactcactgtmtagatccagatcttggctctataagttactatcagtgtaatctcatgcaaattacataacctctctgcagattgaacttttggagaccagggacatgattttttttcccctcttgatatctcctaaaacactgacaagattctatttcacattagagccactgagtaaaaactcattctagaatcactttgaatctttgtttcattgatttaacatctttttgccttagcttctgaatcctaaaatggggacaagaatacatctacttcatagggttgttgtaatcgttgaatgagataatgtacctacttaaagtttttagaacagtgtgtgatgcatagaaaaagctcagtgttagctataattattataatcattcatggattgccagtattcaaactctaaaactccatgggatataatataatctgtaatgtatccaaaagcaatttttcttaggccatctcaggtacactattataaagaataaccatatccttctggtgaagccatattgagcatctcctgcaatccagggagtgtggtatatgttggagatacaaaaatgcataaaacacagtgagaaacatgtggtaatgaacaccatgagcaatattcactctcgataataaccaaatgcttaaaaagtaaagcaactcttggatataatatttccacttattaaactagcaaagatgtttaaataggcatgcctggtgctatggagtggattgggtgcatattaatatgtttttgaaaagcattttggccctgtgcattgaggctagatgcattcacttaggaatctattccaagacaagaatccaagatgcataaacacaggatctttatacactaaaatattcactatagtaatgtttgtaacatcaaaacacacaaaaagtcattatccaactagataagaaagctaaataaattatggcacattcacagaacacaatgttatatagtattcaagtgatggttacatcagatttaatacgataggcaaatatttaagtaataaaataaatgaagatggatatatatgaatgcatccatacaacatatggacagaaaaaaggccagaaggcaaaacatccaaatactaactgtggttagttctggacagtggaattatatatgatttttattttttaaatttacacttaatttttttacaatgaacatttaaatataataagaaaacaattaaaataactccccaaacaacaatatagtctttatgaaaatagtttcagagagaaggggagtgataataacaaaaagagtttatgtgagttagttaagaattgtattcagctacaactagccccaaataccagtagctttaagaaaatactgtcctataacatgaatttcagatgtaggcagtccatagctgttatgatatcactaggaacacaggcttctttgattttggttctatcttccaacagactggctcccatcctcaagtttgatttatggtcaccatattattgctgttgcactagctcttctttccaagttccaagtagcaggaaggaagaaaaggcaaggtgagcactgctatgctcaacagcataggggctctgtgtataagatgaaagaggaatatagatactgggtagccggccttactttcagattttaataataactctgccattcaacagcaggttgacgttaagaaaatctcgcatgtcaatgacaccaaggaggcctccagaaccttctgaatacagtgccgtatgcaaccactgtcatcacctgtgcttggtgatgaatctcatttgccattccaagcctctgttacctcctgtgcttttgtttcctcctctttaaaataggcatattgaaaattcactgccttttatgattgtggtgaggataatatgattttatagttgtgaaggtcttttggaaaggcttagtatgctatgcaaatgtaatttttacaagactcatggcagccaatgggaattaagggctcactaaatgctattaatagtcactgctgaactccttatgtgcagaatttcatttaatttggggaatgagacattatgagtgtccccattttacaggtacagatattgagagacaaagaaatttgcacccaagttatctgcctcttgattccatgacatttgttctcaatcttaagtgtgcttaagaatcatagtaagcctgttaaaaatgtagatgtctaggatcagaaattagattctgctgcaggtggcctgcaaactacaattaatggctcagttctacctactctaaactcttaattatccagcaatgtggcaaagaacatgttcctcagacagagctcttcgggctcctgaattctactctgacttttccttgatcttctctggtagggagactatagctcttttgggtagaaaatgcccttttggcaagaaaaacttgccagttatttgggaggctttgtcttcttacatggaaaaaggtcactaatttctgaagctacctcctgtacagtagtatgagaatcctcagaggtaagaagacttgggccaataggtttgactttgttggttggattttcattattttccaaagagaaagtctttgaggccaagcataagggctgatttgccaatgggacttagtttccagtaagatcaagagtgtctaccacacacctgacttttgaactttcctcttagcccactaatagcagaggtgcaatgaggagatcttcatttggcaatggataggctcccaaaacagaaagcatggacatgccatttaaaggtcccaggagattgatttccaactggaatgcaggaagagtctaagagtaactgaaatttggaaacactgctagttatttttaagactactctttcttgaaatggatcagaaccaatagaacaaaccacaggttgtgatagatttatgcactgaggaatataggaagagaaagtaaaaactatgggcaaggattttcataaactgcatcataaattgatttggtgggccccaaggagaacataaacactatgcccaaggactcagggatttgacttttgtttagatccattttataggcaatctgtaaaaggaaaaaagggcaaaaataatattagttatctcataaagttgtttaaaaatcaagtgatgagaataatctatttaaaatacttatcacagtgcctacacataggaagctcgataaagttagctatgatgatgactgtaatgacgaggaggagcaggaggaggaaagggagaaagagaacgagagaggcaagaaatctgctaaggttttgctccatgaaatgtctttcagttgaaaattctcattgaaacagagaagctttgtctttataactagaagatgcagtttgaaaattgtatcatggaatgaaacacaaaatgtttttcattccatgaaagaattccataaaagagctagaccgtactccacgtggtgttctgcacatagaaggtgatcaaataaataactgattctgtgaagggctaaaggagattttcagaatgtgccatgcttctggggacaattggctttctgctrtggtctcaatgctgatgtagaagataattctatgaaaagatcctcagaactgagaacttctgttttttccatgttaatgtttagatagccagaggacttatcattctaggtttgggggcagatattttgctatgcctttcctgttactgttagaaagaaaatccccacccctaccccgccactgtcacagtaataaagcactgctcaatgtgtctttagcacttcctgtccttgggaatctgcctactgcttctctaatatgggagagaccagcccctgtgctgaagcagtcagggactgtaattaccttaatacccagtaatggatcgttaggatcatgccacacagtccctayggtacaagagactcggaaattcaagatgggaagatgagaatatgtgaattgaatgacatgggtgagagtaaatttcccatcttttttctagtggaggaaatgcattaagtcttttgatactaaatatgatgttagctatagtttttgtttgtagataacttttatcagtttgaggagcttccccttttttcctgtgttgctgagagttttatcgtaaatttatgagtgctgaattttgtcatttttttctgcatcaattgaaatgattttatttttttaaattggttgatataaatatatcagttatatttatttttgaatattgaaccaaccttgcatctctaggataaagtgtacttggtcatgatgtattctactttttatatattgctgaatcttatttgctatgtgtattatggatttttgcatgcacattcatgaggaatattgtccagtacttttccttccttttcttgtaatgtatttgcctgtttttggtatcagtgtaatgctggtttcatggcaagtattcctaccccttcaattttctggaaaagtgtgtgtagaattgctatcattctttattaagtcattggttaaatttgtcattaaaaccatttgggcctggagttatcttcatgggccaatagtgaactctgcattcaatttctttaatagacatacaggccttcaggttattcacttcttctttagtcctaagctctttttttgaaaagatacattacacctccttcaaacctctactttaagttctggggtacatgtgcagaacatggaggtttgttacataggtatacgcgtgccatggtgttttgctgcacccatcaacccgtcacctacattaggtatttctcctaatgctatccctcccctactcccataccccccgacaggccctggtgtgtgatgttcccctccctgtgtccatgtgttctcattattcaacttccacttatgagtgagaacatgcacaaacctctacttttaatcattgtggccatcacataaccaaagtgttaattcacggcttgactatgaattcttctcataaccttctgggccttctgtttggtaaacagagaaagttagttcctttatacatttatttattcattcattcagcaaagattggaaccatattttgaattgtaggacatgcaatacaggttgtggtttcaaagatgagtcagacagtatccttgggttcaagtaaatttcttttaagagggagtaatagcaatcaaatgcttgactgtgctgcagtgggatatgtgtagtggttgtgtgatgggtagygcacagaaagagaaaacaaggaaccattaattctgccaaggggaaatcagagaagtcttctaagaagaaatggcattttatttgggccttgaatgataaggagagttttatttggcaaagaggagtcttgtcatgtgaatcatcatgggaggtttggaggaacaagccatttcagcttttcctagggttagaacctttactttaggaatgcattgttttcttcttttgattgggaaaaccaaaatctgaatggtaaatttaaaagttacattgctttagttatcacagttcttctaattgtgtgtttctcagatgaatatgacatgcctcttacgatcttgctacagagtggattttatgttaaattatggcttcctggtgattctcagagttttatatcccatttttatttaaattattttcatagttgtaataacaaataaatttcttattcaaagaagatgcagcctttgaaatggatcttaatttgaatgttgacattccagtaacaaaacaaaaataaccacttgtagatggagagcgagagcgagagtgagagagagcgagagagagaatgaatcacaaacacctgtaaagtgtaactattagtttcaaataggatattattgaatctgtcctaaaaccagttgattgtgattattctaaattttaccttgagtatattgaccatgacaggccaacttcagttcctatatccggattcaactggattcattgcactttgattctaccatgaaaaacaatgcctttgtgtaaagtcatgagcacttctttcccttcttggttaactgtgtttagatctttatcatataagacctgactttatgttcattgttgaaattgttgctggtttcttttgctcttacacacccatgctggcctccaagaacaacttgctgtcattcaggagcttgcaaactcattgctttaattaattaacggaggctctttggaagttagggtcatttgtttttaattttcagttaaaggcacctatggatttctattttaagaatagacactgtctactttacttgcttattatactttgatactaaaatacagctataatggttctgcagcattgccagttatttaagtattcctgagtatttaggtaaaggctggatggcttggaactactctaacatggcaaaatatgtcatcaatgttttgctccaagagtatcctgtaatgtatatgctcaacttgagaaacaaaatatattataattttaggtttcaaagcataaatccttaacatatttactggttactacatgctgggcacagtgccaggctcttaagtgactgcagtagactgtagacagatcagacttcttgttctcatgaagcttggaatctagtgggatgctcattcattgacctatgaatacgtactgtgttatgtgccagacactgtgatagatcctgtgctttgccccacaggtcaaggcactaatatagtattatgtttggtacatagttggcccataactcacagtaaaattaacctttccattctctttaacatattacattattacatattaaggaagaatgtgaaaaaatgtaatcataatatcagagattgctttttgctcacaaaaatccacattttctcctgcttttggggtaccaagctagacttcatttcattctcctttgcagttaggagaggtcacatgagtgtgtcacactcgtgaaagatatggccacatgtgtgtattttagccaatgaaatgttcgtggaagggatgcgtggcagttcatgaccaaggcttttgagaaatggctgtgcctcttccacattctttccctttccactggcctgatgcaaatgagaggactcaataggagaaggcagagccacaaaaattacacctggaggaaattgcctgtattggccttttgagtaagaaagatgtaaacttctattgtgttgggccactgaaattttgggacttatttgttacagcagcttgtataatccttgttaatgcagtaacaggatagttataagatggctcattataaaaattatgacagattatcaaggcatattccaaaaaatattatcatttggcaatgataatacatgtcattcagaagctgaagtttctcattgtcaccttgcgggggtatattgacaaagattattattgccattcaaaatatgaacactggatctcacataagtcatgtgacctgccaaaatttgcaaacctgaactacagaggagctagtaccagcatctaggtattctgtttcttagttctatccacccaccccattatactacctccatgatatttatgtctaaaattattatagttgtttgtttctaaattttgtctgcttgctttccttgcctgtcttccaccagcagattatagtgtctgtgacctaagactttgctatgtgccaggcaatagccttgcatatcctcacacagggatacactgccgtatccctagctaccaggatattgcccagcacatcgtagactctcagtaaatagttgtgtcatgtaagaaagcatgagtccatgaccagaaaataacttttcaagtcaggcattttgtaatgcaaattaaacatgggtcttatgcatttttgtgaaagaaggagggaaggaaggaataaaagaaggatgcattatatatgtggaatatatgctcttgagggggttggaagaagaggaaggcagaggatgaaggcattgaggtggggagggacaaataatttcccattcttaactaattttttaaacaactgattgctgtttgcagaagatgcgttggcctaaaatgatcataatcttttgttagcttataatgcttaaataggtcacttaaataggactcttctaatagaagagaagcccattatacagattaataaaaattgatagagacttgaaaactgctcatggggtcagttatctccaattaaaagttcatatgccaagaaaaacaagcctcttcctcctaaattattactgtgaaaattttcaagcctacagaaaagttggaaaaatagtacattaaacatacatatattctctacctcagttcactgttaatattgggccatatttgccatttccctatatctctgagtctgcctgtgtattatatataccattttattttattctattttattttatctttcagatgaagtttcattcttgtcgcccaggctggagtgcagtggtgcgttctcggctcactgcaacctccgcctccccggctcaagcgattctcctgtctcagcctcccaagtagctggaaatacaggcatgtgccaccatgcccagctaattttgtatttttagtaaagatggagtttcttcatgttggccaggttggtctcaaattcctgacctcaggtgatccacctgccttggcctcccaaagtgctcggattacaggcatgagtcactgcacctggcatatagataccattttaaatgagacatttaaataaattacagacaccatcacacttcatccctcaatacttcggcatgggtctcctatacrtaagggcattttcctgtgaaacaataataccattatcatacctaagaaaattaatgttaaktcaccattgttacctaatatgtgcagtccatagtaacatttccccaattttcccaatggtgtctcttgtaactctttttgttttaatccagtatttaatcaaagtttatactttgcatttgatggttaaggcttttaagtcttttccaatctagggtgatggttctcaagggtgggccccagaccrgcagtgtcacatcactggggtctccgggggtcgatccagcaatctttgttgaaagaagctctccaggtgattctgatgaaactgaagagcgattgatctagagcatgttcccacctttcctacttttcatgacatttcatttttatcaaaagcccaggtcaatttcattttagaatgtcccacattctgaatttttctgaacattccctcatggtttgattcaagtttaacattttggcaagcataggtgatattggcatatttactgcatcatgttatgaggcacgtgttatttaatgatcccttttccccttcttagtgatgctaagattgatcatttggctaacgtggttaccgccagatggatcccctctaaaggctatgttcccctttataattaataagtgacctaaagactgtgtgaatattttcttccccaataaactttcacccaatagttgtaacagccattgataatacttgcctgaattactatgttggtgcatggtaatttttctaattttgtcactccttctatattaattagctgtcattctttaaataagagctttctttcttcccttgcatctatttgtatttatatttgcttaaatattatgatggactcatacttattaaaaaatcaaatgtatcaaataattactatcatcattatttccgatattcaaatagtgccaaatttgttcacgagagagcttcttcaaacttctttctgtgctctttccctgctttctggcacaacaaaatgttctaggcttactgtgtacattccctgccccacaacatgaatcagccatttcttccagtagcccttgttattttggaaaccagtatgtggatgctagatgccctacacacgtgcatgacttgagcacatgtgtgcacacacacagtcatatgtgtatattttaatcataatttcttacagatccctccaattcaaatttgcagagctattgtcaccttcttcttatgcttatcctttctctctgtaggtcagaagtctgaccttggtcttcattgagctaaaattcaggtgccaatggggttgtacttctttctggaggcccaaaggaaaattttgttttcttgccttttccagcttctaaaggccatacatattccttgctcctggccccttcctccattttcagagccagtgacactgcaccgctctgacggcttttccatcgtcacatctgcctctctgatgacagtcttaaaagcttcttttttttaaaggagtgatgtgattagattgagcccacccagatagtccaggataatacccccatctgcaaagcctctcttgccatgtcacataacgtattcacaggttccagggattcaagtgtggacatcttgagttattctgcctacctacctcatcttccctcattcttagttttatttctcttctctctgaaaatcctgacttttaacaacctcagtatatttacacattttctctgttctacaatatacacaaaataatttgagaaggataatagcaataacaccaacaacaataagcctactaagttaaagctcaagatttctttgtagttttctgttacttagaatatattcaggcatgtagttgaagtactgtgttccaaaattactttaattaatttctttgtatagttgtactatagatttaatatacaattaggttcatttttttctgtttgtattcagacttagggttcacattttccatcctttccaatttattttatattttgagtgtgtaaactatatgatgataaagagacatattcagagaagtccctgtcccatccatatcccctttaccctatttctacccaccagctacacattgtcattcttagtctctggtttatccttcccacattctttttggaaagcatagatggacatgtgtatatgggtttttttttaaccttgtttttacttctttcttaccaaaaagtagctgagtttattgattttatttttgcttgttgcatttttacttaacaggatatcttgcatatatatgtatatatatatgtatatacatatttatatmgttatatatgtrtatatatatgtatatacatatttatatacagttatatatatgtatatatatatacacacacacacacacacatatacagtatatcctgggaatcactctatattaggtagtcatggaaaycttgaaaggagtaattattaaattcttaaatacgtcttctggattgtttaacttgttacaactctgtataatatttgtgacttaacacaactataaaaaggcaggcattgaaagaaaatgtcttgtatgccttctgcccacctcttccctccctgaggcagagctaatttttttcctgtgtttgcataacattttgtatattaaagtattatagcaacttttattatagttatttttatttgacaaaccatctccctttctggcctgctagttccacaaatgtacaaagaatttctctctttccttttcttttttctttctttttagaggtgggagtgagtagcaatgattatgcctggcatatggtgtttctccatttacttattttgcctgaaattccattagagatttagtcagttggtctatttttataatagcgtctattttaaaaaaggtataacatcctaatatgtattaacttatcagagactagccacttcttagaaaagctatgaaaggtcagatgagaaaaaaggacagtggtgtttggattctgtctctgatagaaaccccaaggaaggcaaggaagagtacaagggttgtagatactctaggaagaagagaggatgaatcaaggaaaggaaaagaggagacagaaagaraaggtctgtatcatgatgtccactatgtgaggtactcacagcacaggaaatctgcctagatgataataggagtgatgttcattaggaaagaaatagccccaaggagttttttctttacatgctaagaagctgaggcccagagagatggaacaggtttcccagggcaatagcactaggaactggarctgcaaacttttgagtccaccatatccaccctgagttgaggtgatctttcttatgatcctgagagggaacctttgaaatcaagcaggcacccctacttccccaggggtgggcagagggcctgagcaatccctccttttagagcactttgcagctgggccactcatctcaagattggaatgtgccatctccatctttcctgacctccttcagtcaagtcagctgtatttgtggaggtgcattgttcagtctcagagmattgtttaaatttaaaatcaatagagaaaagtgtgccagcgagaggcacagactgattaagtgctgtctatatgaagaggtttatcctctgccacatttctgttgaaagcctgwgaaacatgaataggatggagcaaagtgaaaacacattaaaaattatgtcagatncccaaatgcagtaaagcaactgcatctctgacaggtaatcaagaattgggtgactctgagttctgatttggcgtaatgatatcaacatgttcacacacacacacacacacacattccttgtatacacataacacacatacaagatacacacacgaagtagacacacaacatgtagtatgtgtattgtataacacaacttacataaagacacacagaagacacacacaacacacatacaaacacctacatgcccatattcaacacacatgcacgmaaaacatgcaacacacattagtgcctgcacacatgtgcacatgtgcacacattgagcaacacaataaagatgtaacttttccatctcccaattcattctacatttttattttgatgaaaagatagcagtagagggggaaatctcttcatcagaaaatacagtgaaaaaattcccaagacattgtcacgtattactggttatttttggtggtgaagagaattatttgaaaacaaagaagcctttcacaaagcctctaaaatacaaaagatttaataacatttacatctgtgtatcagccatgtctgtaatgcgagtcatgaataacacataaaccagagcacggaaagaacagaagtgctcacacatcatttaaaatccaacccaccccatcgtcggtggaatcaaatacacagcaggggcagttccagttgctacacacacaatagagtcattggaaatgaaaacatattaattatgttccttaaggttaggagagaaatagcaggattcactaaacctttctaacttctctgttgaaaatttgtaccaaagagtacatcctgggttgcctctttatttttcctaagaaactgcagaatgagcatgtgtatttgttttgttttactgtttattcgagtctgcacttggggctcagacttgcctcattgttgtactgaaaatggaagaaagttggcttgggaagatggatctttgttacgagtgaataacttgcagaaaaattacttgttttaaatgcttgacaatacctgcacaagtcccagtggtatatgtggaaattcttgctgctatgaaatgagtcatatagtatccagtcctagcacccatggagcaacatgtttgaccatgaaggaaatcattcyttagtctgatttggataactgtccgtggcccaaatttggaattgtatgttcctaggtccattcatttggctcctatgtatatccagggtatccagggatcttctaggctggtgagagatcatcaaactctgctaggaggcaacctctagtgccctaatagagaagggtgaagccgggaatgctggctcacgcctgtaatccaagcactttgggaggccgagttgggtgggttacttgaggtcaggaggtcgagtccagcctagccaacatgccaaaacctcatctctactaaaaataccaaaattagccaggcatgggggcacatgcctgtgatcccagctacttgggaggccaaggcaggagaatcacttgaacccaggaagtggaggctgcagtgagcccagatcgccccaccgctccagccagggcgacaggatgagattccatcttaaaaaagagaaggataagttcagggaaaattgaactgatgatttttgggtgagttcatatttattctttaagtcagtattgtgtttttgtttccaggggtaagaagatgttcacataatgctaatgttagattagcacattttgtttgcaggcttttgttttggcatttatttctccttcttcctctgctcactatttccccttctactgctaggcttccttctgatggtgtcagaacacggcatgccagtccagagtagtttaaaacgagctctgtaaatgtcatggaacccctgcctctgcctcccctatgtgtctcatttcagtgtaaaatttcaagcrcttccctgtccttacgccgcaaaaggttaatagtcatcttttttttatgtacygtaaatgctcaattcctaaggatagtgtttcagggcaagttgagtgtaattgctaaataatatagtaattctctttttaaatgagtcatacttgcgttgttccagatgctcctgcatgcatgtgtgtgcatgtatacatgcatgcatgtaggtgtgtgcacgtgtgtgtgtgtgtgtgtgtgtgtaggcaggcatgagtgaggcctccccttgggggaagtcacagccatctcataggagtttgcacattttcacatttgggttttaaatgttgtgccacatcctgggcttttaggtgctgcggattatgtataatagatgacctgcatttacagagatgtgtgctatacagatgtaaatgttattatagcttttatattttatgttcttgttgaaagatcattttgtctttgaataatatggccgctcaattttttttggaggggagggggttatctttaaaagagaatatgaaatggatattgcacatcatatatttcttaaaagtaatttggaattttagggtctgggattggggctgactgatacactgccgtgatgagatataacccctggaaaataacagcacccgcacatgcctgcatctgtctaacctcataattcactttcacattggattatggatgtctgcgttcagtgagtctatcttccctttaggtattatttcagccctttgagataataaggaaagtttaattgcgttgttaattgattttttgcacaacattattaccttgattgattgcagagttgatgaaaatgttagacacaggcagcgtggagtatcagccaggcaaggagtgggagccttgtggagaatagataaccttgatgttaagagctatatccttcagatatgtcttcccttgacatattgatggcccctgaaaagggaaaagctgattgtatgcagaatgcaatcattaaacccacttcagctcactgttgattaatttgttttttcctgaaggatctagttatagggaaggcctcacttgtaccaaccacagccattttccaggttccagactgtgcttaaccctctaggtgaagggaagtgaggaggctggcttgcctgagacgggaagattatcttagggtgcgcagggtgtgtgcttaaggctcacaaggtgtctccatgctcgggaacactctatgtccttcaccatagtgctgattttccttaaattattgattctttaaaatgccaatagcaaggaacccttcactgagacctggtgtaggatgaaactgtcacttggagattctcaggaaggtgttcaccagtccagtggtgtcgggagagacatggcactcaggagcttttattatacattaggtaaaaccctgcatgagattgcccccatgattggagaatttagttgttattggggtgtgcctgtgtgtgtgtgtgtgtgtgtgtgkgtgtgtgtgtgtgtgtagagagtgatgataagaagggatttctgcagacagtttcttatrttgtcaattactcctctccctggccttatatgacactttcttagaaaagtttattgaaagccatcatcattttttctgagtccagggccatcttcatggtagcaaaaatcaggttgattgatcagttggtttactgattgattaataggacttctgtcctgtttccctcccctcaactcacaccacttcattcgcaactgcccaaccctgcacagagactcagtgggctgaatttatgggcaaagaagttgcccctctggaagaatgcaagctcttatacatgcagtactcctagagagcctcatcttctagggagaacggattgctacttctgccaccccctcgccagcttccatgcttattactcatggaacattctggcttattttgccctcttctttcctttgtggctgtgcccaatgttcattcaaataaaatttcaattgtatagcattgctggaggcctaccaatagttacatcagcttcctggagtcctgagcccccsccaggagaggtcatgtgggcttctccctgcaccacagagcaccctgtagacggaattctctgtgtgatgctaagcacagtttctcctcaggctgccccaccgcctgcattatgagtctttcttctcctgaactcaccactggtgctcagggagtctaatatccatagagtcttggccctcaattaccgtaatggcttataatgagattttggccaagtagcaggtagcaggttattacttcctgctcagcgtgggcaatgtctacgctgttaatttgtgttgccgaatgtggcttagagctgggcatcaaactgtcggagccagatgtattctattaggtgcgaggctcacattggcccatgggcaattttttccccccaatatggaagcatgttaacttaccacagggtgaatcctgacaaattcaagccagccaaataaaaggggtaatatcccaagccatcaaagtagtacattctagggacagataacacctggtaccacccactgtcagcagtgtctgtctgactggggcattctattgataggcaaaaaacacacccatcttaatattgctggagaggctctggtgccttcattaagttttaatgagcctgaccctaatgaaagcccttataacatgctcttctactattttccttgtctttatcttgggtagaaaaaaatgtacagaggttcatataactcttataacctgctttctactattaattcttccttaacctacagtttcttgcattaacatatacatacacatatacatttacatatatacatgcacacacacacacacacacacacacacacacagctttttcccaaagcaggttagaggatgggaagttgaagatcaggaaattatgaacatattttaccatttggcactgggatgagctagtgtccaagaattatgctgtgctttctgcaacaacagactgggtcattttttgtaaagcawacttctttcggttagattatatatcatcagattccctttgttttcttttcagagaaagcaatttagggtgtgctggaattaggaaagattatggtgatatcagtacaggaagagtttgtttggattctaatgaagagcaggtggaggctggaccaatgggcccaagtaaggaaggccttttccccaatccttgcagggtttgaattatgacaaacccagttgttacagggtctgcttaattttatttgaaaggtttctttttttttgttttttattttgttttttttttttgtagcttgaagaattaggaaaacaagaaagcaaattgtctttattttcagtgactctcttgagaaatttcagcctgcagaaccagacagaactgtggatgttccctgcttttgatgtaagctctctaataggaacagatctgaagcccaaaagcaaatttctgcttgagagcaaagccaaaattcccattcagactctgcaggaggacccccactgctcagatttcttcatayaagattctgtcagttttggggaagtccaaagtctttctgtgaaatttttcctgcaagttattttttgattatactccataaatgatggttcagatctattctacatatccaaagaaactgttttcttcttttttcctgttaatgtaattgcacattactaaaatttgaatgtttatggtttttgttttagataaagagctggaacaaccttttattattattattattattattattattattattattgttattatttaggtatcattagctttcagactgctattggggataaaataaaacctccatttaccaaaactcaagacactagaaccctcagttaaccagatttttggatctctgattttagacagtcttgattttacaagagtaaaaagcaatgtcacgagttttactttttaaaaagaaataagggcccctctgtaggttgtcctaaaacagtgtttcttaaagttggtccctcagcatcggcatcacctgggaacttgcaaaaatgcatactcttggccccaactcagatccatggaatcagaaactctggggaacggggcttggcaagctgtgttttaacaggccttctcagtgattctgatgcatgggcaagtcatagaaccactgtcccagggccaacccatacatttctacctataactgtccagggatgtataataaatgctggggttcagaataagtatgctgagatcttttcatctattccacaatttaaaaacaatgtactgcatacctactgtgcccttggctttatgatgcatgggcgaaagtctattgttttcgattttttggagctcatatgagcaggagatcctaagatcttgagaaatgttcaatctgcagtcttcccaccccagctaatctcctaactgtactatcctcactaaaggcactccagaaatactcagttgtggtcactatgattacctagtaagacagtgaaactgactttgcttttagtgtcttatgtgtgaaaattcaaaaaggtttctagctaaccatgagttaatgagataatttaattaacaaggacccaacattctccgagtggctagttagtcacatgactgttatattaggaaagctaagaagatgtgtgagggccattttatacttgcctcactgaccacttgagaggcctctcggctgaaatggagaataacacctggacccagctctggtttcccctgcctagaaggccagtaactccaatttgtgtttactccttccctgattgaatccactcatgtatttttatcctataaaattctaatttaaaatgccattccctagaatgttatacctttattgctgtttgtttgtttgtttgttttttaataatgatatgtttgaaatatctagaagcccacaaatacctctttctcctaaagggaggtgatcatctgttgttccaggtatgaaaatagttacttgacccatgtaccagagaccaatgatggggatcagatgaggatcaaacagcagctggaattattgtcatatttttatctgagtagcttctgcctctcttttttgatgacactgagaccaggtaccctgagagggaagacaatgctaggtagatttgtggggagggggagcattaaaagaggataactttgtgtgtattgatccatttttcatttttatttatttttacgttttttacttttttgactgtcaaatgatggcatatctttttgaactttcatggtaaaaatgatgttttccacctaagaaatgcaggaaatctttagtattttgaatgcttctttacatttgtggaggtgatatgcaaaaatccccaatctctgagcctggaagattaattagaacaattgatggtaaagaaattcagtccctgaaattgaggcaagaagaaccccaaaatggggggcaaggagtgtctgatagccccattcctgaaaaccttcagcacagattgaccaaacatgacatactgatcattaaggaacctataattggtgaccaaaagcacagtgtggctataatggctctccctgaatagttgccgccatttatttatttatttatttattttaagcaagcggctgctttcctaacttcatgctgccctctagtggtgatgctcccgacttcagctagaaggtggaaaggatgaatgtagagataatggcgggaatggaggaggtggtgacggggtggctttttcctttctttcttttttctctcctgtctgaaagatgtctgagtttctcactcaaacattgagaaagaaacgtgaggccagagcacttgaccactgtccgctttgactgacagcctggttgatgtgacatccatcacggacccgcactgaagggcacttcacaaatctgaagggattcgcatcccatctcggcatgcactttggaatccagcccatctcaaatccattaagccctacctagaatacagacataggagagaagggaaatacactcacaccaaactagtcttgcagttcaagtttctctctaagaaaaagcaagtaagaatgagcctgctaagtaagggtgtgggtgatctttgatgttctccggagacccctggttcctgtgaacaggactgaacaaataaataatgaatttgaaaagtaagcggaaaagcaaaatttatattcctgtcgccaaggcagtatcttataattcagggatatttctgggctagatagagttgtatgggtgcctggtccggttctgtcactttccaaaagccagttggaaccttatttttctccgctgtaaaatgaaagaatttacctaaaatgaggttctttaaattctttctcagcttgagaatcctccaatacagttaaagaaatacttacaaagaaaagtttaccattctgtattgaagcrtactaggcagtacagcaaatcacagagaatccttataggacagtataagcaattcattgtttaggaagtcaagaataaaaactgtttcaggcttcatctttggcttggaccaaaaaaaaaaaaaaaaatgtaacctgaggctaaaaaacaaaatttggactgctaagaagatttagcagtttatttgggggctggggaggagaggggttgttggagtaaggaaatatttaccatggagtttgacctctcatatttataatacatttctgtttgattgaaatacaatgtgtatagaggtaggagccaaaaaagggagctcccaataaagggggctagtgagcccaccctccaatctgagaatctttctgtcagttggtactcacttgttactacccccaatccaaaaaaataggaaattaaaaggcattgacatctaagcaaaagtacattgtctgtttcctttccaggattcacataatggaaatattccctgccagataatgtttaatctgttagcctaatatttctttcatgtggaaaggactgaatggcccactcagtctggatagagccacaacgcctgtaacctgagtgtggggtccaggacccaagatgggagagtagagaatgtcactaaggatctgctcaaagatgcagtaatttctcagacttggaccagcttttccattttccactgacagattatatgacagactatatgaggaacttgccctgcatttttttctcctctctttccttccccacctccccttcttcttctaagatgacaagcctcatttcagctgccctgggagcccagggtatgttttcttgaggctctggtttgtcacacgacaatgagcctgcccactctgtgastacctgtgtagcctccctggtctgggaggctagccccacagccttgcctgctgatcaccttcacgacaaattttgccagtatcccttccctgctgactgacttccttcccctgttttyccttccctacaaacaagtgggtgagacttgacaaggcccagcatttgtctgagcaggctgtataatctgtcctctcccagtggaaagctgcactggacgggtctgagcattggagtcaaatgccctcttgtcaaaaggataggttgcctggcatttttgctagctttctttccaggtatggtgcatcctaacccttgaattggtgctccacactctaatattttgtctggcatttggtagaagacagcatatcagaaccccacagtttagaccctatcatgcacttggtattcacctttgtccttcatactctttgtgctaagaaatgaataaaaactagtgtttactctactttatgataacaatgttggtagaaataatcaacctgggaaaaaaaggacagcaactaatcctgcacgtaatataatttatgatgaatgaaaaactgaccaaagatttatatcttgttgatatattgaaaaccacacaaatacatggggaggaattaaccttggtagaaataatgaaaacaaaataaaattgaaatgagctaaaactacacacaataaaatttgttgactaaagtttaagagcagactcaagtcttcttgtcgcaatttagatctgcaatattttactcaagaaaatgggactttgtaaaaataaatgactctaaaagagatttagaagatgtaatcagcacaatttaatatttggccagagctgattgaggaatttaaccttactgtaaaaattacgtgataaagaattgatcccattgaaaataaactcaataaaatagaaatgaaaatgttaaaaatagaaatggttttttgtatttaaaaattgattaaggaattaaattggctaaatggagtttgctgtgaataattaatgctttctcaaagacaaattaccagactagtttacatgtttgtatttataaacctgaagtcaaagcattcctggactcaaatttggagaattcaaatgtctaccaatgcaagacatcagggtcagtgtagcagggtaggaataccccttgtggtgttgtttttgtacagtgaaggtgaaacaggaagcatggtttgaagtggtcactgcggtatttagcaaggacagtgtgcagtatccccgcccccaaccccccacccccggcccccatggtgcaagagccctaacagaggttttgggggttatagcatgcactgttgcgatgcagtaccccattcccacccaatatgcagatgataaaccgagacacttgcctgaagtcctgctcagctaggttgggaaacaagtctcacactttttttttccttctccaccctcccctgggtaaggtgtagagcctttcttcatttcatctccaacctaaggcatctcagatgtgcggcagatgaagggaaaatatactgggtggagaagaaggtctttgtcctccttcctcaaaaactgcttccacacaatcccttcccctaagaccttttaaagtctctcttctttattctgtcttagtatttaagtagcttacactgaagtaggatgttgtgctaggagcctgtcatttctcaggctccactaaatcctgtgtgatagccacagcagagctgatagcacatcacatgggctgacctcagggtattgctccagctacttctcaagatcataaaacatgggtgtttattcctttccagttccccatgtattcacggcctgcacttaacaaagacngaggaatgtgctttctggggaatgtcccttcccactgtatgatgtttacagctctttaggccagatgataatgttcactgcacttctctcttttcaactagatgttgtgattgctttgtttttgtgggaggaaagtgtttggggtaaaaacaccaccacgatttaggaactgtggctgttgcctcctattactctttgttgttcaatggggcaaatatttaatccgtatatattttcagagtgtttcaaatgtctgaagtcataccagaggttaaaagatgagtgtccagcaattgacattccttactttgtggattctgtgtaaattttatgtacatgattattttaatggtattaatttatttaacaaatatttattgaacatctcatctgtaccaagtgcagatgctctccaacttacgaaggttcaacctataattgtttaaccttacaaagccktacacatttgatagaagatgtaaccccattgtaagttgaagggcttacaacttcagatagtttcaagtaatgatgcatttttgatttacaataatttcaacttacaataggtttattgggatgtagctccatggtaaacaagatgcttctgtatggttttaggtaccgggtgttagaaattggggaggagggagaatattataggggatgacacatttatggacatgtatagagtcccatggaaacattgttctagagccttctgcagtggaccaagacgctcctgatcaccttttcctctctgtcactgggcccatctacctcttcacaacattgttatcaccttttgcaggggtcaggaggtacctagttccttcgtttctcatacagatgagagaacaggagttctgtgggggaacccttcatcccctgcctccatcctaggggtaattataaactcctagtatcacaatgggatcaagatatgtttgtgatttcatagctacatttataaactcatatgaaatgcatttaaartaatgatccctaaagtgatgactaccaaaactaacaatagtgataattattctattttacaaatataaatgtgttggtccaacctgcactccaatgtcaaatgcatttttgtatttttatatgcagattgtttttcaccactaaaatattaatgacagaccacttgctttgatggctrggctttagttctgttgaatacggagttatgagacttgggcttatgccaaagccagtgggatacagcttagttagtggtcagcacttctagctgtatgaaatgcagattgcaggaaagttaatgaaaaccctttcctcaaggattttggggtcccccagaggcccccttctatccaggttatactgtggggttacaggctggatgggtttcaagggctgacttagtccaaatcaatttttttattgactgacctgttgaatttgtctcctgcatcaggcaatattggacctggtgttctcatcttcataaggaaaacattggaaaatgccaaatcacctatttcagagctaaaatgaacctctgagattatctggccccttgcccttgttttacaaatggggaaacctgcccagtgagagaaagggatgtgtacatggtcacatgactgttggggcagggctggatctaaatgcaggtcttcccccacttccccttactaaatagactattgaactgcagctggaagtgtgaggccatccaggaatcagggagtccaggatgctggatgaatggatgtgcaagaattcccttccctggactgggctctcagggcctcccccagcaaaatctctggtactgaccctgcagtcccagcctcacatccaagaaaggaggctgattcccacccacttaggcagccccaaggttataacttaacctgcataattaggatgtccattccagaggggaaaaacatggraaagataaagggcctctttaaaacagattcttcctgatacwtttttttcataattatagctttaacagcttatggtgatgggaaagctggctacttaagaaaaattaggagtctcatttggcaggagagaattccccaggggaygttgccctgtcatttttcagggtctttcgaaaagaaaccccacacagacagctgcacgtcagcctgacacagggcaagcctgctttacttactatggccaaagccagatcttttaattaaaaacactgcatatgccattaaatgtgttgttccccctccagtcccaagaagttgtagtttgargagatasaaacaaatgaatccgttgcagatgtgtagagaaaccattgcctactgagtcacaaaccagcgggttcccaaattccagcctcggagtgcctccccatcaaaatgttctttgcaagcaaactgttccctccgtaattttcacagttgatggcagttgccatggcgggagaagaagggctgtggggaggacgagggagagagaaacacaatgccacctcacttaatttacgagcagagcctcatattttacaaataaccttcatgataaataaaggcctgtggccacacatgggactgtgctgtttcgtgcatgtttgcttttcctggttaattttatttatttatttttgaacacaaaagtcacatattgggggtaatcacatcccaactctgagctctgggaggagactcacagaggcaattctcgcttaatttcagctgctggagatggtttgagtttgacaatttcagccgattcttagcattgctagccagagcacctttctccccgggcgagcaccagcagctggatctcattttcaactgccaggccgtccccacgccttcctggagcagcccacagactgagtgccgtcctttctgggagtttattcaaggtgacagctcctcacacaatggccttctgatcacctcaagtagccaagatatcagtggggtcgggcgtgctcctcctgcaaattccaaatttagattgactgaggttatccttaggccccttgaccccaccactccagcagaacagaactgccaggacctttgcagccacagtgagttttgtaatgatgtctggggagagatgttctgcaggggcaggcagagwcgamcccaagtgatggggagtgatgtcagctttcgttagagccgcaggcagcgttagaatatccttggcataatatggcgctggtatctctgtcagtatctctgttttctgtcaccgcacacaatcctgggcctgtctgcaaccctgatggtgtcttttcagatcaggctgttgccagcacagagactagctcggctcttcaccacacagcccctttgtttgaagtctgcccttttgtcgttaatgcacttgatgtctatttaaatctgacagtgaatgcagtatctgttttcctgtcaagagatcattgacaatattaatacctcatgtccttgcctcattttccaagtgctgacacctagccgcagtctcctgcattcatcaaacagccttctctcaccaggatgtctataaacattcttgcttccaggcccaaagaaacagggtaggccttaaaaaggacttttatcaatgccagccagaaagaaggctcgggaaygtggcacagaacacatcccagcccacgttccaggagcatccagcctgtttctagggcggcacttgccattcaagttgcatgtaagtgagatctggagtcgaagtttaccctggagaaagggaagaaaaaaaagcagttgaatccgtgaatgtactggagagtttactggagagagggcactcatggtgggtggtgtgtgtgtgtgtgtggtgtgtgtgtgtgtttgcctttcatccttttgcttaagagaaagattgtrttctttatgacatccgacagacctatctgttcctttttattaaaattcatgttatcctagtgccatagaaataaattagcatcctttggccccatgcttccacattcttcagggtttatttgaatcaattatgtttaaggaagccctctgtggatacctggcagaactgaggcactcccacccaggcctgtagtggatgctattcctggagcagagcctgatcagccaagcccacagaccagcaggatcctggcatgggtgacaatattagtacaatgctgatggctacataattcagcacgataaaggaaacagctcaatgccaacaactaaaagaataatttaggtcccaagaagggtctcagtgaggttccatccaagctcaaagtttccaggcaccagaccaatactgaaaaccagaaattggggattaggggccaaggagaaagcatgaccaaggaggaggaatgagccacagtaaacttactcatgggaacatggcaggaagtaaaactaatragagtgagcccaaggccagctttgaggccgtggaacaatgtcaccctctctccattgccaactctgatagactatttgaccccagcaatttctagctttgttccaagccrtccaaaccagggagcatctgctctgtccttaaaagtttctaaaagtcattttgatccttatgtaagaataaggtttgaagttttgtagtggagaaacatctcttttacagttgcaaaaatatttactacttagaacttctgatgtgaagaacctggttaatttcaagtgctaatttatcacaaattaaccaaaaaaaaaaaaaaaaaaatgggcttgttggtttcacactatcacactgatggaaaaaaaaatcatcatgtccctaggtagctattttcacaggcagatttgtggctattgaatgactgtcttatggacatttcctttctttgtttttttctagttgtgtacagttcagagactcaagtccgattagcgctaagacaactctgtccaactgaatttaaaataggtttttctaaaaatagaagaaaataaaaatgcaggtggcaaaaacaaaacagatttttccttgataatcctacagagctttcataataactatggaagtgatttcttatgggcatttagaataaataatgagttgattaaaaagttcaaccctattgtaggggcatttttcattgttaagtctcctacaatctccttgaatgagaggagagccttatacggagccacagagttacttaaagtaaaactgaaaatggaaatcaaatgcattctgaccagagaaagagagttcaggatkcctgtaagaagccatttaatgggaggctcttgttcctgtccatgtggtgtttttttttgtttttgtttttttgtttttttgagacggtgtctctyyctgtcgcccaggctggagtgcactggcgcgatctcggctcactgcaagctccacctcccgggttcacgccattctcctgcctcagcctcccgagtarytgggactacaggcacctgccaccacgcccagctaattttttwaatatttttagtagagacggagtttcatcatgttagacaagatggtctcgatctcctgaccttgtgatccacctgcctcggcctcccaaagtgctgggattacaggygtgagccaccacgcccgrccattcatatggtattttgtcaacaccacctctcttccttaatcatcccatatgtgctcaatgcctggtgcctgccagaatttggaatattctctctggaagtcaacaayattgcttcwtgataaagggtatcaaaatagtcacattctgggaagattgttctacatcttttacttgggctgggttcatctttaaactcttaattttccattctttgaaactctactaagggaaactggmgtgaggagaggctacattctggggagtaattggccaaattagaaaagtacctagcatgtggaagagaagtcatgcagaaagtgatattcctaggarcctatacttgtagtgacattttatttcaatgtcaactctgaggttgacagaatcttcttgtctgtgaggacaaaaagggagagttcttcccttctggagcttcatccactttctgctgcccattggatctatgattatcttgcatgtctgcttttcagcacctgtgtttccctgctatgctaagtgtgccacctgtaatgatgtgtgtctttttatttgcaggtgtcctggggaagtgtcgctacgtttactatgggaaaaactcagagggcaacaggtttatccgagatgaccagctctgaagccaacttctgtataccttcacccatttcatgaaaataaawtcaaaagggaaatcaaaaataaagaaaacgctaaagaaaaaacaatagcccacattgcctctctttgggaaaagctatgacttcagcttttggtaccttccgctgactttgccaggcctgtcaagatgatccttctgccttagactgagtggtcacatagagattgacatgattgcccttaagcaggtctcatccaccagggtgacagacagcggtggcaaagcaacagggctgacagcatgaacaccatgatagattgcctggtcctgccactgctcacaggggagcagaggtcacacctggggcctccctggacatgctcagtggctgyagtcaagtgagaaagactgtcctcagctcgcctattgaattgaaatccctctgataccatcgtgctgtgggcttatttttagtgaaatagtcacagtttaggggatggccattctccctcactccttttaaatcttaacgtcctgtattctgcatatacatagctcccgtctcttcccctccaccttcctttagcatcgattttatgacaggtggtgcatttcagtttgcagtttttcggagaacaaggtataacttcccagccaggtcatacatttatggctggcttcatgttgctacaatccctttattggcgtaaatagctttccctaaatccctgactacaaaagcgtggacttttatcttgtttcattcaactctaaatccacttcttgccctgaatatgatgcagtgtaaggcataaggcatctttctcagcatgagggtttggttgcaccagggactcttatttattaatttatttttaaccgtacacacttccagtgatgcctgtggccatacttgtgcgtggggctggcttgctcctttgggtgctatttaaagggagtgaggtgatgaaagatagagtgaagggtcaggaggttaaaaaacaaaattaagactgttgaaaacacccaccagaccaaagagtttttatagaaggcacaaaccttttggattttgcatctttgtcatgacctctcagaaatcaaatccacaggttgtgagacagtgctctgtcttcctgtatgcttggctgtgcactagcactaatgtcacaaggaacataagtgtgatcattgctagttgggtgactcaaagtttatctaacttgctggtgcaccagtcaaatcactctagaagatgttcaaaaggttgattgattgttcttgacacgatagtgtttatttttctgcttcttccatttagaccaagtgttcattgtcctcccagtattaggtcagtttgatgacagcaaaacctgaaagagaatccctccaagttatagatactgagggactaggagctgctattgtaaaactatggggactcagaatccctaagctgcccaaggagaacctactttctcagctctagcccgtttacatagcctctggcccactgagtcaacacaggccttgaatgacatgtawtgaggctggcaggagtccctgtttgagattacacaacctttgttaatcagttctttagacaagttaacattaaaatcctcaaaaccatgaaaaattggagaatgttgaatgtttgcatttatctctcaaatccattagtaactggatttgagtaccttttctctgtttgatctacaaaacagcactggaaaaatgctttaaattatctgcatttggtcccaccctgggtcattgtttagaagcatcaacacatgttttctccctggcataatatgggcagccagaattctgtgcaagggcagctagmcgagtcagatgtcatatccaatctagccacacatatatccttgtctttataaaaggctttaaccctgcctcaaacaataaaaaagcacttgtgaactgaccacagaatttttccatctttatttttcttacttgtttactttttttaatgtcagaaccatttgtatcatgcgcaggaatgtctccctcaatgtgagctttggaggcaaaacatatttttggagtgagttattgaccacattgtttccctctctttgggttgtttattttcttccagaatggtgtaataactttaattaagattagctttaattataaattacctaaaggccatcactaaggtatattcatcttattgatagaattatagtcagctttgtttctcttaagcagggatagtgataatgaagtgctgggttggttacagttccactgtgtgttaaccaaaatttgctgtgctagagctagactttggtctgaattggcagaggtagaacccatgttgcatgtttatcctaaatctgtaggaatttcccaaaccttgtttttcaaagttgagaagtagaaagtaataaattcaatcagggcccagacatgttttgtaccccctttaccctttggtctttcttccttttatcctattccactgagcttgttctttggggattgtggtgcctgacatcactgtctttcctcccctaggacactgacttgagtggagagacctcggcaattcaaggctgtcctgcagctctctgttgcctcagcaatgtcaggacgactgtctctttcctaagtaacataattttaaagaacaatttgttcctcagggaataatgtcttggattgtggggaatcctattaaaagtacaactattgcagtcatttgcttttacttttaccagcctcactcataaaccctccatctgtttgttgctttaaatagaagcacattataagagattatcacttgatcaggctgcatgtctgagtgttgtgtgttttcacatactcatgtatactaaggaataaaagaaagcaaaccacagattctggatgaaaggatttttcatttgtttgtgtgtgtgtgtgtgtgtgtgtgcatgtgtgtgtttccagcggagatgtatcttgtacattttcaagggaaaaatgtctttcttgctgttttcaagaaataacctggctgtctttcttcttttctttgttaacatgcagaccaaaaacaatccacaggacccttttcatcaaaacaataatggtgtttagtacttgctacttgcaagggcagcctaaatcaggtctgtgtggctgcaacacaggtaatgcccagcgtggacacaatagtacccattgagactcttccctgctgtccatcattgtagctgatccaatgtgacctttgaccacttgcttcttccggttctgtttccaggaagaaaccttcactgaagaagggcgctaccactactcgattctctctaagttgttcaaataccatgcaggaaactgactgttatgagtaagacctggaaaggaaaatgacaccagagaagcacaaagaatgttgattacctgtttatatgacaactggaccatcggcttgtggtacagtgttgtgtattacttcttctaatgcatcagcaacccctcaaatgacccaaagaacattgaaagccacaaccactgttcaaaatattgtcttcctacaagtttacctgaaatttcccagcattgggagttcccatcctttgggtaattataatgctaagtgttaatttgtcactttgtggttgggataggtcataaattgtgttatttgtgcatattatcatataagcacatgctaattcttctagagtatcttggaatgtggcccagagaacaaccaacctgggacaagggaattttgctaagaaacagtaggggaaattctaagtatggaatgtgtatgggggagagttgctatagtaggaatgatataaatggcaataaatgggattatgccaagagacagaatgcagcagaattaaaatgtggcatcttcatggataggagtaagttgagaaggaaagggaaaagatagttttctgccagttaaaaggtttgctgatattcagcactacagtgatgtttagggatattttatcctcaaaattgagtcatctttcatgtaaatgagtgtccaccaatttaatgttttacaagattttctgcccaacacaatgaaacagtgtggaaaagatggttcatggagcactgtgggaacaaatgatcgtggtggctgcatatggacagagatgactgtggctggtacctaatattctacaaactcagcatcctaaggcaagtgcctcagctctggagtggctaaaaaatacaaggtaaacttatgatctgggcagtcatatgaaagagaaaatagttctgtggtcatgggaagtcttcgtatattcatcaagttcagaggtagatggacaccttgacaagataacataaaaaaaacaaaaatatttaaagaaaaagacgagtgcctgtatatggggcagaagatgctggcaataggatttaactgttattggcatgcaggcagcgaatgagaacttagctcataggaagtgtgaataacatcttagttcaagtggattacctggattaacatgcagaatattctagaaataatgtttatattttgtcacatcaattactttaagtcaacttttccttctttgtattggaatagttctctcaatgttataaataggaatgaattttaaaactctgggataatttcctttagacaggaactttccaatttaggtgtttgtgatgagagggaaaaagtcctgccagtgggcttaagcacaatatttaggctattctagttaccgagtatcaaagtaggtaagaactaatgtatattatttatttacaaaggctaaatttaataaatcatagtctaaatcataataattaagtgctactataaaagaaatttcccttgaagcgagatagaaataaaatttaacacccaggtagagtatggtgttttaatttttatgttattactatttaaagtaatcttttatgaaaaaatgtactctgacttccaccccacattcagtttttcaggctgtgcttatgatagaaacagcgtttgggggcaaaatataacttaattagaataataacaatgacagctacgaagtcttctaaaatttttaactaattacttgggttattagacaaagagagagagagagagagaatgtgtatgagagagtttaggatctgagtagagaattcctattactgacatacgttttctaagttttgcatggactccaaaataggtcagtaattatcccattaccatgttacatagaaaaatgcatctatttcatacctgattaattaatatctactttgtgtcctcctttcctatgaattgctgatctacattttatgacatcagtcataaagtgctcaggctgtggtgtgacagtgtcatgatgtttttgtttttacccttcttggccttttaaacacaggatcattgttcagagggtcacttagagcaattttgttttaattaagagagatctttgatgctcaaagaaaaacagattacatgagttatctccaaaagttactgtatgaaaccaggtttcatttatagactgtccatattcccctatatttttacattcatacacaatagccatatttccttatttacatagaaaggttgtcttccccaaaataactctgttttctacagggctatagcacaacattcatattctgtagccacattggctacattctcaaacacaataaatgtccaaatgcctccagttagaacacttacctcccctcctcttttaaaaaacttcatttggtgtgctcactcagmatgatccattttcagaggatcacaatagagtataaaaatattgggacttaatggtcaacacattccttgaaggtctagaataaatgatgataatgaaggttactatcaccagaaaagggtcatattttggtgtagatattttgttaagttaggtttaaccattgcttggaaaattacatttagctgaaaaaattaggatcgcaactctaatttattagataaatcttgcagatttatacttataaacatttgtgtatataatatagatatagggtattggtttatcaaatattaaaatggaatttacaattccattttggctagtttggcc

SEQ ID NO: 6823 - DNA, 90361 bp, Homo sapiens
agcagtattgtgtgtaggatttgagagcacaggcgctggggtagactgcctgggtttgtatcctgtttgtgctcttagtagccctagcacgaccttcagcaaattaatttttctaactcttagtttcttcctctgtgaaatgggactaataatgacaacctttgggttgttatggaaattaatggaggcaatacatgcaaagtgcttagcacagtcccagtacttagtagtgcttagtacctattagctgctattatttttcttgagagtgccatatacagtgcagcagtttgcttgtagattgtgtgacttgtcactctagtacagctttccatgtaggtaattgaggaattgaacagcagagttggaagggccctctgcaggtctggactgaccataataacaccagctaacacttagagtaccggctatgcgaggtactgtttcagtcacttttcacaaacaggcagaatatcccttatctgaaatccttggaaccagaagtgtttttggggtttggatttctctagattctggaatatttgcatatacataatgagatatcttggggataggacccaagtctagatgtgaaacgtattctcatttcatatacaccttatatacacatagcctgaagataattttgtttttcctttgaggaagcagaataaactgtatcctgcgcctgcrttttgactggcccatcacatgaggtcaggtgtggaattttctgctgtggtgtcatgttggtgctcaaaaagtttcagattttggagatttttggattagggatactcaacctgcattaaatcagtttatcctcaaacagctctaagagataagcacttctatcatcccattttactgataagtatgtggaagcacagagaggcagagtgacttacctaacagcacacagctcataaggggctgggctgggagttaactccaagcagtttggccccagctgtgctgcaatcattattgtttggctcagagagaagggccttcttctgaaggctactcacagcagatgagtaacctccaggctcttgagcccctggcttgccattctttctcccgaacctggcccagtgccatgctaggcggggggcatgtgttggaaacctggctgacacgtgtgagtccgggagcgattgggcaccttcggtcattctgctgtggttcgtcaggctgtggttcctcagtgtgagctggaggagggcggcaggatgtggcaggtgccctgaaagtgactgtcctcctggggcccaggcagcacttcctgctctgtcttcagggaccccagagctccagagagtagcagcttggtgtctccctctcctttccctggggattgaggtagggggtgctggcctccctgtgaccgtgagccgtcagctctctgcctttctgcctgggcccttctggaggacagggagaactctgtgtgctggttcaaggctggaacaagttccttcagccactgtgagcttcacgaagaggaagcgtgagtcaccagggcctttacaagctccaggtgaatggaaggggtgtgttgggggcgtgcttccatctctcttgggccccatggtctatgggagggggcctgggagggctggggcattccattattgttcgggtggtttttcctggaatttcttttgaagtggtcttcgtgacccagtggcactgagtcacggggtaaacagaattatcaggggctgggctcttggaaaggacacagacagtgcccgtgggccagtcccagagggtcaccaggctggcttcctcccagtggcttccttccacctctcccagggttttggctgcagcttccatgtgcatcccacctgtggactccagctctgggccagtgtgtagagcatgtgccctgggggcttgtgagaaatgcattctgaaaccccaccctcatctgctgaataagagtttacgttgcccaggtagttcctttgatagtaaagaattcttatatacgttggccaatgtcagtctaattggctaagtcctttttggaatgttcaatatcaatttcttggattaatagactctgatggtattggtacgttgaaagtttgtggttggtgtcattatctcgtgtgtgtgtgtgtgtgtgcggacaaaaaaaacactccaaggaggctgatcctacagtcccccttagccctgggcactctgcgaggtagagaatgtccctccacactgtttctccttccacagcagcccatcctaggtttcagggcaggttgggtggaggtgccttcaggagaacctggggaaattgtctcctcctggattgggccatggcagaagatgaggagcaccaaattaactccaaatttgatggcgaaaccccagagggagacgacgccgacacctgcccctccgccccatggaagcaaccggccttgaaaggacccccggggcctttgggggacagtggcttcttttgccttttcctgactgtcctgaccacacaggcctttaggacaacaataaccgcagagacaaagcatgaccgagacaatgtcgtctttgggccttttttcccccttaatgacgtccaaggctctgggaacattgtaaaaactgggtcctgtccaattttaaccactccccccaccagctcctaggagccctgccagctccctgggttgggggtgggagtgatgcccagagatgcacacaaagatgtcacgctgccctggttaggccccagaggccagtcaggactgcagggacagggaagaggaacagaacgtgtcgcttggcctgtggactcccccagccagggaggtaggtgggcggagagagggaagggcatctgccaagcttaattaacagtggaaacttgccacaggggaggagagagacgatttgaagaggaggggcagtttactggaagaaggggcactgctgatgccaagagtaagaaagaggggagcgttccagcagaggcatctggagcgcaggctgccagtgtcgtaagctgggatgggttgagcatagagatttctggaggtgagagtggggaaatttatttgtgcctgctttcctgagtagacgtcttccaaaaacaatccaccaacatgtcagtggctagccttccttgcccccataaagaaaaaatactatttaaaaaatggtagttgagtttagaaaataggcattgtgttgggttcttgttctttgaagatatcaatggattgcccgaattgcatttgactttatttcacagatattgaagcaacatgtaatgtgtatgatatagaaagagagatgggttaaaaaaacatgtgatgcaggccagacatggtggctcatgcctgtaatcctagcactttgggaggctgaggcctggtggatcccgaggtcaggagttcaagaccagcctggccaacatagcaaaaccctgtctctactaaaaatagaaaaaattaggcaggcatggtggtgggcacctgtaatcccagctactcaggaggctggggcaggagaatcgcttgaacccaggaggtggaggttgcagtgagccgagatcgcgccattgcactccagcccaggcgacagtgcaagactctgtctcaaaaaaaaaaaaaaaaaaaaaaaaaagtgtgatgcttattgtttttgttgagacaaaaatgcagagatattgaatgtacagcaaaactaatagtgtgggttggacttcagatatgggaggtggagcatgggttattcattattagcaggatcatagaattttaaggctgaactgggttttctggtttcatctcccttcagatgcacagacttccccatgacatccatgccactgagtgctgggcctccctcactgtctcaccccctcaccctcaggcttttcatacctggcagtgctgaccgtggccatccagacctgtttagagatgcagctttctccagcatccacccgctgctcctggtttggctgctggaggccatcaagaacaaatctaatcccttctgacagtcgtattgagagacaagacacctacccattccccagtcattctcttcagcccatgctcaacgccttcagattcttcagagtctctgaaaatgtgataatgaggctactggtcattgccggtcacgcctgtcctagtgcttgccattaccaaagttgctttttgcttgctttctcttttttctctcccccttcatctctttttctgatggacacgcctgctagctcgcctgcctgcagtctatctctctgccctcctgcatggtcctcacctccccagcaaagtctccctgctttcccctcaaggtctctcctgtcccccaggggcctcccacctacagtgcatctccctcccctgccccgctcccccatttacccccatttcttcatttctcctctttcccgtccaaagatgcgtgtagggtgtctagtcaagaattgcagtggaagagtgttttttgttttttttttctgagacaggatctcactttgttgcccaggctgaagtgcagtggcatgatcatggctcactgcagccttgacttccctgggcttaggtgatcctcccacctcagactcccaggtagctgggattacaggtgcgtgccaccacgcccagctaattttttgtattttttatagagatggagtttcactatgttgcccaggctggtctcaaactcctgagctgaagcaatctgcccacctcggcctcccaaagcactgggattataggtgtgagccaccgtgccctgctgggagctccttaaatgtggtcccccacatttcttgttgtggagcccaggatctcattagttcttggcagctttctgatgccagagccctaaggcttgttcaaagcccttattgcaaaaattccatctccagctcacccacttggcctggtacataccgctcttcattgtatagttcttttggctccaagaacaaaacactggattcgtccttgttttatctgacctgccatctctgtgtgttatgctttgtccactcccaatttagtctctgagtcagtttgccctcccttttaattttatgtcatccatagtcttgatgagcaaagtgtaccttctgtttccattaatcatggaaattgctgaaatgggatgggggatgggggatgggggatggggtagggaccttataagccatctggttgaactccttcattttgcagaccaggaaacagagttccagaaaacaaaagctacttgctcagcacgacccagctatgggcacctacgtagagctaggttcagaaactgggcttcccggtgctgggagggtaacatctggttttgaagatatttgaattcaaaccaaaccacagtggttgtgtgtccacaaccaggaattaacattaagtgtggacaaaaaaaagtgctaccctctggctttggtgatggtacaattgctcatcattttaggagtaacttttaataagggggcagatactaactaaattattaagaactgagcttgaatacagttagaacctaaagagcagaacagtcagagaaagaacagatagttcagttgttctttaatttctgctctgttaccctctgcatggaagccagaatcatattgctagagatgtggaggaaacccccacaccccatgtttacctggggcatgtcactcccttgctaagcctttccccagatgtcccaacaagaagccagctgactgactccaagttcccctctgcccgcctgcccagagcaggaggggccgataaagtgaggtgggaggcctggcagaaacrccgaagtccagatctgctgagcgcgcctcctctgcttggcctgtggatgtggatttctagtgcctggtgcatgtagctctcatggcctggcattgactgatgatcagctggcttggggtgaagacgagtgaccccttggggttagtaacatggtctcccctctttycccaggttctacctacagcgtcctgtccaccatgccctcagactcagaaagcagcagctccctcagcagtgtgggtgagtaccacygtctggggaggacaccgggtgggccaggggtctgggtgaaagccaaggcagctggggttcatgggagaggaagctggttctcccttgtcagattactcacaggatcatccttccgttgatttcatttacattttctcccrtcatcagaaacccagttctgatgttagaaggaggtggggaggtgagtgctgggaagcacatgttttgccattgtttactttgtcagggcacagggcttctaggggagcctgttgacccaccatccccaccccaaccccaaaggccttgtagtaactcagtgaccactgcccaggagactcaccccttttggagtttccttggggataggcattgccagtccatgctgaattgggtgtgtttctctgaatatgggtttcagaaagcccataaaatgaggccagcccttctctgaagtccagcaggaaggccgcagtggtttctcaggcttcccacacctctgtgacccattccctctgtttagcacctctagtggggtttctcatggcctgatctgaccatgatggatgcagacaccttcagtggtgagtcccggccatcttttgagcccgaaggactcacagaggtcatctactccaattattttcttttccctctgcagagagatggggaaattgacattctgggagggggagtcacatgcctgagattctagaactagtcaggacagctctttcatatgtcagctcacatcttgaacacctccagtgtgccagaggtgggcttgggccgtagtggcgaattaggcagatgtgggccccacactcctggatgttagggtcttttggtgggaaacagttaaataagtagctgcagtaagggaaggtagtgtgataagagggaagacagtgaccagccggcgagttccatcttagttttctagggctgctataacaaagtgccgcagaccaggtggcttacacagcagaaattgattgtctcacagttctggaggacagaagcccaagatcaaagtgtcagtgaggccacgcaggctgaaggcgctagggagagatctgtcccgggcctctctcctcgcttctggtggcttgctggtaatccttggtgctccttggtttgccgacatcacactgatctctgcctttgtgttcacatgatgttctccgtccatgtgtgtctgtctccaaatttccccttttaataaggacactggtcagattggcctaggagcctgccttacggcagcaagacctcatcttaaattgatcatctgtaaagactatttcaccatcagcaataactgctgtgggctgagcagtgtccctctcgggactccccttttagaatgcaaatgcgcctcggaaagataacgctttgacctttccaaataaggttcacattcacatttactggattgggactttagcatcttttggggggccacaactccacccataaaaacacagttcctcccataaccctcatccygtttagggctcagggcaggcccttctgggactgcaattcaaagctcccaacggtatcctattactttgttctgcctgcttttggtgcccggagacatatcaatggaatgatgggattgttggaatttggaatgtgggactcacccttcaggaagtgcatggagtggggcagtcaggatcagtagatggggaaggtgaggctttttaaggtggactgggtaagccctgagcatactcctctgacctgtctagtttttcacccttcaccaatatctgtctaacagatagcaatcagtaaactcattcccatcggcatttcaagggttaaatcgttacctttcctaggcacatgtgcattctaaaaggggattccagagaggggtatttgcctaacccatagcaattactgctgatggtggaattcccagcctgagtaggaagatatttcttgggcagctggaccccagcatattctggaagaagcgtcatggccgtgacccaccagttggttctgcactcacctgaagctgactcagtccttgcgatggagccgtcaacagtatctctgtgctcttcctgggcatcacaggcaggcagagtgcagtgctctgatgtgtttcttggagcaggatgggtctgtactgtctgtgtctggatatttaatgctgaaataactggttgcatcccttctgggcaaagcctcttgagttcacagggaaccgagttttgcttctcttgctcttctgcttgagattgccattgtcctttgggtgcaggcagcagggaacacccactcataccaccttaaccaatcaggaaatgtatgagctcccatatgaggctgtgctgaggtcagccrgtacatggggatgcagctctgccctcctctgtgtggtgtcttcacacagtctcatggcggggtgtctgtagcagcagctccagccatcacatccagacctgacagtgtccaggtctgcagtgtccagtatgggcgccactaaacacaggtggctacttaaatttaaatgaattaaaatgaaatttaaatttctagtttctcaggcaaatccaccacatttcaagtgctctgtagccatctgcggtgagtggcagaagaagaaggcggggttcttatgagcaaaggaacctgttccagagtccatcagtatggcctcctttcattgaccrcagttggctgcttgtttgtgccgaaaccagtggctcacaaagcctggtcgctggaccactggggcacttattagagatgcaggtttgagcctcctcccacccctgctgcatcagaaacgctgagggtttctacagcttaatagccctccagtttgagatgggctggcccaacctcatccctgagaagggaaccagaatgtctgtaccaggcttgtaccagtccctcggggtggagtgcctggtggggctggcyctggctgggagcactctagcacctgccagggagttcctgctggctcagccacacctgatgagaggcagaagtctttgcaagcacacaccgccctggcaggaggggccgctggtaaggtcacatggtgatcttaggaacctgagaaaaggcaagagcaagatccttataataaaaacatcacttccacttttccatttacatctccctaaatggaaacggctgggaaaacaatggcaggttgtattcagcatgagaagaaattggaggctgaagcctggggcgtgtagacagcgttctctcaggcggtctgtcgggtctcrgatctccagcctggccctactcacaactcgccacacctttgccaacagccttaaaggcagcaggtctttgtgccaaggcctcctcgggcagttttcatcagctaagcacacacagcttccccgaggccctcccccgcttcctgcrcctgttgttgtgacctgcccccgaccctacctggtggatctgcctggggactgcacactcgtttcaggcaatcartacttttttcctccccattcatcctgacctaatttctcagtagccttttatttctcatcttggaaaactggggaggttttaaggaggagaagagacattcttgggcagcacttataaagccagccttaaattccatgaagattgaaatagcagragatttcttattaaatggagaggtctccaggcttatcggcaggagaaattgctggagggcttctctcatatcccagggaagattccttgaaagtgcttcttctggttgacaggggaaggtggggtgagccatcagggaagtgggggctgccactgacgccctgtgacctctgatccttcattcctggcccagacttttgggtcaggggtaatcctttgcaaagccaatttatcagagatgggaatgcctcctccttgtggggcaggtgtttggtactcatagggatcacggtgaacacggccccaaatgttatcacactgccagggagacaggcactgtctggcacgactggctattctgttctgtgtagagcagaaagaaagaagtaactcaagggaagaagcagttagttctgatgaggggaatcacagaaagcttcctggaggaagtggcccttggactgggccttccaggaaaagtgctctggactagatgcagctgggaagtagttggccatggctgcttatggtggtttgggttctgaaaaccagaccctgagtcaagggttcgaaagcaagtctttgatctggctggagatctggggcctgggcttccagcattggaatctaacctcctttcactccaagctggggaaacgctgaactggagtcatgtactcattgactaagaggggtgtcccccttaggccttcattgtcaaggacatcagtgggggatttctttaaaggcagtggctgctggatagccagtaaaacaaaggagaaatatgcaaatgcaactttggtctggaacagaggttctcaaactctagcaggcatcggaatcacccggagggcttttaccacacggagtgctgcagggacttactcccagggtttctgattcagtgggtctgggtgggacctgaaattttgcctagcaggttctctagtgaagcttaggtgctttaagaagcactcgttcaccccaggcagggcctgggtctttcctggacggctctgggtgtcctgagttgtaggtgaggatgacgtggtgctctgatgactgtggctctgggtgtcctgagttgtaggtgaggatgacgtggtgctctgatgactgtgctctgccactgctttgcctctcccgggcagccagggcctggaggtggccaggaagtttacctggacatctctctggctcctggaagcacaggcatacagggcctggaagcaaaggtgagacctgcccagctgtaagaccaaggatgcgcctccagggtcagtgggagcatgacagtgagggagcccaggacaaagggcggtggctgagaaatccacccagctgccagtycatttgctgagcctcggtggtggtgaccatagcagccagggcaactgaaggagctgaggattcctgtgatggggacactcccttctgccctccttcttacacccaggtcagagggaggctggccgccccaaggtcctcatggctggagactgagatgggttgtgttgggacggctctgagccccttccttctgtcctgcttccttctctcctcttccagcttcctcgtaaggcagggctgtgtcttcctgttgcctcctttacaaaatgggggtgaaaagagcagcgcagggctggctgctctttgtctccatccagagcctgctcctgatctggtgtcttcctgttttgggccattttagtccaaaccaaatcccttacctctgaaatctgatcctgaacaccaaaaggaaaaggacaatctgcctccttctccagtggttgccagacttgggtaaggaaagcctgaggtcacgggagagttgacagctttgcatttgagtccagaagaacaactgcacaaggttagaactgcattggaagcttttgttggcagctactttggaggcttttgttgacaacccagctttatgttagtttctgttttgcctgtttttaaaaagtttactgtaaataaccacagtgacagcagaggaggttggtcctcatctctttacctgtcaacatcactcttaggatgatggcttcattcagggcatcacagtttggttttcttaaaaaaataggctaggtgtggttgctcaaacctataatcccagcactttgggaggccaaggcagaaggattgcttgagcccaggagtttgagactagcctgggcaacatagtggggccctgtcgctacaataaataaaaataataataattagccaggcatggtagcacacccctgtagtcccagctgcttgggaggctgaggtgggaggattgcttgagcccaggaggtggaggttgyagtgagccttgattgtgtcactgcactctagcctgggtgacagagcaagaccctgtctcaaaaaagaaatttttttttgttaaggttatgttcattgagatataatttacatacagtaaaatgtattttttgtaagtatacagttcaagttttgacaaatagtcatgcaaccattgctacttttaagatgcaaaacactgccctctgtatcttaaaaattccctctgcacttttgcaatctgccctttccccaccttcagtccttggcagccactcatctcttttctgtccctgtagtgttgcccttcccagaatgtcatatgaatggttgtgtagtatgtagcttttagagtcaggcttcttttgattaacgcagggcattccagcttcccccacaccctgtgtgygtccgcagttgtattagtcattcatcccttttcattgctgagtaatactccatcataaggacataacacagttgtttattcattccctagctgctctaaacagctgtgtgctggtttttgtttgaacataaattctcatttctcctgggtaaaatacctaagaatgggattgctgggtggtatggcaattgcatgtttagctttataagaaactgtcaaactgttttctgaagtggctgcatgactttgtattctcatcagcagtgtttgagaattccagttttgagaatccagctgtatccttgccagcatttggtggcattgctttttattttagccattctgatgggcatatggtggtaaaggaacttcatggttgtcttcaaatgcttgcaggtctattgcatacaagaaatccagttgttccctgtggcccttaggggttagatcaagggtcagtggagggaatgtccagggacagattaactcagtagagggcataattttagggagagagataagatgggctctgctgggaagtagtgagctcctttgctgtagaatttggtcttggtggccatttgagggatcctgacaaccatttggatggtaggactgcatcattttcagaatatctgtcaacctctagatgcaagtaaaaagacaaaaacttcagttgaatggggattgagaggattttctgcaacccttgctgttcttttggaacttctgggcgtagcacatcttgagattggtcatgaggtcccctgtggccctccttggccctccccatcccccaattacaaaaggccggaggcatcggctgcactttctgctgggtctgagagcctgatgtgtgatggatcttgggtctggttgaccttactttctgtatgtgtcctgtatgctcaagcctttgggccaagagaagtggaacgagaatccttccctattaggaggcattgttgtggagtggttgaggtgttggctttggcgtcagagctgagtgtgcatgggaatcccattttcctagccatgtagtctttctgacgtgtttctcaaggagcaatcctagcacaaccccagtagggagctgtggagattaatgagttgaaggtagagtgtctttagcacagaacccagtgcttgggcagtgcttggcacatgtcgttgctactttatctgtgtggccagccacgcccaggtcctcatggctgtagactgagacgtctggagacagagatggggtgtgttgggatggctctgagcccctccttctgtcctgccgcctcctctcctctctccagcttctttgaaagccagggctgcatctttatgttgcctcgtttatacaatggggatgaaaattcaaaatttcttgtctccccaaaggcaggttactgggcctggtggtgcttttctgttgtgaaactggacatttgatgtttctctgctatttcttgaacttgactatagcatagaatagccattctgaaagtgtggcctgatgtccctgaggtcctttcagagggctcgtgaggtgagactgttttcataatgatactaggatgtcactggtcttttctgcttccatcctcacatgggtgtagagtctagttttctaaagrttccatcctgggtgtgtgacattacagagatgagactccagctgtctctgtgaagctggatgttaaacagcctgtgtaacaaaatgcaaagcaatgatgctgttcctgcygcattgctttgttttgtaatggaaagggtggttaatgtctcataaaaaatcttatgtcaatatataatggagttttgattttttaaaaaataagtaaatatttaaaaattcttcttggttttaatttctaatcttgtaaattttattagacataacatctgtgaacaagagctctttggagtgccagataagtacagaggtcctaagatccaaaaatgtgcaagttttgaggttaataccttgggttctaggatcatttagaggtccatattccatattccatagctctgtgacctggacacactatttaaccttggtaagattgtgtttcctgatgtgcaaaatgaggataacagtgatatttaccttatgaggatcgaaatgggataatgtatgaaaagcatttcaaaaactgccaggcatggccgggtgcagtgcctcacgcctgtaatcccagcactttgggaggccaaggtgagtgggtggatcacctgaagtcaggagtttgagaccagcctggccaacatggtgaaactccatctctactaaatacaaaaaattagccgggcatggtggcgcatgcctgtaatcccagctacttggtaggcwgaggcaggagaatcgcttgaacccaggaggtggaggttgcggtgagccgagatcgcaccactgcactccagcctgggcaacaagagtgaaactctgtctcaaaaaaacaaaaccaamcaaaaaaacccaaaacctgccaggcttgcattgtgtgctactggtggttgttatttgggaggcaccgaggcatgagggtgaagtgcatgtgtttagaatccagactgcctgggcacttgagtcaattacctaaccttgctgggcctcagtttatcacctgtgaaatggggacgatgttatcagtacacacttgtgaggttgttgtgaaggtgaaatcaatgcctggaacataacctccccctgggcttggttagaggttgagtagcaggcacgttcaaaggaagctccacttgttggagagtcaggtaggttatggtcagtcagatgactcagcaccatcacccacctgacccacaaaactgctgggggcagcagtgaagctcagggtcttttggtggaaaggtgtgggaagacttcgaagctgcagaggagacccctttggggagaggaaatgctgacccstggcctcaccgccaaagaatattttgaccccaaaggtgcggcctggagcagagaaatcctggctgtcatgrtgctggtggcttttaaacacagtctgtgttgcttaatgacagggacacattctgagaaatgygttgtcatttggtaatttagttgttgtgtaaacatgagtgtgcttacacaaacttagatggtatctaccccatacctaggctacacgatatggcctgttgctcctgagctgcaaacctgtrcagcatggtactgtactggctacggtagccagttgtaacacaatggtaagtatttgtgtgtctatacatagaaaagaaaagctgcagcaacagtacagaataaaagataaaaaatggtccacctgtacagggcacttacatgaatggagcttgcaggacctgaagttactctgggtaagtcagtgagtgagtggagagagaatgtgagggcctaaaacatgactgtacaccgctgtaggctttgtaaacactgtacacttaggctatattcgacttacagaaaatatttttccttcttcaatagtaaactgttgcttactgtaacttttttactttataaactttatatttttttaactttttgactgttttgtaataacacttagcttaaaacacaaacacrttgggccgggtgtggtggctcacgcctgtaatccgaccactttgggaggccaaggcaggcagatcccttgagctcagaagtttgagaccagcctgggcaacatagcgawaccccgtctctaacaaaaaatacaaaaaaattagctgggtgtggtggcacatgcctgtagtcccagctacttaggaggcygaggtgagaggatcgcttgagcccaggaggcagaggttatagtgagctgagactgcgccactgtactccagcctgggtgacaacaagaccctgtctcaaaaaaacacacacacacaaaaagaatacacacaaacacattgtacagctgaatattttctttctttatatccttattctataggctttttctattttaaaaatgtttaatttttttgtactttttttgttaaaaactaagacacaaatatattcatatattagcctagggctacagagggtcaggatcaacaagacgtcattaggtgacaggaatttttcatctccatggtaatcttttaatttattttttttagagagaagttcttgctttgtcacccaggctggaatacagtggtgtgatctcggctcactgcagccttgacgtcctgggctcaggcgatcctcccacctcagcctcccaagtagctgtgactctaggcacgtgccaccacacccagctaattttttggtattttttgctagagayggggtttcgccatgttgcccaggctggtctcaaactcctgagctcaagggatccgtctgccttggcctcccagagtgcttggattacaggcatgagccaccactcttggctaatttttgtattttttgtagagatgtgatttaatctttttttttwaatacatatttcttttgtttctaactctattataatcttatgggaccacatcctacatgtggtccaccatcattgactgaaacgtygttatgtggcacatgactgtcgtgcatttcagggggtgctggagtcaagtggttggggttccacaacctgaaaagactgaaaagcacagcactgggagttgaggatcctcctcccactgtggtctggcttgtcatgcctggccctgagctccctatcctccctggcccttctggaaggccccaagccactgcttttgtcttgggttgggggactcttggtttgcatgaacatttgaccaacaaggatcagtgggacaggggtggtcaggacagcacagagaatcagaagacctatcatgtcctatgccctttgtgcgttgtgggtccagtgcggaacagacactgtgtcccctgacacgagtcagcctgccagatcccatccacaaattggatggttgctgtgagctcctctgaccccaacaagggtctctaagggttgattgagatatcaggtagacatattgacagggttcaatataaaagcaccatggattagtctcttctcctgggatgaggtgctttcttcctagagatggatttggatcttatcagaggtggtggtggcagcggtggctgttgcctgctaggagcataaggtgtggggctccctgtaggacactcagtcctagggtggttgatgagggctggtgagggttaagtagcctggaggcatcaggaccaacttgaattgcgtcacactgacctcagctgggagccagcagccctcctcttagcctgcacgcctgggctggttgggcaggtctttcaggcgggtggacggcttgcaaaaagggagccgtgcactgtccagccctggtcgaggagggcggggacacggcccttgggccccagctgccctggtccttagtagcgtcattggatttcaggtgtgcctttctcctcgagccatgccttccactctcctcagggcacaggttggtctgtcctgctccatgtgccaggcttagtggtgggtaacagctgatatttccaaaccaggggaggatgcaaggatcacggccaaaacagtcgcatcctggaggtgtgaaagccaggttggggagagagtgcgcgtcttcagggtccttgctggggtggttactgggggttgttgagtgcttggatgctggagccagatgccctgcactcactttcagttctacctgctaccgtctgtggctcagtgttctcatctgtgaaaggggaatgctaagaggacccacttgttgggtcacgaatagctaacacaagccaacagctcaggacagcaccgggcgcctcgtgaatgccagatgaacacaagttcactttattattccccttccacaggcactaccgggaaggcgccgtccccaccacccctcctcactgaccrgcaagtgaatgagaaggtggagaacctctccattcagctgcggctgatgacccgggagagaaacgagctccgcaagcgcctggcstttgctacgcatggcacggcctttgacaagaggtagtaattgcgccgtctcccctgcccaggccccatggttgggattactaccccgatgctggtgctgtcacccccaaacacccctggctcctgggggtccaggctgcgctgcctgagtgtcccctttyccycacctcatgtccagaaatgcttcccaggggcaggacccacaggcttcttgtggggcaggtccccatcccacatgtggcraggcccctgatagtggtgtgcttgtgtgcaaagtcagctcgtgtgtgtgtgtgtgtgtgtgtgtgkccctaccactgtctcctagacctgcctaagttgagtgaagctttatgtggttggtaaacatattaattgttccctgtcacacatgtgttttatttgttttttgagacggggtcttgctctgttgcctgggctagaatgcagtggcacaatcatggttcaatgcagttttgacctccccggctcaagtgaacctcccacctcagccttccaagtagctgggactataggtgtgtgccaccatgcccaactaattttttttttttaatttttttgtagcagcagggtctttcttttttgcccaggctggtcttgggcttctaggctccagtgatcctcctgccttggcctcccagagtgctggaattacaggcgtgagccacagtgtctggccccacatgatgtgttttaaacagagcacattgtacctggtgtctttgttgctttgaagaaaatgtttgctgcttttgttgtgatttagaggtagataccagggaagggtggcccatagggtggggcagagagagtctttatctacctgcatgatctaagaggactttctgggaaggaggagggccagagagtggtttatcctttarctcccatgctggtagaggtctggaggggaggggggcttggtgtaaacacttcagtttcacctctttccttcaggagtaagggtctatgcctctgcactttgtgcctctgggattatgccagagctgcagagcctgatccctgagcttgtattcatgaggatatgcccctcagtcagttggcccgaaggcaggatgagtgaagacgtggatgtgctagcacatgagagttggcacactatggcccaygggcccactgcctgttttataaatgaagttttattggaacacagccatgctcattggttacaaagtgtctatgactgctttcctgctacaaaggtggagtcgagtggttgcaacagaaactatgtagtgtgcaaagcctaaagtatttactgtgtggccttttgcaaaaaaagtttgctgacctctgctctagaaaaagggtcctcaaacttgagcatgcaccagaatcatccacagagcttgttaatgcacagatcattgcctctctttccctcccttcagaacacctgactcaggagggctggggctggggctaggcctgagaatgtctatttgtgacaagttcccaggtgatactgtgctgcaggtctgggaaccccactctgagatcactgctcatggccagtgttcttaaccttggttgcacattggaataccctggggagtttttaaaaaatcctcacgtttgggttttatcctcagatatgctaatgtaattgacctgggcattggtattttaatgtgtacccaagattgagagtcattgttctaaagagaggagaaatttcttttctttaatattttacttttatttatttatttatttatttagtaattatttttgagacaggatcctctctgttgcccaggctggagtgcagtggtgtgatctcggctcactgcatcctcgacctcctgggctcaagtgatcctcccacgttagcctcctgagtagctgggactacaggcacatgccaccacaccaggctaatttttgtatttttttttgtggaggcggggtttcaccatgttgctcaggctggtctcaaacccctggcttcaagtgatccaccwgcctcagcctcccaaagtgctgggattacaggcacgagctgtcacgccgagcctacagagaagagacatttcatcacaggtttctggtggactcagacctgttgtacagactcctggaagctcctgcagaacaagttggcaccttcttagctctccaggcccatgcagggagctcaggcaaccacggctccctccatcctagggattctgattctgtgggtctgagtgaggccaggatatctgagtttaacaaacacccaggtgtgtgtggtgcatagaagaccagtactggggaaccactgggctggcctaatccaggacctggytcctctatccgtgtgaatcctggggcctgtgttcatggggccattcgctctctgggccaggccctaccacaggctgaatcctgactatgagaggctgaagatccagtgcgtgcgagccatgtcggacctgcagagcctgcagaaccagcacaccaacgccttgaagaggtgtgaggaggtggccaaggagactgacttctaccagtgagtgaggcctgcttggccagggcctccaacacccacagacagctgcctttgcccttcttttctctggacttagtagccaggggttctggttctagtcctgtccctgtgcaagagcaagcagtctgcctacagcaggtggatttgtgcctttgggcctcagttttcctaagtgtaaaacaaggctattaatccttcacatcttattgccagcttcagagacctggcaggcatgaaagtgattcagaacatgcagcagggctcaggcaggcctctgggtctctgtccaggggccctactgcagcttcttcctgtagggtaggcccaaggggtgtttccctttggtctcccagcatccctctgagggtctttgcctgcccacctgctgatatctgtccaggccccagtatttggaggcactaggtctgtaccagaggggcctgtctcccttccctggagatacatgtgcccyttttggtgtcaggtttgtaagtggtgatytggatgtttctggaattgggctgttagcaggttttggcttgcctctgagtgctacagacctacctgccattggctcctgtccgctgtatctacrggaagtgttgggacctgaggctggtgatgccctggggtggggcggggtgtgaggggctggctggggctcactgagcatgtaccgggtgtttcagcacactccacagccggctcctgagtgaccagactcggctgaaggatgacgtggacatgctgaggcgggagaatgggcagctgctgcgggagcgaaacctgctgcagcagtcatgggaggacatgaagcggctccacgaggaggaccagaaggagatcggtgacctccgtgcccagcagcagcaggtaggcccagcccctggagactggccatttctcccaagtagtcctcattccttttaatggagaatagtattgagaagtaaatgctgggccgggcacgttggctcacatctgtgatcccagcgctttggaagaccaaggtgagagattgcttgagatgagcctgggcaacatggcaagatcccatctctacaaaaaaaaaaaaaaattagctggacatggtggcacacctgtagtcctagctactcaggaggttgaggcaggaggatcattggagcccaggaatctgaggttatagtgagctatgatcatgccactgcaccccagcttgggcgaaggagtgagacgctgtctctgataaaaaaaacacagccaaccaattgctggatgtgcttgtagcttgggttggcactgtttcccggccctcttagtggaaagaagtagggagtagctaagtgtacacatacacacaggcacatatacatacatacatacacatatgtatatctgtatttctatatcagacaggtagattgaaagccatgagttcgcattgacattttcaattctaatccaagaccacaggttcattttggtttccacctcttttatttttgtaacttcctttaaaaacatcagtgacaaggctgggtgcggtggctcacgcctgtaatcccagcactttgggaggccgaggcaggcagatcacgaggtcaggagatcgagaccatcctaacatggcgaaaccccatctctactaaaaatacaaaaaattagccgggcgtggtggtgggcacctgtagtcccagctacttgggaggctgaggcaggagaatggcgtgaacccggcaggcagagcatgcggtgagccaagattgcgccactgcactccagcctgggtgacagagcaagactctgcctcaaacaaacaaacaaacaaacagtgacaaatgtgattcctgttattttatttatttattttttttgagacagagttcgctctgtcgcgcaggctggagtgcagtagtgtgattttggctcactgcaacctctgcgtcctgggttcaagtgattctcctgcctcagcctccttagtagctgggactacaggcacatgccaccatacccggctgatttttgtatttttagtagagagagggtttcaccatgttgtccaggatggtctcgatctcctgacctcatgatccacccaccttggcctcccaaagtgctgggattacaggtgtgagycatcacacccagccaattcctgttattcttaatttgtttacttggtcaatcccccatgtgtagctgcctcccatgccctctgcagtcccccatccygttcccatctcctcctgaccctttgtgggctcttccaccccatgccttctctctgtcaggcctggtctcctcatgccatgccaggacccactcctctttccatgccagctgtgatatcccctctggggcgacctgccctagtgtaggtccttgtcttgctctgctttgcctaatggctttaaggtttaattgtttagataaaaggagtattccatattccaatgaaactgtattccattgaaaaacttgcttctgttgaaaaagttgctgtttattttcctttctccgatattgattgaggttttatgtggagtaaccagggcaggctcagcaagagaccctaagatggatatacttggagctattagaagtattttttrtgtgccctctgattaggggaattggtcgtgtgaggtcaggcccagtggctggggcaaaagttggtatttagcccataggtcttgactgagccttggtaatggaaagccggcagcaggaagactgtcccttctcgcacctgctgcatggcacagagaagctgtgacaacatgcttcccaccctttatagattcaggaggtgggggtggtgctcttggagcatttctctaaggatgaaatgagagagtagaaagtgccgtgctagctctggtcagtactgcccacaacccattccccctgcagggacccttccttgtgcatgtcagtggagcttcytggagcaaacagatttaaagactgtaggttttcagtttctaaagaggcaaaaatatttttaacctcaaaagaaatcctktggaggaatcttgcgtgtgaagcaggtaaggatggcggtgctgtgtcraaacaaagctcccaggaagctgcccgaggggatggccctctaagggtttgagccccttctctgccctggggtgcgtggtaacttcccccacctgagggcaggcggcctctcccggcctttacctacaccctgctgtgtgctttgttttcttgctgttttgcctgccggcagtttgttcttcttggtctacgcttggctcaggtaaccttttgccttggggtttagtttggattctatacttccttgagagaatcatcatttcagaggtgtatgtggctccacctcggtccaagggaagccccacagccttgctagaaagcrcgaggttggcacatctcagtgtaggagaattggtctgtatggctgtcatgaagacactgcgtagaaggcactggcgccgcgtgcccgtgtgtatgaggcgctcagtcagtgttgtggtcgttaatgatattattctaatcctgtcaagtctgggtttaaatctgcctcatccaggatgtgtagaaattgggacctgcataygttgtkggtgggaataaatgatacagccactgtgaaaggcagcctagtgattcctcaaaaaactaaacagagctaacaggtgacctcccagcgacactcctaggtgtccaggagaactgaaaatatacgyccacacagaaacttgaggtgtgaatattcatagcagcccaaaaccggtaacaacccaaaggtctactgaccgatgaatggataaataaaatgtgatctatccatacaatggaatattattcagcataacaaggaatgcagtactgatccatgctatagtgtggatgaacttcaaaaacatgacagccaatgaaagaaaccagcaaaaagaccacaaactatgattccaggtacatgaaatgtccacaacagggaaatctatgtagacacaaagcagatttgtggctgtcttgggcttggggtttgggaagtgactgctgatgggtattggtttctttttggggtgataaaaatgttctggaattagatagtggtagtggctgcacaactttgtggattcataaccttgtgaatatattaaacactgaattgcatactttgtgtggtatgtaaattataactcagagaggaaaaaaaaagactcagaatttcaccttgtcataaatagagaaatccagkctgggtacagtggctcacacctgtaatcccagcactttggaaggagcaggaggatcccttgattccaggagtccaagatcagcctgggcaacatagactatctctacaagaaattgtttaattgaaaatattatttttttagaaggagcactctgccctcaagaagcgtaaagtttccttgtctcccgttctctgactttcttgagcacctgctcagctttacagacattcagactgaggtctccctcccacccctgtccccctctccctttcctgtctgcctcacaggggagggtcttcttcccccaccttgcagcccattccctgctctccttttcctaccgttgtggtccttggcagcaggggcgggggtggggatgcatcctggtcattggggtcccccaggtcagttcagctggaccagtgcctctcagcaaacrccacctccagaccccaccaggagaagaggcctggctgccacagggagcagggctgggagcatctcagagctgctgggcgaccagccccgcgtcctggcatcctgggcccccttgccttcatcaggcgtggagtggatgcctggctgtgggatgctcaggtggcagtaggccagcagcagaggaagcggggataaggggatggccacaggcttgctccccgctgggcccaagggcaaaggtcaacctctctggacaagggcagttttgttgccgggttcctcccacgccttgtaaacttgaagaggcccttgcagggtaaatggtgctgtttgacttgagtgtttgcttgagggatttgtggggcttccyggccctctgcatgatttatctcagaggaaatgaggcagccctaggggagggggcgccatggttgagagcagcacacaggtgttttgtccatatgtgtgttttgctggggagggcctctgcctggcatccccatctctgggtttgggcagtccgagtgcaccttcttggattcttctaggctgtgtcaagaatgcccagaagaccctgacaaggcttggttggggaatctaagtagagggtgtttttgcatcttttttctttactaaaatagtgtgtattctttagttaaaatagaaaaaaaatcttcaaccaatgtgggcagccacccacctmctcagatccagcctagctttgtggaaatgaccatcctctgtgtaaaccattgggatggatgtgtatccttgtagattttttttttaatgtcacatttaatacccatatagtttwattttttattccctgaaacctgctttaaaaaaaaatcctacaatatatcatgggtttccttacattttctgtgaatttgcacatacaaaaaggtccttgcttgttttgttgtctgtcaggtgttaatcgaattctgtgtggagcgtcttggtggtcaacatcttcccatgttacaaaccatgtttcagtggacacacatgtctttgtgttcttttgcacacatrttttgaagtttgagccttacaggtagaattcctgggaccagggcagtgcacatgttctcctaggtcctgctaatctatttgggaaacctctcaggccccgagagtcttctctctcctcctccttgccctttcccctgtctttaaaatatactttctcttgtaattcatgaaagttgattttcttgtcccaggtatcctgaatgaatgccctttgatgggcctggaggaaggaagagaggagaggggtttcctggttgctgaagggcatcccttacagagaagcccacagaggagtgttctgaccaatgtagggtacaggtaggagggttggtctcttcctggcctccctgcagggaacagcttagactgtggctgtctttgtgcctcccctgtgcaacttccacccatttctcctaagccccttgaactcacaggccaactgtcccgtgctcaggctggagggacatcatctctaaagactgctgcctgcctgagtggaraagttgactctcaggccaggctcagggctcacgcctgtaatcttagcactttgggaagccaaagtgggtgtatcacttgagtctaggagttcaagaccagcctgggcaacatagtgagacccccatctctacaaaaaataaaaaatcagccaggtgtggtggggcgtgtctgtggtcccagctacttgggaggcggaggcaggaggatcacttgagcctgggaggttgaggttgcagtgaactgtgatcactttaattttagaattctgggccaaatttaaatattctctcttcattagcttttgctgggaagctaaacatttgactgtagttaggtgtgtgtgtgtgtgtgcgcactcgtgtgtgcatgtgcatgtggaaatacctaccaagaacataatcctytgatggcgagagggaaaaattctagaccaatagatttagttttttggattctccggagttaaccatgacctggttccccagctttgttcagaggctgttggttacatagtacaggcctggcactgagtcctgtttgtagagaaagggtgagaagtgtttggggcctgcgagcctctttgagtatctggatgctgccctgtgggaacaggttattctgtttgactccaaggctagagtgagaaccagaggttaggagttgcagggaggcggagtagctccyggtgagcacgaccctatcccaaggagctttcacttgtggagcaggccgagggtggccgtcatcgtggtggaagcaagcagtacggggcctgatctctctctctcggtcttctgacccgaggatcctaccatgttatgaaggctggggggagcagctgaaaggacctcgaggtctgtgacccaccctgtcgcactgggaattcgtggcccactctcacggcccttgctggcagcctgattcacacggccctgaatcatccctggattgtcacacaggcccggatccaggcccctcaaggttagccattcaggggactgcaaagaggccaaaccatggtatagactcctgattctgccgagcacttgtggaggtgggctctgcgggctaccacccagaaccgggctttgtgtcatttcaaggctgcctttggaatgagtttgtttctgagctgggaaggcgggaagccgctgcaggagagcgttggctcgtctccccgcggctgccaccttgtggggaactcaggcaatgacagcctcctttgttccccagcaaagcagactcatttggagccaatggggttctcacttggcttaggggatgtttagacagtaaaacatttgaggtaatttttttttttgagacagaatattkctctgtcgccaaggctggggtgcagtggcacagtcttggctcactgcaacctacgcctcctgggttcaagtaattctcctgcctcagcctccggagtagcagggattccaggtgcctgccaccacacccggctaatttttgtatttttagtagagacagggtttcaccatgttagccaggctggtctggaacttccaatcttgtgatctgctcacctcggcctcccaaagtgctgggattacaggcgtgagccactgcgcccggcctgaagtaatttttaattggcatttttgaggtattgctcaccaatcagggcaatccagtttagatgctggacctttccagatgtgggtagaaggcgttggttgaccagatgtcaggactgtccttcactgacccagtatagtcatggtgagcccattcttcgtcttttttttgagacgaagtctcgcgcttgtcacccaggctggagtgccatggcgtgatctcggctcactgccacctccgcatcctgggttcaagcaattctcctgcctcagcctcccgagtagctgggattacaggtgcccgccaccacgcccagctaatttttgtatgtttagtagagacaaggtttcaccatgttggtcaggctggtctcaaactcctgacctcaggtgatccgcctacctyggcttcccaaagtgctgggattacaggcatgtgccactgtgcctggccagggctttttttttttttttttttttttaaagaaagattttagatgtagagtgggcactgtcagtgaggttctgtttctcagtgtgcattcctgttttgcaacagtgatgccattttacaaaacagtgaagattttgactgcctgagatacctgtgtactgctttttaaaataagttctgtatttttggtgtactagtaagatttcccttgaaagaaaatgttctgctttaaaaataaataaaggaaaaagaatgagcctgaaatgaaccaatcctccctccctctctccctccctcctttccctytctttctctctctttctctttctcctccccttccttccttccttcccttcttccctccttccctccatttctccctcttccttgacttcctctttaagagtctacagtcctagaatctaatgcttaggtcttagaggaagaccttactttcttgttgctatgattctgacttttaaattaagccctcttttgctttttgtgtttttcgtgtttattgagagctgaccctaattccaaagggagtgttccatcgtcccagcttctggttctctaggctgcaaacgcttgataaaccaggctgccactgaatgagccaggkgattcctcggctgttggagctggaagggccagacaagctttcctggtctagcctgggcatttgaggaatccggaagctgaaacccagagaggtggagtgactcaccccagggctcagatcccatgaggtgcttagccraagccagcagcccccctggcaacctcttaactcatcttcttggtttgtttttttctctataacagcaccccaaatgaactttagtgcctgtcatttagagtagaatgctgtctagcttaaaaccctccacagcttcctgtctcactcaggagacagtcttcactgtgaggcctgcggccatggccacccccatgcccacacccacttctccaggtcccctttgaacccacctccccctgtgcattgggctcttgctactccgccttgcccctctctgtctctagaacacgcctgcaggccctgcctctgggcctttgaccctgcccccctctctgcccagtgtgctctcgctgctcttcttcatttgcctctgaagtcrccttcttcaagaagcctcttcagccttagcctccctcacagacctccactctgctgctcagatggctctctccagcccattattctgttttattttttattttcttgatagttcttaccttgctctgaagttactttatttggcctatctgtgtgtccacaccctccaaattaggataaaaggcccacagggcacagcgtctttctgtcctgtctggcatcaccagcccctagaccagtgctagacatattaggtacttgcatgggatgcggggggaccctacaccatggagggtcaccctagggcttttgagagtctttaggtccgatttacataacctgattctgggctatgtcactttctgggaggactcaaaagattcagtatgtaattatactcaatggctgacatttattacaacaaaagtacacagagcaaagtcggcaaagggggaaaggcgcgtgaggcaaagtccaggggaaactgggcctgagtttccaagaatcctctcctggtggagtttcaccggaggcacttaattcctccagcatggaatcacaacaacacacaagaagtgctggcctccacggaggcccattagagactcagtgctcaagtgtcttattgggggctggtcatgtaggaacttctgcctgccatgtacccagattctggactcccagtagaaagcaggtgttcagcataagccactttatttgtacaggctcagtaccagagctgcttatatcaccrgaagaaaagttttacatcagcctagagaactgtttactgttcgggttcctagacgccattcggtagggtcaaccttgcaagcaggcctttctaaggatatagaagtctcaggtcagctgtgttaactgttctgcacaatacttagtaaatagttgtgactgagtgaatctaaatgaatcagcccagtgtgactgcagggcctggagaattggacctcaagactctcaaaagctttagggtaaccccctccccccaaccgccttgtcatcagtctcaccctcagatagacaaaagtgagagtgggaggtctcctccgccacctcccacagacccttggtaagtgaaactgtctggtctccaggtgttgaagcacaacgggtcatccgagattctcaacaaactrtatgacacggccatggacaagttggaggtggtcaagaaggactatgaygcccttcggaagaggtacagtgagaaagtcgccatccacaatgcagacctgagccgcctggagcagctgggggaggagaaccagcggttgctgaagcagacagagatgctgacccagcagagggacacggccatccagctgcagcaccagtgcgccctytccctgaggaggtagggctagggccatcgggggccgggggcaaatgggtcctataaggttcccagccaccaccaggggatgagaacagcatgagttattgtgctttttcaatcaaaaaatgcttctgaccaggaaacatttttttttgacactgaatgtgtcttgggaatcgtggctccctcttcccatctgaacatccctgtttaccttcgggttcacggacaccattcagtggttagccttgcaagcgggcctttctgagcgtgtagaaatctcgggtctgctgtgttaactgctctgcacaatacttaataaatactggtgtgttctgagcatcctgtttctttggtcactgtcatgtgcctctcccctctgtggcagtcacccacctagcaaataggaaagttaattatctggggcatgtgtcttctgtcatctttagagatgtgatatatgccctcaaacagtgttttgtagaggatgtgcctgtgaatcaccagttctctggggcatgtagcagtttcacatgaaaagtgctctttggggataaataggtttgagcattgccaggttgaacccagacagatgtctctgctgcaggacttctcagagccttcagcgtggtgttgtgcagtagacagactctccaagagggggccaagatgcagagtttcccaaacataagtcatcagataatatacttttttgggggtaatggagctccatgcagaaccggtgtctatggagcacactgagaattgctggtctggagccatgggctctgatttgcaggctgcctgtgtggaagatgycccccggcctggaaggacagagctgtgctcttcgagcgaacttgatgaccttgtcacagggctgtactgttcgtatctgtgaaatgaggcggtttgactaaatgatcgttaaggcctctttatgctgttatcctggcattgttttgtttttattattttaaaaaattaatgtggcttgactgtgggagaaatatgctgttgtttctagtggagtggagggcatgaagtcctcagttcaactcctggcatttgtaaagggctgagaaaaattccaggtccgggggcactggtactccatgacttttctctcctgggggtggagagagtgacttcacttgaaacttcacgcttgactgtccagcacagtagagctggcgggaggcagcagcgcagccggccactgaccgggcagggcccccgcccttcccacatctcgccacctctcttgccaggtttgaggcgatccaccatgagctgaacaaggccacggcgcagaacaaggacctgcagtgggagatggagctgctgcagtcagagctgaccgagctgagaaccacgcaggtgaagacagcaaaggagtcggagaaatacagggaggagcgggacgctgtgtacagcgagtacaagctcatcatgagtgagcgtgaccaggtcatctctgagctggacaagctgcagaccgaagtggagctggccgagtccaagctcaagagcagcacatctgagaagaaggcggccaatgaggagatggaggcgctgcggcaggtaggtgggtgggccggtggctggctttcagcctctcctacagcatcccgggaagaggggctgcagagtgcgtggtgtycggattagaagcctcctgagttggagtaaatggcttctcactggaggcctaagtgcaagctgggttatcagacactgcctgagctcatgcttaatgcccagctctagtctggattacaggggacaaggcgggagggagacccagacacagtcatggctgcccggagcttacacaccaacactcacacccaaacccattgctacgtaattgcagatcagtcccatgctgaagtcagtgatatctcaaggacttgcttattatgaagcaagataccaaggccaagttcccaaagccatagatacgttaggcctcttgtgtctggaagagcaccctcaggggccctttttcaccagcagtgtgcatctcacgagtctgctcttgaaaaagtatttcaggctcctgctgggaagatgtgctagtaggctgagcccaacattcttctcctaaagccttgctctctgggggccacacctccagggttggggggctgggatgtttggtagcactagattgggccacctagctcaactcctgggtggccaatgtggattttctgtctccttcctacctgtcaacctctcctcatcgcggagctccttgccctaggtctagctgagccctgcgggggcttggatgggcccatggagattcccttcagtctgtgttgtgtgtggctctgattagagcttctagacttgatcacagcagatttttttcctatcagaatagttctcagatattcacatccctctattctgcctttctgtgcaggtcagttagaatgcagctttcaaaggtggtttatgagaagcaaaaagcaaggcgtttaaaggtcaggcagattggcagggctggtatgcattggatcattactaccaggtcctgctgtaccaagtgtgaggcaggtgatgcccagggggtgaccagcatgtctttcaaccgacagcaactcctcgtcaggcctgggcagtggtaggggatgtggggaatgcatgagacacaggccccttgctgggagatggccctcctcagtcatgtggtctcgaacctctctaggcctccgtttctttctttctttttttttatgagactgagtctcgtgttgcccagcctgaagtgcagtggcgcaatctcggctcactgcaacctctacctcctgggttcaagcaattctcgtgcctcagcctcccaagtagctgggattacaggcatgtgccaccacgcccggctaattttttgtatttttactagagacgtggctttgccatgttggccaggctggtctcgaactcctggactcaagcgatccttccgcctcggcctcccaaagtactgggattacaagtataattcaccgcctggtgagccactgtgcctggcctctgggcctcagtttctatttttaatttattttttatttttttattgagacagcctctctgttccccaggctggagtgcagtggcacaatcatagctcactgtaatctcgacctcttgggctcaagtgatgctcccacctcagaccccccaagtagctgggactataggcgagcaccagctcacccagctaattcttaatttttttgtagtgatgcggtctcactatgttgcccaggctggtcttaaactcctgggctcaagcgatcctcctgcctcagcctcccaaagtgctaggattacaggcgtgagcccctgcacccagccagcctyagtttcttcatttgcacaatggaatggtggtcatgatgaacaaatgattcaatatagaaaatacatcattgtgcctgcacaaagcaacagtgagttgagatgggcattcattattatgcccgtctgaatcttactcctctgttaggattagggtgaacctcattaaactgtttctgtgggtaaaaatgggccagccaagtaatgggaatttcatacaaggaaccaccaagacttctccagacccttgaggcaaaagccagtgtgaagagaaatatttactgcaatgaaatttttgaaaagcytattagaataaatttttaataagtaaagataatgcattagaatttggtaatcatcctagaaaaaccgtgaactcatgttcacatcctggtatctgagcacataattttttggggaaaatgtcaatatcaaataaggaaaacaaaatgatgaagaaggaaacttggaaaatgaccgagtcagtaactgctctgaaatgtcacagaatgtcagacacacgcctggggaataacagcgagcccgtgtggatggagttttgagattttcttttttctttctttctttttttgagatgtggtttccctcttttgcccaggctggagtgaagtggcacgatctcggctcactacaacctccacctgccgggttccagcgatcctcttgcctcagcctcctgagtagctgggattatagacacttgccagtacgcccagctaatttttgtatttttagtagagacggggtttcgctctgttggccaggctagtctcgaattcctgacctcaggtgatccacccaccttggcctcccaaagtgctaggattacaggcctgaaccactgcgcctggccaagttttgagatctttgaagttaatcgtgaagactgtttgtagaaatatagaaagcacagagatgcacaaagaacacctgagttccctgtggtgctggcgtccagcaatgagacctccaggcctgacgtccttgcggcaaccaccgcattcccagcactcaggcgagccattcagcctggagcccgcctccatcctccacagggggtgttgactgggcatcaagtgcacctgtcagctgaggcagggatcttttccaggccctgttccgagtcagcaggcaggagagagcccccgcggctgccccatcagctctgagagctgaaatcctcagctccttctcaagttggtctggcttcatggataagagagcactctccaccggcaagagcagrccaggaggggtgggcagtgaggcaccctggggattggccccgccaccccactggctgctgcctgtcaggggtcagctgtggggggccttctggcaggtctagctccctcaccgcagagccatcttcatcttgctcagcccgagggctgggcttcagtttctggcatcgtgcttgcacgcttctgtcttctatctgcacgtcttgctccattttcccctttccttctctatgccctctctcccttctgtgttctgagtgggctgaggcaaagagggagcaaagaggtagcatggggaggccgggggcctgtcaggatctttgccaggttggctgtgcccttgcctccctcgccttcttcttcccagctcccaggggagagatatcctcgggagctcccctaaggccgccctcctgcctcaggccagtagctgaccttgtccggggaagtctcattgctcccaggaggagggaggaactgcctggggagttgaggtcggcaccactggaagctgtaggccactgctgtctgttgcagaaatctcccaggttccaacgcactttcctagacgggccctgctcaccgagttccgtctgtagaagggcagccccccatgctcctgccgtctgctgccctgaatgcagttacacatgcagctacaggtcctgcttgaggagctgagctcagctgtggtggayagactggacagtgccaggggacaaggcaaggcagcagtggcctttccagaacttagaggcagagggctgttgtagcaagagaagcttcccaggaagcagagggaggtgccctcacccgagagccatctgctcaggggcaccactccacactcgggccccatcctcccctgggactctcgagtgggctctggccctctggggctgggttgcagcccataggcctttctcactggcctcatgcctgggtctggcaagtgtcttgtgaagactagcccatctcttcccacgcctttgttcacccagcacaggaagaaagagactgcaggtggcgcttttagagcagactcagactgacatctgatgccgaggcagcctggggtagaggagccagtactgatcagctctgcaggatgggggagccctggcgagtcacttctagatcctgcggttcctcaccagtgtaatcagaatcagtcagtccgtcacttgggtcctctgggcttccaaattttaccatttgtttaaggtacctcatttccctctcccctctcactaaaactaagtatagtacttcttgtattccttataaggaagcagtattttggggatgaattcattttggataccagcaatggtgtggggcccagggaaaggaagggagctgtgggctgggggagctgcccacctcctgcgctgcctgtcgtcctgtctgcacctggggcctccctcctagatgctcatctagagcaccatggagaaacctttcagggaatccacgtggtaacgtgtcagctctaaaactatccataaatatattgtaaaacagcaaatataatgtaaatttttcaaagtattgtttatcataaattcttgactaaattaatacactttttttttttttttttttttttttttgagaccgagtctccctctgttgtccaggctggagtgcagtggcgccatctgggctcactgagacctcagtctcccaagttcaagcaattctcctgcctcagtctcccatgtagctgggaccacaggcacatgccaccawgtctggctaatttttgtagttttagtagagatggggttttaccatgttggtcaggctggtctcaaactcctgatctcatgtgatctgcctgccttggcctcccaaagtgctgggattacaggtgtgagccactgtaccctgcccccaaataattctttttaaaatgaaaatttaagaaggatttttttttttgaaaatagcaaactaaacaaacacagcataccatgtaaagctgaaaaaaaaatcaaaactgaaatgatttgaatgacccccagaaaccgtgaggtctgaggaaagcctgccactgcactgtcaccctcgagttttgatggtcctttttgtgcaaattatttttcagctcctctgcctctgttttcagagatgaggggaattatcaactgactccaggtgttttcttgtcaacttcattctcttctcttgttttctacgtctgagatctttctgaacacatttttgtagaggctgctgtctcctgctgtctggagaatgatctttagagggaacggaagctttcttcctgtgcgtgtgtgtcttcctgtgtcctagcacttgggggtggagagtctcggggcggggacaccagtgtcatcagcgcctctgctgtcgtgcttctcttttgcatgtttggaaagcctcaagcgggaggaggagttattcttgcagtaaacacttgctttgtcatccgtcatttccctgtgttgtctaaggattatagaggtgtggagggggttttcatatgagtgctactaagagtttgacttgaaattttagtggagcatataactctctagggatgtgtcaagatgcaaatgctttggatttcagctttttaaatgaactgagatacacagcacttcaccagcaggaatactggtgtatttttgtctttaaaaataactcagtatgccagattataggatcacagacatggcgggggctagggggtgctggttaataggaccgtggctgtggggtgcagtcactgggggtatggggtgtgctgcgatgggctccgtgtttccctccatccagctccctagagcctcagccttggcccccgcactggtgggaggcgctcctggtccatgaggctcagcaacctctccctcttcctgccccttgctcccaccagatcaaagacacggtgacaatggatgctgggagagccaacaaggaggttgaaatccttcgaaagcagtgcaaggctctgtgccaggagctgaaggaagccctccaggaggcggatgtggccaagtgccggcgggactgggccttccaggagcgagacaagattgtagcagagcgtgacagcatccggtatgggrtgacctcaagctggyrtgggcttgcgtctccccaggatgaggggacctgctagggtctgttgggagggtcrgaatcatttactgtatgtccaggtaaagtgggagggacctgggctcctcctttctcacccctagttgatgccctagccttgcctcttagttttagaattttccattgtttctccctcccatctcactcagccctaggtgtcccaagtgtgtactatgtccacgtgagaccgctgtgaaggggcacgaggccgacctcttttatttgagggtttctgatgagaagagcacatccgaagtgtgtcctttcagcagtattcaccgggcgcctactgtgtgccagggtcttagatctctggagcaaggagaccttgggagaggcttggtcaggcacggcagtgagggaggaagatgtgtaactgagctctagggctgtggggggcatgcagggctccctggggtgtggggaggtctccccagagagtgtggcattcgcactagaactggaagcatgagtggggtttttccaggtggaaaagggggaagggcattgcagatggagggcacctgtggagtgtgctcagggcagggacgtgggcaagtcgtggggagggcaggctggcgagattcccaggggcaggtgtagaggccttgaaagggaagccaagcagtgtgggcttgatccttggctggggaggaaccaggagaggctatggtggtggtgatgtttggggtggggagagataatgtcttgctatttgggaggtgtccaaaagatttcttgtggtttgtcaggggagagaccaatgtctctaggggctggtcaggagatgaggatggctaggtggtgaggccctgctaatggagagcacagttaggtgcccagtgcaaggggagggaggcccaggggctgcttcctgtctgcttctgctcagaccccttccacgggtgtctccagggggcagtcctcagccrggctctgactgaggctgggggagattcgaggctgtggagaggtaggaaccagtcctctgggtatgtccatttctggaggtggcacagagcccaggcccctccacagccaggtaatctgtttccacctccttggggtcctctttcatagagtcttgccaagcttgtactttgcacctgcacagagctaatagagacagagatgcatgaggactggctggtatccgaaggggctcccttcctagttgcagggtacagggacagctctagaaagctctgcctgtgggtagatatgagacatgtggtagtgctggagcacaggcctgccaggcaggtggggggtgcttcatgcagaggagagccaccccctggctccccaagttggcattagaacagtgagtgtgtgcagagggtggtccttaaccccaggcacattgagggtgaaacagggcattgggaacctgacacttgttgccgggtgactgtgggggtgtctcttccctgcccaggtcctccacattccctctgtcatgcactggggctggcctaggtggtcttacccctagattcccaagtgttcctgtgcatctggggatgggataggtgccggcaggtatttggagtgaggtggccagaccatcygctgcagaccaggaacccccttccccatgcctcttgagatgaccttgtcctctgctccttccaccaggacactgtgtgacaacctgaggcgggagcgggaccgtgcggtgagcgagctggctgaggccctgcgcagcctggatgacacccgcaagcagaagaatgatgtcagccgcgagctgaaggagctcaagtaggctcgggtgggcacccgctggagtgggcatgcatctgggagcctggggcccctctcccttctgggcaaggcaatgctgagtgcattggccagggcctcatccttctgcgtcgagctggctgtttgtcccttcacttcactctgccttactctgtcagtgtgtagaatgggttcgaatgtcatctccatgtagggttaattagaaattcttaggccaaaaattcttagacacagggcaggcaccatgtgccaaggcactaggaagggaggaccctgttcccaagcagtccatctggggcaggcatgcatgtgttatccattcattcattcccctactcactcactcactcactcactcgcagagattttttaagtacctgctctgtatgggccagcctccattagaggcactggagaaatggcactgacaagcataccaagtccctttcctcatgggctcacagtgcgcaggaagagacacagaccaaggtcaggtccatctaagagacaagtacgtaaatgagtaagatgacgacagattgtgatttagagttttaaaggcaattgcaacccccatccagcagtctgttctgcttgtgttatttggacgyccatttggaagaccatttggggtgtcagacatcctcccctcgattacagcagcctcccagggtgtcatttaaacactcagtggcctttagtagtgcattgaaatacaaagatcagggtttaagcatagaaattggcagagcccaataggccgtggtctaaaacccaaatctagtaggaaagcagtggctctccatccattgtgcgacatttccctagctgttagtgtggtgagggggcagtgagaagctcgtgtgtgagtgcaagtgtgcaagccttgcacactcaagtgctgcccgtcagaagggagtgacagcttctcttctttcccattcagtaaaattcctaatgagacaaagagctccatttattctataaaaacccagactctctggagcttgggtgctctcaggaatattataggggttaagaggcaaggcaagactcttcacaggaaccatcttgggtctagcaatgtgatggaatcaaggggttctcttcgaagggaaagcctagaatctctggccgtgaacatgggacattttgcctcttgtttgggccagagttgcctgaagcttgtgcattcagcttgtgtgttcattcagcatgtttgcatttgtgcctcctgtctgctaagttctctaactggcaggatgctggtgagggggtctgtgttgctgcctgggaagcctcaggcactccctggtaatgccagatgagacaggtatagtgagcawtgaatgctgagctcagctgcactggcctggggaggggctggggcagtgttggaaggcattggagctctgccctggaggctgagtggcattctagagctggctggtgagagcacagcctaggcaaaggtgcggccctggggcctgtctgctggagcaggaaacacaagtaggtcaggagcccagtgggcagtgttcatgagctggcaaggcagcctgggcccagatttcaggaagggtgtcacaggcaagtcacctgaggatataacgaggcttctgagtctctctttcacatcttcattactaggtctttctctgagctaatatttataattttgatgaagtcaaatctatcaaatttttttttttgagatgcccaggctagagtgcagtggtatagtctttgctyactgcaacctctgcttcctgggttcaggtgattcttgtacctcagcctcctgagtagctgggattacaggtgcatgttaccacacctggctaatttttgtatttttggtagagacggggttttaccatgttggccaggctggtcttgaacccctgacctcaagtgatccacttacctctgcctcctgaagtgctgggattacaggcgtgagcctccgcatccggccatcagtgaacattttttaaaattgtaacaatggcattaaaggaaatgttaagaactacatcttcatcctaatataactatttaagtggtatttctgttgctgcttctgtcagtttgcatttcaatttgtgatatagttggcgttaacttttatccgaggttaagtggtttaggttgagatacatttctttggccatggatgtgcagtcgctccagcatcattagttggaggctgtccttcctctgttaacttatgcacctttggtgacttggggcattcctaggttccttattctgttctacagacctgtgtgtctgtctccctgacagcagcacacagtcttgattgctgtagctgtatactaagtcttaaattgggtagagagtttcctyccactttagtcattttcaaaatagttttagtgattctgatgcctttttgtatacattttagaatagccgtctatatctacaaaaatcttgttggcattttgattttattttttaaattaaattttattttttttttgagatggagtttcactctgtcgccaggctggagtgcagcggtgtgacctccactccctgcaacctctgcctccctgattcaagtaattctcctgcctcctgagtagccgaggttacaggcacatgccaccacgcccggctaatttttgtatttttagtagagacgaggtttcaccatgtcggtcaggctggtctcaaactcctgacttctggtgatctgcctgtctcggcctcccaaagtgctgggattacaggcatgaaccactgtgcccagctggcattttgattttaattgtgttaaacctctagataaatttggggagaatttgtcttttttaaaaaaccactgtgaaaactcacagatatcccagcagccttgacctgactctgagttattgggaaacaagggggaaaggaacccattttagctstttcaaatggcctgcctcgtgaggttcagagccgttacgcrgtgggatgtttcacctcccaaggggctgtcaccgtggctctctctgttcacagggaacagatggaatcccagttggaaaaggaggcccggttccgacagctgatggcccacagctcccacgactcggccattgacacggattccatggagtgggaaacggaagttgtagagttcgagagggagacggtaagctgcctctgatggttcttctctccttctctgatggatgaaggaggagacggtgacccgcttgcagtatctcccagtttcaccactccaagtttggaggttctccttttcctcccaggagtgtgaggcatcctttcccagcagctgtccaggctgggttgcagctggggaagggcagggtcctcggaggacgctgacagggatgtctgtctgcagtggccagaaggggcaggttgcagatactcataggtttccatcctggggatggagtgtcttatcagatgaggtgaagggacagtcccccacattggagtgggcagcttcggggcttaagagccaaatgtctctgtcactgctttgtgaaatgcgttgctgttgctgctgtttttgcaggaggatattgacttgaaggcactggggtttgatatggcagaaggtgtgaatgagccttgtttcccgggggactgtggcatatttgtcactaaagtggacaaaggaagcattgctgatggccgcttaaggtaagagttgaggcccaggctctggaggcaaggtggggcccttcttcccagtgcagaggacscgaagagarccaggtagcacttaggtgaacgtttcccagccttagactcacacacagtctgtccaaggcctgcagtctcagcagctaataatgctccgaaagaaacagtgcttctcagttgcctctgaatctgattattctttagttaccaggtactgtcttttgctcctttgggtgggaaagtgctcaaggggtatgcgtgagagcccaggatgtacatggcatgctcattcagggaaatagtcatgatgataaaatagctaacactattacagtgctatttgctgagtactggtttaagcactttatagaaattaattgattaatctttacaatcctacaaggtaggcgtgattattgcccccattttacatatgaagacgctgaggcctggaggggctaggtcatacaactagtaagtggtagggccaggatttgaacccaggctgtctaacctcagcatttgcaaatttcaccactgtgcactcctgcaagaggagattttctgagygtgtatgtgaggcacccactccttggcagtcagccccctgagtgagagttgtgggcggtagcygctggtcccacagcctgtgtgggtgctgaactggctgtgccctttctcagggtcaatgactggctgctgagaatcaacgatgtggacctcatcaacaaggacaagaagcaggccatcaaggcgctcctcaatggggagggggccatcaacatggtcgtgcggcggaggaagtccctgggtgggaaggtggtcacgccgctgcacatcaacctcagtggacagaaaggtagcgggcctgtgaacatggcagagtgcctcaggtggctggggcccttttttgtggacaggggccgggggtgccccttagagcacctcattcacagggatgaggggccaatgccatttaaatgtagcccatgtgcttttctggcaagaggtggtctgggccctgagtcttgctttctgagtgtttgattcaccagggtagatgtaactgagcccccgattggtgggactggggcagggtgcaggcgtagacagggcgcagcctgctgacatcctcttttgtaagaagatggtaacaaagatgaggtagggtgacccagggctgggcagcgaggccaggggctacccagtgacctcctgtggcttgcagacagtggcatcagtctggagaatggagtgtatgctgcygctgtgctgcctggaagccctgccgctaaagaagggtcccttgctgtgggagacaggatcgttgcggtaagtctcaagccagggtcatctgccgtgcataggcagattacatttgggaggtttgagcaagaagtaatgagcaaagtttttatattttccttgttstgggcattgtactatgtgaacatttaaaaataggtttcttgatggtatgtttctatttactgtagaaaattaggaaataaaaggtctgggagggaaataagaatcaattgcattgctaccacctgtagataacctttctctatctctctctgtccctcaggctggagtgcagtgaygcaatcccagctcactgcaacctccaaaggcctaagcgggaaataagaaccacttgctttggtaccacctgtagataacctctattaactttttttttttttttttttttttttgatatggagtcttgctctgtcacccaggttagaacgcagtggcgcaatcccggctcactgcaacctctgactttcgtgttcaagtgattctgctgcctcagcctcctgagtagttgggattacagggtgtgcaccaccatgcctggctaatttttgtacttttagtagagatggggtttcaccatgttggccaggctggtcttgaactcctgacctcaggtgatctgcccgccttggcttcccaaagttctgggattacaggcatgatccacagcacccagctttattaacattttaaatgtagttctctacatttaacattctcatgaatgtttatcaaggacaattaaaaaaattgacatcattgtgttgtgacttttaaatgccaccccttttttttttaactaaatgtaatacttatttttaaatttttttgttaccaaagtaagtcctgtttgttgtaaaacagccaagcaatataaaaatatgtaaagtgaaaagtggcagtccctttcttccccctttaatcctgctcctagagattgtccctgcccccatttagaagataagcacycagcccaaaccatatgtgcccctacaaatctatatatacctagatagatttcttggtgttgttttgcttatttatgtacagtaatgggatctgcaattygcatcctaccttggatatctttccaagtgtagcctggctaatgttacccaccttatggtattctgttgtttgattatatgtagtttaaattatccacctattgatggacatagaagttgttttcagggtctgcaattgcaaacagtcctgcattgaactttacctgtgtgcacagagcctctggagacatgtaatggtatctctgagactaagctacaaatgccgtgagattgctgagtcataggacatgcaaatttaatacttctgaccttttaaaattgaaaatgccagcggggcacggtggctcacgcccgtaatcatggcactttgggaggccgaggtgggtggatcacctgaggtagggagttcgagaccagcctggggaacgtggtgaaaccctgtctttactaaaaatacaaaaattagccgggcttggtggtgggtgcctgtaatcccagctactcgggaggctgaggcaggagaatcacttgaacctgggaggcagaggttgcagtgagccgagatcgtgccactgcactctagcctgggtgacagagcaagactcctgtctctaataaataaaaaacaaaaactgaaaatgccatacactttttcatggcatacatacaaaattccagtagtacaaaaggcaaatcgtgacaacaaatcttcctctggctagacctcttgtgtactgcttcccaccccgatggcaatcactgttaacaatttattatattatgtcccagacactttcaaaacatgtacatctcacacatttttggggggttgaggtaacctggatgggattataatatactcagttgctcatcttgctttttgtttttgtttttattattattttttaagatggagtatcactctgttgcccaggctggagtacaatggtgtgatctgggctcactgtagcctccgcctcccaggttcaagtaactatcctgcttcagcctcccaagtagctgagattacaggcatgcgccaccacacccagctaatttttgtacttttagtagagacggggtttcgccattttggccagcctggtctcgagctcctgacgtcaggtgatccacctgccttggcctctcaaagtgctgggattacagatgtgagccaccacgcccagccagattttagcagcatgtctttttgtttttatttttgtttgagatagcctcactctgttgcccaggctggagtgcagtggcgtgatcttggctcactgcarcctctgcctcccaggtctaagtgattctcctgcctcagccacctgagcagctgggattacagacatgtgccatcacgccctgctagtttttttgtatttttagtagagatgggggtttcaccatgttgcccaggctggtcttgaactcctgacctcaaacgatctgccctcagcctcctgaagtgctaggattacaggtgtgagccaccatgcccagcccacattcacgtctttagatctgccccaaggcatataactgcgtgtcattccttagtggcagcagcctaagttgttgaccagtccctcccgagggatagtctgggcatctctgcccttacttacatctgtgtcgtgctgcatggccactgacatgctacttcatagggacccaggagtgtgccctggggtacattcctgggggtggggtttgctgggtcagaggacatgaatgtttaacatccagcgagatcttccccctttgctccaaaaaggtcatggcttttgcagtcctccctgcagtgtgtgggggaactcattgcctcacatctttgccaatgtttttcagattttttggggagccagagtgtaaaagctatatggccactatgaaaattttttaaatgtggatatgttataaggaaaaaaccacaaattaatttactacttccagataatcactctgcagatattttaaaaagaaaacttgactggccgggcatggtggctcacgcctgtaatcctagcactttgggaggccgaggcgggtggattgccttagttcaggggttcgagaccagcctgggcaacacaatgaaaccccatctctactaaaatacaaaaatattagccgggcatggaggcatacatctgtaatcccagctactcgggagactgagataggagaattgcttgaacctgggaggcggaggttgcagcgagccgagatcatgcctctgcacttcagcctgagggacagagcgagactccatctcaaaaaaaaaaaagaaaacttgactttgaaatgattatagattcataggaagctgcagagatagtacaggggggtcctatgtactcttctccctgcttcccctcatggttgcaccttgcatgagtataatatcaaagctagcatattgacattggtactgtgtgtgtgtgtgtgtgtgtgtgtgtgtgtgtgtgtgtgtgtgtgtgtgtgtggttaaacacatgttgttctgtgtaaccaccaccgtaatgaagatacgtagctgttctatcagcactgaggtctccctcccactgcccatttgtagtaacaccccctgctccctcccatccctgccccctggcagctgattttttctccatctctgtgatgttgtccttttgagaatgttacagacatggaatcatatagtatgtgacctttggagctgggctgttttgattccgcaccatgcctgcaagatccacccaagaggctgcgtgtgctggctgcttgttacttatcgttgctgagcagtgttctgcaatgtgggtgtatcacagtttggtcattcaccggttgcacatatacttcttaagaaggtctgcacatagctgtgagcagagattccgggagcagggttgagaggttctttgtgaacactcacagggccccacttcgcgtggtactttctctacaaggcctttcctatccatggtcttgtttttagtcccccgctctcccgagccacatgcatgtatttatcttccatttcctctgtggaggcaaggagctgggaagttctgagccaaggtcccacgccacatggccgggcacagcagtgccaagatgttccctcygggtcctcggtgttctgatcccagaaggacatgctcctcccctagcctgctgtgaaggcttatgtgttcctctacctcagaatccccttagttggactccttgggcctcaccagaaagacctctatcctttgccaactcctgactttggcaccttgcatttggtgactgtctagcacaggaggttaggtaggcagagatcctgactggtaggcctgaggccrctctgcctgtggcctgacatgctctctgtcctgctctagatcaatggcattgcactggacaacaagtctctgaatgaatgtgaatctctgctgcgsagctgccaggactccctgaccctgtccctcctgaaggtaagggctggacctggctctgctctcacggtcaggagtatgggcagagccccggctccacatagccatgctactccttggggtcacaggatccttgagaacagggtgggcatttactgagtgcagagggggcaggaaccctgactggacgctggtctgaaatcaaaaaacagcagtcaaggccatgttgggcacagttgggtacatttgaatctggacccgataattagatgatcttagggaattgttgccagttttcctaggtatgatgatggcattggggttrttatacaggagaatggctttatttgggggaggtacaagctaaagttgttagaagtgatgtgtcatggccgggcatggttgctcatgcctgtaaccccaacactttgggaggccaaggcagtcgaatcacttgagcccagcaacacagcgagaccttgcctctacagaaaatacaaaaagcctgggaggtcgaggtggcagtgagttgtgattgtgccactgcactccagcctgggtgacaaagtgagaccctatctcaaaaatgaaaggaagaagctgggtgcaatggctcatgcctgtaatcccagcactttgggaggcgggtggatcacctgaggtcgggagttcgagaccagccttgaccaacatggagaaaccccgtctctactaaaaatacaaaaatagccggatgtgatggtgcattcctgtaatcccagctactcaggagactgaggcaggagaatcgcttgaacccaggaggcggaggttgcagtgagctgagatcacgcctttgcactccagcctgggcaataagagcgaacctctgtctcaaaaaaaaaaaaaaaggaagggaagtgacatgtcatgatatttgtaacttgctttccagtgttctgtagtatcattatagacaaaaagacaatttagtgaaatatttttgaatctagatggtacatttatggacatttattatacttttctacatatttgaaaagtttaataataggaagttagaaaaaataggccgaatttagaaaacatctcttaatgaaatggctgggcctattttttctaactttctattaagagatgttttctaaattaactattttcaaattatttgacttttttggaagcagttttatgtttacagaaaagttgggctgatacagaattcttagcactctctcaaccaccccatcaccaccatccccactcctgtccccaagtttccccaattttggcattttgcrttagtgtagttagtacatgcgttataattagtgagccaatgtggatgcattagtattaactataatgcatagtttacattaaggttcagtcttggtgtattttctgtgagttttgatgcaggtgatgacatgtactaccattgtaatatcatacagagtagtttcactgctctaaaaattccctatgctccccatatttatgcaagcccctggcaacaactgatccttttactgcctccatgcttttgtgttttccagaatgccatagagttggaatcacagagtgtatagaatggcttcttcatttgctaatatacacttaaggttcctgcacgttgtttcagttctttttagtgctaatttatattccgttgtctgggtgtaccacaagagatatatttttaacaatgaatttttacttttatgtttaatatttaaaaaaaatattcaagacattatgcaggtaatttccttctttttgagacagagtctcattgtgtcgcccagactggagtgcagtggcgtgatcttagttcactgcaacctccacctccgggttcaagcgattctcctgcctcagcctcccaagtagctgggactrcaggtgcatgccaccgtgcctggcttatwtttgtaatttttgtatagatggggtttcaccatatcggtcaggctggtctcgaactcctgacctcgtgacccgcctgcctcagcctaccaaagcgctgggattacaggcatgagccactgtgcccggcccagataatttcagaaagtgttcaaagttaagaaaactttgactcttctttgagttcagagtgaccagagccatgagaaaacttatccattagggagaagcatatgtgttcatgtgtgtgtgcatctctgtctatctgtctcttttttaaggggcaggtggcccattcctgaccattgctttacctctggggatggttttcagtggcagctccaagtcctgccatctcactctctctctcactcctctgcaatccctgcctaggtattccctcagagctcctcgtggagtggccagaacatttttgaaaatatcaaagactctgataagatgctgagttttcgagcccatggcccggaggtccaggctcataacaaacggaacttgatacagcacaataactccacgcagacagacatcttctacacggacaggctggaagacaggaaggagccaggccccccaggaggcagcagctcctttctgcataagccattccctgggggacccttgcaggtctgcccccaggcctgtcccagtgcctctgagcgtagcctgagctccttccgctcagatgcctctggggaccgtggctttgggctggtggacgtgcgtggccggcggccactgctgccctttgagaccgaggtgggcccctgtggggttggggaggcctccctggacaaggcagactctgaaggctccaacagcggcgggacctggcccaaggccatgctcagctccacggcagtgcctgagaagctctctgtttataaaaagccaaagcaaagaaagtccatctttgaccctaacactttcaaacgcccccagacaccccccaaaatagactacctgcttccaggtcctgggcctgctcactctccccagccctccaagagggcggggcctctgacacccccaaaacctcccagaaggagcgactccattaagttccagcacaggctggagactagctccgagtcagaagccactctggtgggcagctccccatccactagtcccccgagcgccctgccccctgacgtggaccccggggagcccatgcacgcatcaccccctcgcaaggccagggtccgcattgcttccagctactaccctgaaggagatggggactcctcccacctgccggccaagaaatcctgtgatgaggacctcacctcccagaaggtggatgagctggggcagaagcgtcgccggccaaaatctgctcccagttttcggccgaagcttgctccagtagtgattcctgctcagttcctggaggtatagctgagccccagggtgtggggaggggaggcctagagaggggcagttggcygaaggagggctgctaagtggccctgcaccagtgtcccaggcccctgtttagcctggtgcctttgcctttgctgttggactyaagtgggaagtggcccagctaggaggtaggtaagtggcgtggaagtgcatggtagtgggagtgtgacacaagaggggaacactttattgggcatagcatttggtttgcttttttaataagaagcttttgaacttacacaataaaacctagggcatagacttgccttgaagggctagggagatgaggtggcacgtgtgaggctgagtgggcagcgggacggcctgattgcgtgtgctgtcatagtttccagaagggtgagattgctggggactgtggaaagcatctcaggcaccagtccacactgctcactggggacaaagagcttcgcacagccctccacatcgggcagagttgtacgtgcctgatgcacttgtgcattctcaccttttacgtgatctctgtgaaagattcattctctgtggttttcttctgaagtaaagctgcttccttgaagatgtgtaaggcaacatgaatgggcagcgttcccattcatgtcccttcctgtgccccagtgggaggagctggttcctggggggcagaaactggcttgcagagctgctcaagcgttccactgtttggtttttttttttttttttcccctaagatggagtctcactctgtcacccaggctggagtacagtggtgcagtcttggctcactgcaacttctgcctcccgagttcaagcgattctcctgcctcagcctcccaagtagctgggattacaggcacccactaccatgcccagctaatttttgtatttttggtagagacgggatttcgccatgttggccagggtggtcttgaactcctgaccttaggtgatctgcccgcctcggcctcccagagtgctgggattataggtgtgagccactgcgcctggccacactccactctttctagcagacactcttgcccttgcatctgcaggaacagaagtgtgtcccggccagtggagaactctccccggagctccaggagtgggcaccttactcgcctgggcattccagccggcacagcaaccccccgctataccctagcaggccgtctgtgggtgagtcagccagccaggggctggggctgagggtcggtgtaaactcgggatgcctagtctccagggagaggggaggcagcatttcagagagctgccatgtgttttcagccctgaggtccagagaactgggaaatgctgtcctgtctgggatggtttgtcttatagccatgacatgtcttagcttgtcaacatgctttctccccatagcaacctgggaaataggaagcatgaaagagacttcccccctttttacaaatggagacaggccaggagccacagccacattgtgaattggtggttaaaactcatctcccaagtccttttcccaaaagactgcggctgcgtcctgggatacaggggaaaggcttgtgtaagtcctgggctggctgggtcctttggggygtcttttctcaccaagcccatttctaggyactgttccccggagtttgacccccagcaccactgtgagctccatcctgcggaaccccatctacactgtgcgcagtcacagggtcggcccctgcagctctccacctgcggcccgagatgctggcccccagggtttgcatcccaggtatgtgaaggcaccctacgcttctctgtacyccagctgcccaagcctgcctggacatggaaccatgagtgcataaagaggctcattggtggagaagcttccttgcctgcctgggaggggactggctagagcagcacagggaaagggagccttagggctgctttctgaattcatcagcacaaggtttcaaaaggtactggaaggacacgatagtgatagcagctgatgtttgagtgcttatgtcccagccactgtgctcagacctttatgaatatcatttcaccgaatcaacagcaacctcatgggctaagtcctattactgtttctgtcttgaagatgaggaaactggtacttcataagagggtgggctggctccaagccactcttattcattcatttgacagatattttttgagcacctactacatgccttggtctatcctaattataagaggatacattgctgaactaaacaaattagcttctagctcatgtcgtktggtttttcaaatgtgggaggcagacaaaaaaaaaaatgaacgaagtgatatcagatggtgccaagaggctatgaaggcagtcaaacagggtgacaggctgggctgtaacttggaagagggtggcaagttagagtgggtggtcaggaagggccctgtggcagaggggatgctgctgtgaccagaaggatgaaagaggccagctgcacaagacctgggctggagcctccagggagaagggccatcggtgccaaggccagggcacccaggcacagtcgtgggagcttgkcaaaggggcagcgagtcaagaagaggtttgaggtcacagggcacaaascctgtgggacctgcagcsgtgatgaagagtttggattttattctaaggacagtggagaccactgtagagtttaagcagggaagagatgtcacctcattacatagctggaaaaagatgctgttgaggcctggtctcagggcagcctgatgtgggcgatccctgctctgcccttcattttcttaggcacgctgtcccgagtgaggcacataggtcccctccccaaagtcctctgtgccttgtctctccttacccacttcctgggaggacaggttccccctccccaggcccacccaggttgcaaaacctctgttttttatcacttcttcctagtgagcctaatcctgaccctatggctggagtgggtatgatactgaccgccccatgtgtgtggccctttctacttcctgaaggctcttagtggatgccacctccgggagtggctgagggcagcctgctatcctcggctgataatcagtggctcctgggcctcccttctgcccgcttgggaacccttgcctggtctgtgtgtttctccccagtggccacatctgttcctggttctcctcccgaactcctcacctcttgtttttacgcagtgtccagcaccagggacgcctgagcctggacctgagccacaggacctgcagcgactactccgagatgagagccacccatgggtccaactcactgccctccagcgcccgcctgggtaactgcaccacttggactttgtgctgcagagggtgccaagcttttcatctctgcctgcatcctaatgtccagatctgcgggtgggctccccacacgagctcctgtcacctcctgggactgagctsatttctctactgggaagggctgcttccttcatgggccagccatgcccatgctgctgtcagagccattgctttcgccttccgctttctgtgggggccttatggycattcaggtgacccctcagctaggagccttgctctgtgtccctgaggttgttggcctcattctggactgttttgtatggctcttcatacatttttgtatggaaagtgaaccccagaggagagtcggacaaaggtagcccatggagatcttggggaactctggcgctggggagaaaagatggagcagctgccgtgtctcttaggctgctgttccgtggctggaagtgagacttgtgcgctcctgttctggagcagtctgggcctgcacagttcattgagataaatgttaaacgtctgcttttctkgactgttccatatcaaggctcccttgggaataaacagcagggcccagctttgcatttattatcctgaytggtagcctggtggagaggaaggacagggtggtgtttaaccatgaggcctgaagttttgttcccttatggaacaataggttcttcgagtaacttgcagttcaaggcggaacgcattaaaatcccatcaacaccaagatatccgcggagtgtcgtgggctcygagagaggtaaggacttctcgacattcccatctctcctgcttttcctgcggtctgactcctcatggtggagtctctgggcttagctgagaacttcatagtcatctcagtcagtcagtaaaaattcactgagcccagcagtaggcctggtggtgtggggggtagggggcaatgcagagcctagcatctgagctccagactatgcgatgcagtggggatagagctgtgtgtctggatcgcacctgcctcttggtcttggctgttggggaagtgagatgggagttcacaccggcattacccgctcctctctgcaggttcagtgtcacattctgaatgcagcactcctccacagtcacccctgaacatcgacaccctgtcctcttgtagccagtcccagacctcagcctccacattgcccagaatcgctgtcaaccccgcgtccctcggggagcggagaaaggacaggtgagcatggccggtcatcggtggagtgggtaaaccagtggacagtgtgcatcccggcagcgggcctgggctctgcagggaaggggcttagtagaagcagcaggagtagcttgagtgtcccagcatttgctggygtcaccagtaagtgccatggggcactggatgcagggaggtggggcgtgtgtggatggcarggcagggagccaagagggctcacagtagatgatgctggaaatgacctgacggtgatcgtgccatcatggcaccatttacaccttcctgggcccttgttcaagcactttacgtgtggctaagtcacgagatccttacagggaccctgccagtgtcgttattattgttatccctgtttcacagttgaggaaactggatccagacgttggagtgacagacctgtggccacgtggttagyggctggcaccgggactcattcttaccctttgctttttccctctcattcgaagctttctgttgtgaaataaaatatacacaggaagaaagcataaatgtgcagcctagctttttactggtactggttcattttagaatgtaggtccatcttaggtttcaggttgactgtaggcttgctgtctgtccagaggcacctcctccatggaatccgtcacccccgcgcactgtgcacacacatccctctctgttgttcccctagatggaacttactagattgtgtttatatttaacagcttctgtctagattgtagatcttaaagagctctgataaacttacttttatttaatcaccaaaagaaacacagatactctctttcatttgagtccagaaagctgaggcctctgtagctgtgagcctcagcaggggtgggccctatgttaagaaaacatatttttttttgagacagagttttgctcttttcgcccaggctggagtacagtggtgcaatcttggctcactgcaatctctgcctcccaagttcaaggygattcttgtgcctcagcctcctgagtagctgagattacaggcgcccaccaccacgcctggctaatttttgtatttttagtagagatagggtttcaccatgttggtcaagcttrtcttgaactcctgacctcaggtgatccacccgcctcggcctcccacagtgttgggattacagacgtgagccaccgtgcccagccagagaaaatcttatatttgacttgaaaatctgaacttaaaaggcaaccaaccagagaacctgaggggtaacggaaggacagcaaaacacagaggcctggccccmgtaggggaatcgggtgtaactcggaagaaatgctgacggagctcttaccatgtggcacgcgcaggagcatgctggcctgttttactcagccccggccctggccacagagaggacgggaccttccccaagtgaagtgggttcttcagttgtggaaaaggccttgccacccactgccaagcattcccttagctccccacagggcacggagagccaggacctgctccaggagggagaaaaatgtgagtgactcctgccctcacggtggttaggatccgattggagatgaaatttgacatgtgtgacctgactgagcaacagctttctttttaaaaatggccccgtttcccagattctgaagtacagtattttatacttgttatggaaaatcagagacatagaaaagtagaaagaaggccgagtgctgtggttcacacctgtaaggaggccgaggcaggtggatcactggaggtcaggagttcaagaccaacctggccaacatggtgaaaccccgtctctactaaaaatacaaaaattagccaggcacggtggcaggcacctgtagtccctgctactcaggaggctgaggcaggagaattgcttgaacccgggaggcggaggttgcagtgagctgagattgcrccactgcactccagcctgggtgacagagcgagactctgtctcaaaaaataaaaaacagaaaagtagaaagaagaaaaaagtcacagattatttcttcaacaagagattcaattgccattaccctttggakatatatatatatatatatatatatatatatatatatatataaacatgctttattatttatgtacataatcaaatctcccttaatattatgtttttagctatttttaatagtttaagtatactttataaacctcttttgagaagcagctgttgtttagagaaaacttctatgcatattacaaacaattcaaatcattcagaagactataaagtaaagattatctctggctgggcgcggtagcctatgcctgtaatcccagcactttgggtggctgagacgggcatatcacctgaggtcaggggttcgagaccagcctggccaacatggtgaaaccctgtctctactaaaaatacaaaaattagctgggcgtgatggtgtacacctgtaatcccagctacttgagaggctgaggcaggagaatcattggaacccaggaggtggaattgcagcaagctgagatcatgccactgcactccaccctgggtgacagagcaagaatctgcctccaaaaaaaaagaaagaaaaaaaagattagctcagatcccctcaactggagacaccattgttaacacttggtaatgtcctacataagaagcctccttgtgcataaatccacacatacttttgtttgcagatgcagataaatataagtgaaatgatgccgatcgggcctccccacccygtggtgtgtcccttacgtctttgcatgtcactggaacctgggaacctggttcagatcattgttctrttgggtggctattgctgtgacttagttgcttgctcctttattgtgatacacgtgttgtacggaggtggacctctttctgctctgggcctctgtttcatcatctaaggctggggcaggagggtgatgtaggggtggctgtgtgctgagggctctgcagctctcaacagcacggggctgtaatccgtgttgaattggaagggacygtgggtgtagtctggggtggatctgtctgagctggagggtcaagggaggatttccagagtgggcaagtttgggaagtgggaacactttggagggtgggagagagcagggacaactcaagaagaattttaatttccccttcccaagagggctggggcatagggccacaggctgagactgccaagtgggaagctgctctgcctccaggtggccggggtggggtggtttaggtgcctccccgctagaatctatcctgaccatgtgctgtagaggggacctggactggccccctcagcctttggctatatggttttatcctgcgaggaaaatctcaggtgtccataccttggaggaatgaagccctgagtggcgtgaagtcccaacgggaggctccgcatcacttgactgtcttttctgttatgttccaggtgtctctgattgtctttctcctctgagcgtcccttatcttctttctaacctttgtcaccttccagatgtctctgccaccacagatctcttctgaggctgcccgtggccaccaggcccaggtcttccaccatgcagttggcctgcccagaggctccctgccgagcccctgccccggcgcccttgggtgcactgtacagccccagggcagcaagtgcatggctgcagccttgctcccagccttctccctttacaaaggcttgggtctgcagcagcttaatttccgtgaccagtttgcatcactctgtgtagccagtaaacataaaactggattattttctgttgcccccttaggatggaatgtcatcccaggagccatctcttttcctcggagggcatctcaagaccccccagagtttgtaattgcatattgtggggcagctcctctcctgtaatgaaaatccacatgtatcagtgtttatagttcacayggaccgttctctgygtctttggcctgggtggttgcgtgtctgcgtgtgctgtgctcgtgttgcgtgaggctgtgggaatgtgatcgtttgtcacacaggggtgggcccaccatgtccccatgtagctgtgtcacaatgggagcatccaggctcggggccctttctgcactgtcagatcatatgcctgatcagagagctcaggctctccccaacccttttgtttgaccctgagtccccgaaacttttgacttttccttaggccttatgtggaggagccacgccacgtgaaggtgcagaagggctcagagccgctgggcatctccatcgtgagtggagagaagggcggcatctacgtctccaaggtgaccgtggggagcatcgctcaccaggctggcctcgagtatggggatcagttactggaggtgagagggagctgccctcctgcatggcgcccatggaaacctgcacttcttccccctctcctcctcctagggaacagcastgctcccaagtccccagggcctcctccctgtccacagccccgaccccccmactgagcccatcctggtgtttccccagttcaacggcataaacctgcggagcgccacggagcagcaggcgcggctcatcatcgggcagcagtgtgataccatcaccatcctggcccagtacaacccccacgtgcaccagctcagcagccactcccggtccaggtgagtgcgggcctcccagggccgtctgggctgggggtggagaggtgggtgcagcagcactctgctcattttagggagacccagggtgccagccgtaagttctggggatcctactgctgctaaagagagagttgaccagccctggattttggaaaaggggcatatatagagaggctgtctcctcctgaaatggggtgtggaaacagatggctgtggtccccctgaccagcaggggcccatggtagccaggagttgtggccccgggggtggattctcactcaaagtgtttggctccctgtccaggagcagatgctgtacacctgtctgtatctgcccctgagctgtgggttgaagggcagaaaagaaggggaggcatgccctgcagtgctgcgccacaagctcagcaggagagatgggatgcacaggcagaggaaaagagacaggatgctcacagcttcctgaggtcagatgcctttggagagggcccctgagctgaggacaggtggaggggagaggacaggtggatgtcatgggtccaggcttctaatgtgtctgctctgctcagggcacaggrtgcagggctatgtgacctggtccccatttatagctcagatctagttgccacaggagtgggggtggctctgggtggcttcgtactgctccttatccctcctgtcctccgcctccagctcacacctggaccctgccggtacccactccactctccagggcagtggcaccaccaccccggagcatccatctgtcatcgacccactgatggagcaggacgaggggcctagcaccccccmagccaagcagagcagctccaggtcagcagacgttgctgtgagccttccctgtgtccgcttcggctgggtggggctgagcacattctccaagtggcgtgggcactgggcagctggcctcatgtgctgcaggccgcacaccaggtcttcaggagttgggccgggagcacggcattccttttttccttccctactctctcttttcctttctctttttctcctgttttctattgacttgttttttcccctgcatcttctctttctcttctccttttcttgttcactcgctttctgagtctgtctttggacacattcccacagtcatcacccggccaggccctgggctctggccacccacagcagtgcttcccccaatgaggtggcagaccagtgccgggcacgtgcagcagagtcagggtgctgggagggcactgccggccgccgcagagcaggcaggaagatcactggagtgtggcaggggaggtggcagctggattaaaatgttcaggacaggcaagagccaagagtgggcataaagagaagtccaggccgagggagcagcagagttcaggaggaggaaggagctccatgggagctgcacagcgtccagcctggcctggggctgcagggagggccatccaggccatggtgtgacatgatcactctgccgtcctggaggagctgtgtctccagcactgagaggccttcaccaagccctgggcagcatctcacagaatgaggccagctctgcattctctataccagagtctgtcacattggaacttacctgctgcaaggttttcctcccgggctggcatctcccctgaagccccctgtatctgtttccatcgctgtcccatctcactccctccatgtgttcagcagcttactttcagcttcccttccttgattgtaagtgccttgatggcaaggggcccctcttcacaagttagcagttgctggtctatagaagcttcttcgtagacatttgctgaatacattgctgtgctctggacagtgaggccaactttacctttccttaggaagtactaagttaggaaaatgagtgtgatccacatgggaggraggccatcctgatctttaaggcatgagattgatagccgggcctgggagcaggggcactgatttacggttttgactgcccccgctaactggctttggacctggggtcttgccttcatctccagtgcaccttagcatcctgtcccgaacgccgagccagtagaastagaggccacctctcagctccctgtggttctgagaccccaagaagcaggcagaaagcggttagggcattggccactgctttgtctttttgtgcctcctctttgtgcacagttgaggaactttgtttttttcctgaaaggattgcgggagatgccaacaagaagaccctggagccacgcgttgtcttcatcaaaaagtcccagctggagcttggggtgcacttgtgtggtgggaacctgcatggggtgtttgtggccgaggtggaggatgacagtcctgccaagggtcctgacggcctcgtgccaggggacctcatcctggaggtgagttctgagctgctgagcaggccaggcctccatctacctgcacagtgggcttgctgccatctcaggtggcaccaaagacggaggagtacagcctctcatctggtgagccagtcagggctgacttttgttgttgttgttgaggcagagtcttgctctgtcgcccaggctggagtgcactggcacaatctcagctcactgcaaccttcacttcccaggttcaagcgattctcctgcctcagccttccgagtagctgggactacaggcatgtgccacgatacccggctaatttttatattttcagtagagaccagtttcaccatgttgcccaggctggtctcaaactcctgacctcaagtgatctgcccgcctcggccttccaaactgctgtgattataggcatgagctaccgtgtccagcctcaggattgattttttttttttttgagacagagttttgcccttgttgcccaggctggagtgcagtggtgcaatctcaactcaccacaacctccgcctcccaggttcaagcgattctcctgcctcagcctcctgagtagctgagattacaggcatgcgccaacacgcccagctaatttatttttgtattttttgtagagacggggtttcatcatgttggccaggctggtctcaaactcctgacctcaggtgatccacccgcctyggcctcccaaagtacagggattacaggcgtgagccactgtgcctggccagggttgatttttaatccctgtaaacccagaatcctgccaagcccttctgaggaggtccctgtgaagccaggcaggccattgagggaacctgagggcagagccttggctcaggccctgggcatcaggkggtgctcgccctcaggtgatgtagctgcaggactctgttctgatgagagaggatggtctttctctgtggtctcctgcctcatgggggagatggtttgtgagaatataaaggcacaagttgggctgggtttggtggctcacacctgtgaattttaggaggccaaggtgggagaattagttgagcccaagagttcaagaccggcctgggcaacatagtgagaccctgtctttacagaaaacaaaacaaaaaaattagccaggtgtggtggagtgtgcctgttgtcccagctattctggaggctgaggtgggaggatcacttgagcctaagaggtataggctactgtgagctgtgattgcaccactgcactcagtctgtgtgacagagggagaccctgtttcagaaaataaataaataaaagcacaggcaacatcagcaagaggaaggtccctattctgaaaagcccagacttgccagtcaccagaacagggtttttcctggataagctgtcaagggcagggcagccacttggcagaggacctggtgtccagggagcatgcacaggacctggagactggggagaccatgaagactcagtccttcctgcagaggggaggtagccagagtctcagttaargagggatgttgaawttctgccgtatggtcagcastggcccctctcrggtgcccaagctgccccctggcttctgccttctgatgcatccacccccatccctggcagtatggcagcctggacgtgcggaacaagacagtggaggaagtctatgtggagatgctgaagcccagggatggcgtccgcctgaaggtgcagtaccgccctgaggagttcacgaaggccaagggcctgcctggtgacagcttctacatcaggtaccagtggctggggaatcggtgggagatttggaaccagaggagaggctttcactggagactcttttcctggtgaatggctctctgtttcttgccccccaaggctggggccatgatcatcattccttgacactcaatctgcacgcttatttatgttgagatgattgtgacttagaacaaccctttagggcttaaagaaccagctgggccccctctttagggcttaagacctagagaatttggaggcagtcaagccccgttttcctgtgtgctgtgctcctctttttctggtgtcccccaagccaggtttgcagatccctctgcagtgtgtgtggacttccaggcatcttcagtgcccttactactgtatgaaatgctgtgggcatttagggatggcagcaggctttctaggaggagctcagagctttcttcacatttcctaagatccaagatcrcagaaagcatgagaacactgatgcggtacaactccctgtctctagggtagaagatgacatatttccatcctagagagattccagtctgtaggaaccaggggccgggcctgggcttcgaggagggaggcaactgggaaaggccacctggaaagggaagttatggcctcagatcttggtgagttctttgatggggatgcgccctcagtgttaggggagcaaaggcagtctttgcccctttatgtaaaacacagggctccccactttgagaatcaccaccctcggcgattcctgatcaagtttggagacagcccaaagcagaatggcagccttaggggcctggccacagaaggcacctggttcgtccttggtggccagagccgcctgatcgtgttccttctgtgctgtggtccagggycctgtacgaccggctggcagatgtggagcaagagttgagctttaagaaggaygacatcctctacgtggatgacaccttaccccagggcacgttcgggtcctggatggcttggcagctggacgagaatgcccagaagatccagcgcgggcagattcccagcaaatatgtgtaagtgttctccgggcctggggtggggtggggcaggggtcgccgagggccaccagccatggagctgtcccatgggagggggctggggccagggctgctggaggagggrttctgcttcttatcttagcttctgctctctacattttgccamaagtgctggtctaaaaagctgctcctagtgtgagtcagtgctgtatagagcacagtgatgggtcagaaggcataacgtgttttagaaaaatggatttatggagatactcgtgccttgccgctccctcaaagtgtaccattcagtggttttcaacatattgataggtgtgtgcagccgccactacagttaattttagagcatttccrtcacctcaaacaaaccccagacccattagctgtcagccccttatcccactgtcctcccacccagccctcagccctaggcagccactactttacttttgatacccatgggtctccctgtctggacttctgtgtggttgggattgcatagtgtggcctttcatctggctcctgtcactgagcatgttttcgaggcagcctgcatccctgcatcatttcccttctatggcaggaagcgtaactcgtcatgtcaccaattgaaggctgtcctagcagttccttttgacaccgagctgaatatgctgtagtagaaaaaatcgcctgctctgagagcttgccctggtgctggtgtttgtgtcacccccgcagcatgtaccgagggttcccaggggcgtgggaggagatgtagccttgagacctgccaaggagtgtggggggagcccagtgtctggcccacctttgcttttctcaccaggaagggcaggaagggcagggcagcagggtctygatggccctgcccagcattgtcccctgtgccacaggatggaccaagaattctccaggaggctcagcatgtctgaagtcaaagatgacaatagcgccacaaagacgctgtcagcggctgcacgccgrtccttttttcggaggaaacacaagcacaaacgcagcgggtccaaggacgggaaagacctgctcgccttggatgccttttccagtgactccattccactctttgaaggcaagtggctgagctcattttccagtgggctctccagatggggcttgctgtggatccaggagctccacaacagggacttaaacaaaagagagtcttactttgcttttgtgcgcaagtctgaaggtgtgtgttcggcttggtcggggggtgctgccatcttcagagccacatctatggggtgtggcttccatcctcccagtcaccgcctgtcaatgcagctgcagccatcatgtccctgtttcaggcagcaggaggaaggaaggagtggtaaggcagaagtgtgcctcagctgagcgtgcctctttcagcagctatctggaagccctaacctgtgacttcaacttgcatctcattgtccacttgcatgtgcaagagaggtcaaaaaggcatgttttggccaggcacagtggctcacacgtttaatcccagcactttgggaggctgaggtgggtggatcacctgaggtcaggagttcaagaccagcctggccaacatggtgaaaccctgtctctattaaaaatacaaaaattagccaggtgtggtggcatgcacctgtaatcccagctacttgggaggctgaggcaggagaatcvcttgaacccaggaggcggaggtgcagtgagccaagatcacgccaccgtactccagcctgggtgacagagcaagatcctgtctcaaaaaataattaaaaagaaaaggcatgttttagctgggtgcattgctggcctcagtaagaggttcagttactgaggaagaatggagggatagctattgggtaggcaagaagcaatctctgctgagtgccttgcttgccatttgtttttaggttcttacaggctgcttggtagtgaccaagagctgtcggtttctgcagaacttcggcatttctggcctcrgtcctgtgttcatkaacaagtcttgtataatccttatggagcaagatgctagtccagggctggagttgagtgataggagatgtcagacatcccctggtagacagcccttgtggaaaggatgcatttgtcctttaaagcaagaggcccttaggaacgtggctcccagggccctggtgtgtgtctactgtctactgtcctagaatgtgccctccctggcaatcaggtgtgggggtggcagtgagcagcagagtgtagggcagctggctgcctccctccctctcttcgctttttacaatgaagaccttaggcctagggagttcagtggatcacactgtagttcatggcccactgtcactatcagctgggacaagggttggcaaactattggccatggaccgagtctggactactgcctatttttaaatggtctgtgagctgagcatgggtttttacacttcttaaaatgtaagatgtaaaaaagtctattagccctttgctgatawcaattgcttaattttgccgttttgccttcaaagcctaaaatatttactatcttgcccyttatagaaaaagtttaggccaggcatggtggcgcatgcctgtaatcccagcactttgggaagccgaggtgggtggatcacttgaggcagggagttcaagaccagcctggccaacatggtgaaaccccatctctactaaaaaatacaaaaattagcctggtgtggtggctcatgcctgtagttccagctaccgaagaggctgaggcaggaagatagcttcagcctgggaggtcaagagctgcagtgaactgtgatcacgccactgcactctagcccaggcaacagagtgagaacctgtctcaaaaaaaaaaaaaaaaaatgccaacctgttactcaaggcaaggtttctctcttattttgctttttgttttttttccttcactctctttggcctccactcttgtgccctctgctcctttctccgtaggtgccatctccattatgtttggcatttgtcyggtggtgctagtgtctttaaaaaatagccctttgtctattcttccttttagctcttcaggtgtttttcaatatatatcttgaagttgtcgttagatacatacaccttttgcattgttacaccttcctggtaaattaacctttttatcgttataaaatgcccttcttgatctccaggaatgtttcttkctgaaagtctattttacgtgatatttttattgacattaccagttttcttttggttatctttggcacagtttatctttttcttttacttcaaacttttctgtcactttatatttaaatatcccttataagcagcatgtgggactttttaaatccactgtggcaatctgtctttttaaaaattttatccaagtgtaacatacatacagcaatgcacacattcatttacagaaaagtgagcagtgtgaggaatttccacaatctgaacacccctgtggcagtcttgattgtttcatcaagagtatttacctcattacataaagtagacatttcccatcttactgtttgttttctattcattctacctcgtttatgtttgtcccttctttcttgctttttaaaaatgaatcatgtgttttgttttattctgcccctatatcatctactgttatcctctcacatccactagtgtttagttgtttctattttattcttttgggggttaaaatagacctcacagtgtgcacctttgacttactgctaagagaaatcattgctttggccacttccctgataattctaagacatcaaaccactaactccatttatytcttttctaactttgatactattcgcattttatttttttattattttattttttgaggcagaatctcgctctgtcgcccaggccggagtgcaatggtacgatctcggctcrctgcaacctctgcctcccaggttcaagcgattttcctgcctcagcctgccgagtagctgggattacaggtgcctgtcaccacatctggctaatttttgtatttttagtaaagacggggtttcaccatgttggccaggctggtcttgaaactcctgacctcaagtgagccrcctgtcttagcctcacaaagtgcaaggcactgcrcccgggattacaggcgcaaggcactgtccccggccatacttttctcattttaattctacagatactttaactctgactcagtctgtccatttgcacatcaattattcatcggtttttgccttttacatttccattgctctttattccttcctgcagttttgtgcttctgattttgttttctttctgctgaacaacttgcagaaatgtttttcttgtagtgcaggttttttggtgacacatcctgtcagtgtttgtgtctgaaaatgtccattttaatatcgtttttggagattctcactggatatagaattttagattggtggatgttttacttgggtgctttaaagatatcattcctggtccctggctctctttgtgtagtagtttcctgtggccgctgtacccaattaccacagactgtgtggcttcaaacacacaggtttatcctcccacagttctggaggccagaagtccacactcaggaccactgggtcagtcaaattgttggccaaccttcgctccctccgggcttgaggagagagcctgttccttgcccctcccagcttctggtggctgctgccaagcctttgctgtggccacatcactgtcatcttcaaatctcatctgctccatcttcacgtcacctcgtcctccacgtgggtctctctctcaactccctctgcctctcagaggacccgtggggttttatttaggacccacccagatactccaggaaaagcccttcctcccaaggcctttaactgaatcatcgcttcttttgttgcataaggtgtaatgctcatgggatctggggcttaggacatgagtcagtctttgggggacacttgtcagcctgccacactcattgctggtgagaagtcatctttccaggctcagtgctgaaggcagtgccaccacccgtccaccaccatgagtgggtagggttttctctgccttcctttctcagaaagaaacttcttaatttcttaccacaccgtgcttcccccrtgtggttttctttgtgttyatcctgctcagaaggtgcttagcactttttacatctgtagtttggtggtgtggtcggttttggagattcctggccgcagtttctttcatattgcttctgtgctgaccttgcctctcctcggggtttttgttcttcgacaataccctgtctgtctcctgtcttctgggctctttttctcctgcattttccactctytctttctctccatgattcagccagcctggttgttttctactcttttttcctgttcattattccactcttctgttgcatccattatgttcttactttcagaagttgtattttatttatcactctagagtttccacttggttcttttttaccaggctttaattctctgctgagactttccctcttgtcatctgtcctcttaaatacttgaatcatatgtttgtaaagactgcgtttggtaactgtcatgtgtggtcatccctgagtctctttctgtggtctttgtttttcttggtcctgccccatgatatgcctrgttattgtttattgagatgtcagaagttatgtttaggggattttcagggctccgagtgatgttgccagcttccagagagggtctgccctctgctctggagatagccgctgctcgcagatcactttgatccagccacagactcagctgacctcaggctgggttgcagcttttgtgcagctggtggttcacctgaccctagggggtggcccaccagtggtcccagcctggggtgttccctagggccgctcttccctagggagccttgacttccagtttctcactcttcagcactgggaggccatggaacactgctcagtgtcttagtgactgtcttagatgcttagcttcttgcttttcacagcttaagaatttggcaaatggctttaagggaaaacctgtgataccagacttagttctttgcccttcccttcctctggaataatgacccaccaggtcctggcagccctgaactccgttttgatctcacctgctttggagattttcagaaacttttcgtgggttctcagccctcagcggcggccccrtgcctgggttctcagcccctcagcggcggccccgtgcctgggttctcagcccctcagsggcggccccgtgcctgggttctcagcccctcagcggcggccctctgcctgggttctctgcccctcactctcactttagaagtctccagttgctctgaagggggaaaggcctgcagaatgtcagcttctaatactccagtttccttctctccaggatcttggcatctcaaattctgtcttgtctctgccactctacgatgccttcaaaaagatatttctcattttttacccagattttctaggtgttctccaagggatgctgcaagctgttccattatacctgggagtggtaatccctgtgtagtagtttaaaagttaccccagctaattctaatgcacagtgggttttgaattcctgctttagtttattgcttccaactgctgcatagcatccctggtaccccccaccctgctgattgtgcacccacctgcaatggtctaagtggactcaactctccaccacccagaggacactgcatgtctttatgcttgctcttttaggggcttgtgcgggagtgtctcaggaatatatggaggactggktttcctcttatgttagtctgctagggctgctgtaaccaaataccacaggccaggcacggtagctcacacctgtaatcccagcactttgggaagctgaggcaagaggatcgcttgaggccaggagtttgagaccagcctgggcaacatggcaagactcccatctctacaaaaactttaaaaaactaatcaagtgtggtggcgtgtgcctgtagtcccggctactcaggaggctgaggctggaggatcacctaagcccaggagtacagtgctgcgatgagctatgattgtgccactccacttcagcctggcaacaaagcaagagcatatmtcaaaaacaaaaacaaaccaaaaaaccaataccacagactaggtgacttaaataacaagaattcattttctcacagttcttgaggttggaaatccgagatctgggtgccagtgtggttggttctggtgagggctgtcatcctgccttgtacgcagctgcctccttgctgtgtcctcacatgttggagacagagagatctctggtgtctcttcctcttaaaaagccgcagttctatcagattagggccttgctcttctgacctcatttaacttayctcctgaagactccgtctccaaaggtagtcacactggggcttagggcttcaacatataaatgtcgaggggacatagttcagtccacagcaccttttaaagaaagccattgccgtatggtctaaggttggaacccccaggaccatgcctttgctctgccctgattagctgtgaccttggataggctgtttttcttctccagttggagtcagtgactcataagatgctgtctagtcttacaattctgtaattgtgaggacatctgacaaagaagattgtcagggaggaaaaagaatctcctaaattggtaccccatagtgtggaatgttagtaatcattaagggagaatatggttttttttaaccattaacattttaatgtatttcttaccagttttttacttaatacaacaaagctgggattacactgcattacactgttttcatccaggtatttccactatcatattgttagcatcttcccatctcagtaatattcttccaaaccattcttttaagcactatattgaattccaccctatagcaactgtgccataatttgagaatatgattcttatactagtaaatggagggaatggtgacgtagygtccatcagcagggaagtggataagtcgatccagaataagtgttaatgggatgcccaaaaggagcagagcggcccacgacgaatcaccagggatgcctcccagaaacacagccccggacaaggagcgagttataaagtatccacagacacacttaaacaatatatattctaggtttyctttagcatataaaaatcagtttataagaagaactaggatacacttccagctcataatagtggttaccttcaaggagcccagtggggactgaggttggggaaggggtatcagagaggagtgctggccttatccgtgaggttcagatttgttacagagaggatttgtttatgtaaactcctctcggaggaagttctttgccccgtgactcctcctcagagccttcactcgggaccacatggggttccaaggtggtgaatgtgaccaccaaaccctcctccagttttaaacaacagagctgctggtcaccaggttaggaagtgctgtgtaaaagactgtgtggatgtatgtggataatgatcagttttattattttatttatttttattgagatctagtcttgctctgttgcccaggctggagtacagtggtgcagtctcggctcactgcaacctccgcctcctgggttcaagtgattgttgtgcttcagcttcctgagtagctgggattacaggtgtscgccagcacacccggctaatttttgtatttttagtagagaaggggtcttgccttattggccaggctggtctcaaactcttgacctcaagcgatccacctgcctcagcctcccaaagtgctgggattacagacgtgagccaccatgcccagcagtgatcacttctaaaaaacacacacacagggacagggcaagaggagaggagagactttacttactccctgagtttgcccacaggttgctcttcatggagcctgctgctgcagctggcactgtgcttgtgttctcctgagccttctgcctcctggtccctgtgcctgctctgcagtcactccttgttctgcatatgcgtacagatccctccaggccaagcctctcatggacccttcctcccaagcctgcagtcatcttgtgctctgccctccccatcatctccatactcatcctcttgcyctgctctttctggagactctcatcccacttccctcctgggcctgcccaagtggtcttttcaccctgtcatccagccacagtgtctactgaagcccgccgctcctggaattgccaggcagctcttgcrtgctctcttgctgttcatgtgttgctctgttgtgactctagttaaagtgtgtgctttttaatggcaggaactctgtgttctattctttattatgtttctgagattccagcacagtgacttataccagggagacgccaggaagatcttgctgggttttagactgtgtctccctgcaaggactttattcatttggtgcaaggggaggtttactgcatgtatcaactaggatattggtttgactgctttaactgaaaccaaataacagtggcttaagcataatgggcagtttatttctctgtcatgtacaagtctgagctgtggttgatgtgggagaggcattgcgttctgaggatcatccaggacccaggtcccttccatcttgtgcctctgccatttcttaagggttatcctcaactgcatggccagagctggctcacagcactcacctgttctagccgtgcagattggggaggcctcacctgtcactgggcaggtctgggttacactgaccacaccttcctggggagtgggagctttacctgccaaaccccagrggctgccttgccagagagcagaggagaatggagatggggcaggggaagcaggcgtcgacccacgaggaaaaatcagagcagaaggaagctctgggatgagtggttgagaccagctgcctctggtgttcacagagggcatggggggtgctcatgctggactccaggggtgacgatgcccggttgtgcctgggacacgagattttcagtgctgaagctgggggagtcccaggcaaaccagagtgggcgaggtcagggagcggggttccccagccccactcaggtcctccactccaagctgggtccgtgacgctgctgctctctctccctcagattcggtgagcctggcctatcagcgggtccagaaggtggactgcaccgctctgaggcctgtcctgattctggggcctttgctggacgtggtgaaggagatgctggtgaatgaggctcctggcaagttctgcagatgtccccttggtaaggggcacggggcaccctctgtgcctactgggctctttgtctctatgtccctgtccacctgcctgcccagctgtgcacagtgggtggcagtaccggggggcagatttcacagtgttccagaagcctgctgacatgggtcagattcatgcatggcaggactgggttactgacagctgmtgagcagtgttcttcccctgctccctctgctggggctcagcagggcctggggctccctgattcctgtgtctgtgcattgcagaggtgatgaaggcctcccagcaggccattgagcggggtgtcaaagattgcctgtttgtcgactataagcggagaagcggccatttcgatgtgaccactgtggcgtcaataaaggagatcacagaaaaggtacccagggcttcagtctgaggattaggcatccagtattagacctcctgtgcacaggtctaggcccctggtccgtgatcctctgccccagcggctcagaccttcagtgagcccaccgtgttgtgttagtctgagttcacctgtgcctgggcttgccctcatggctgctgtgtgtttctgcaagcacatcccttggtggggatggaggagttcccctgtgtatgtgccgccccatcttcctctctggcaggtgcggggggtctcatctctgatgagagtattgagctctgcggaaaggcctctcgcagggcattcyggaacggggtccccaaatgcatgtgccgaacaatttcacatgcaccttctggggacaggaacgtgccttccctcagggtccctgcccctaaaagggctatgactctcggtgccttcgaacatcctaggcagcacgagggcggggacgtctgtggggagtgctggtggggcaaacactcggagtccaaggacacagccgctccttgggctccatttctccaggctgctcagctcgctcgctgggctttgcttcccttctctgttagatgaaggtgttggcttctcactgctgaaagtgggcaaactctacttgggggaatgccccagtggagcatctgggggtcgggagtgcacgggcctgcactccacctggatgcctgggaygacagacatgacagacatatttcagtctcagccacacaaaggctcaccagactctggctcttcattcgctcagtctggcaaaaataaggcttcagaggccagggtggggcagggctttcagaaggtccctgtatctgggcaaaggcgggaaaggaagtttggagttgggctggccagcacccctagccccctaagccctggctcccagccttggccttcctcacagcaagtggggtttgttgggagtttcgtgggtatggtttccccacggtgtactgtgtggctttactgccttgtttgtgggtagagccctgtgaggtgaggtgggtcctgctggtggcaggacagggggctggctgcccctcactgcccgccagggctcactctgcaccccccaccccagaaccgacactgcctcctggacattgctccgcacgctattgagcggctccaccacatgcacatctaccccattgtcatcttcatccactacaagagcgccaagcacatcaagtaggtaactggccccctgggctccgctggggccttgtcacaggtggggctgggagcccaagtagggagcagggtgtgttggggtggggggttgaggaatgagagatgggcctatgggtcttgaaataggcagtacgtgtagaaaatgacccttccctgtcggccctgtcccctactcagaggtggtgtcagccaagcgcagccccttcctcgcgcccctccgccatttgggtgctgccactgttttttgggcatggccagcttggtctgcacagctcccctctcctgccccagccccctttcctcgctacgtgctgcttaggagcaggggagccagtggcctgggcacagtcccactcagccccgagctggctcatgactcaggagccgttgccttcgctgagcttcggctcytgtgctggttgggccaagggctcaccaaggccctgctccattttgcctttctgtgctgctgagcttctgggacctgcgctaggggctgctggtgcatctgttccaagtgtgtgtgctggggggccctccttcccccatctgcccagagctcccccgacagcctacaggctgttgctgtgctttatgtggggagcacatggggcctccctccacagcctacccctgccttgatggggcccctgttagcctggacagaggaaggaaagagggcctggaggaggctcagtgctcagcctggtgtctggctgtccccacagggagcagagagaccccatctacctgagggacaaggtgactcagaggcattccaaagagcartttgaggcggcgcagaagcttgagcaggagtacagcaggtacttcacaggtaggtgtgcgtgggcctggagtggggagcaggcagcagggaaggaagcagaggcttcctaaggctgttttcttagcygtggagaagcccgcrctttctacatgctcccaagtgctgtcatgagcacgttcctgacaagtcaggtgttcagattgcagtccctggccaacgtcaggattcttacaggttgaatgttaagctcacygatcttggcctcaggtcctgcctggcttgcctgctcattttcacacgtgcagtggtgggtctgtctcatagcacaggtgcagtttagtgcagccacagtgtccccaggcagggcggggactggagcagcccccagtgtgccagcagtgtgggcagcggaggctaggggcccatctgtccctagcaccctccagggcagtcccgttttgcagcgggatttggcaaacccccctccaaaaaaaaaaaacaaaaaacaaaacaaaaaaaaacaatgctgtccccttaccatctctggtcttcaaagtgaaacaaactcagtgaagtktggttctattttaccttctggccttcagcctctttgggaaagtctgtcatttgcagggcattagcatttgcagtcacagaggatgggacagggattctaactgcattgtggagagtgttatgatctagtccagggacctgggcttggtgcccatgtgtgtgtaggtatgtgcaggtgtgcatgcctctgtgtgtgtgtgtgtgtgggtgtgtgtgtgaactttcatttccaattcctcacagactggtatttagccaaatacactgacaattcctagagagatgaaaatttaaaactctaagtcttgcaaaaggtaagctctatttttttcttgttagattcaacagacataaaattacgacgtcctgtttccatagcagtttctagacactcactgtcaatttctgagcatgccttgttgcagtaggggcttggtttgtgtccaggtgctgttatgtggagcacactggagtacccctggcctggtgtctatagacccctttgtcaaactcctatagtacagggctggcccaagttggcgycatcatctttctgtgaytctcctcttggccatgagctatctggctccttaaacttgtcgtttcctgcagaatcctgctaatgattagaccaccgccacatgtcctccaaacttccttctgatgccctgggattcccccaaccattgcaaacccaacccagggtgttaactgcagtggggtgggcagtttacatatgagtgatcaactcaagaggggcaattttctttcccagtttcttgctggtgaaggagagtcaggtggggatggagcagagtgccaaggagcacaaagcagacagccacacagtagaaagagtgcaagctgtactgccttgcctcaaacctggggtcttactctgagctgaatgacgtgtctggggggctcttttgcaggggtcatccagggaggagccctgtcaagcatttgcactcagatcttggcaatggtcaatcaagaacaaaataaagtcctgtggattccagcctgcccgctctaggagaatgctgtgctgtggatgactgcagctggccgcctgaggggacrccagactcagctcttttctagcgactgaaagtagaagtctgtcygtctatgaacatgcrggggaaggatccggaaccaggacccagaagcacctcctttgtagacagagggccacggctgcgtgcgatccaggcccaggmccacacactctgcccgtgtcacacgtgtgctttaacacaaaacagataacactaaagacgggttcagcacccacctttctttagccagctgatcagagatgctgcaaagagaacctttcggatcactcgtttacaagccttttctaagtatttggtggtttatgtttacttgaacggctccatgttgccggtgcccagcccctgtcccctctgtcaaccccctgtcgctttggtgttggtttcgttcccgtcttcagcaaaacgaccttggaacctcaatgggggctgctttgctttgggaggttcttgttggtgggaccagagctttgacaaacctcctgctccttggtggcacctctcctggaaggacrtcacaactccaggtgctcagactgcctgtggcagcagaaccagtgcctttggcattttcctcccacaatggggaaggtgactttggcattcttacaaactcgtctctcggcctttctctcctgccttccacagcctctcgtttctcctccatctgtgcttattacttgaggactgtgtctgctccgtgagagctgcgtgggcagggctgcagtggggtccaggtggtgttcagctgtgctgatgcctgccattgggtcctccttaggctctgtaagtcgtgacagccttcatcagtgcaatgtttgcagggtaattcttaaactttttagagggtggcaggtacatcagttctttttgatatgaaaacattcatgtttcagacattgaattgagagcttttaggggaagcataatggttattgtcactatcaacagtctaaaaagaaaaactgaggtctttttaatcttgattacagcactcacggcatgcaccctactcagtgtgggtgtcttcgtttgggggctttttttttttttgcacttctgaggctagatatgtctggctgaagatttgatgtggttcctccttaagctatgcgtcctgttaataataggtactgtactgggctctgtgtaagtgtcgttggggtaggacctatattttaatactgttcctaacatttcattttactagcgagaaatctttgatttcattttattctttgtaattctagacactagattgtagtttagccataactgatgttttttaaaaagggatatattttcttgcacagttgttcaaaaaagagacaagtttcagtcctcaatgctgtcctttgttttacaggtacaagttttctagctcagacaaactatgaaaaactgtagactattctcaaggtattaactcgcagaccctctgggggtaggggctgttttytaagttacaggcagagtgggactgagatggtacagtgtgcacaracaggtactgagctgacagactggrattttctgtactaaaatgttactttgtatcaaaagttaaacaggctttagtacaacaaataaaggtcaatttctgtaaggctatgtttgaagatgtgagtttttaatctcttcctagtcagtcagctttcctgtatttctaaacttgagacagcttctcctctgcagcacgtagctggagttggctgatgtgtaggttctttctgtctcacatgacaatttgcagtccctgctacccgctgcatcagcctctctctcactccttcctgcccttccctgccacccatctgtccagtgtggcatgaactggtgactgcagccaggctgcccatctgtgtgagacccagattctgccctctggccctcacattcaattctgcaggcttgggaaaagcaaaagggagtgagctgagtgctctgggtagcattctcagtcagggccctgtctggggcccttggctgggaatggccccacctgcttgggggctgctttgtagtacctgacagcatcacactgggagatcacccagcattgctggactcccagaacagcccacgtgggcctgaactccgtgttgcaaggtgatgaggaagttgggaggctgggcctttagctgcaggaagccaggttgaggcctggggcagagcagagccctccttctctgatcctttttcttggaggggcttgggggcagaatgttctccagaagcttcagtcacactccactggtggccaggctggtgggggcagactgatgtggatgcctccctcatcatttcctgctgggtgaagttccactgtggccctgcagtcttgatctcacctgtggccacggggtgtcacagagctgtgcggggctctggtagttggagtgggcccttgtgtccatagggacagggcctgcctctgtctccttgacagcccacaccctgcgccatcctcagaatgggcagcagagccgttgatatattttttttttgagacggagtttcgctctcgttgcccagtctggagtgcagtggcatgctctcagctcactgcagcctctacctgctgggttcaagtgattctcctgccttagcctcctgagtagctgggattacaggcgtgcgccaccacacctggctaattttgtatttttagtagagacggggtttctccatgttggtcaggccggtctcaaactcccgacctcaggtgatctgcctgcctcggcctcccaaagtgctgggattacaggcatgagccaccactcccggcctaacacgatggattttaagtcactgactgggcagatgggggtgtaggggttggggtggtggctgctggttttagggctggtttctttcacagagctcaggtgtgatgccaaaccttcacagttacacttaggccatcgtgattttattttcttctttagatttttctgtaatttccagattttctacaggtaccttggttttcttttataattacaagggggggaaaatcctatgtctttttcaggtggaaggcacttaagtcactgagatcgctctttctggacacacgggccttgcagggcagccccgagacatgctgtcaagcagccctgaaaggatttgtaccctggtgggttagaggcttatttaccccacatggagaccgtgctggggggcggggttgtgggcacagccaaatgggcctcctcctggaggtggtgtctgtctcacactggctcagatcattctggaaaggcagagcagattcttcaactccagccatgagaccaagaaattgaatatgagatgacttctgcggccccttcccatgctaacagctatgattctgtgatatgggtgggcaacaggactcaaatggagcttgactttgctcctggcctagcagagactgtgggaaaccccagcttcaaggcaggaggagacctcatgcttaggcgccgaccctgagcagctctggagtagaagccgagcaccggccagaagcctcaggcctttctttccagccaagacaaagctttgaggctcaacagcagtgggctaaccagaggcttggggaagccgagctgccacctcctgtggggttgatgagacacagggccacaagggtcatgatgtcaaagatgaagagaaacgtgaagtacaggaagggatgcagagtgaacataaaccgcagacaagggtgcacgtgctggcgtgggaacggtggacctctcagcagatgggggctccagggtgggtgggccttctgtactgcccccttctgctacttttctggcctgtgggttccctcacccttctcttgtccgtccatactctttcatttgctctccctttgtagaatatagtctctggcctcctaatggttcccctttagttctccctattactatgtgtttttatctctttttctccccaactgtgaaagatgtcatccatagagaagagcatatccaatataagtgtatagttttgttattaagtagagatgggatcttgctatgttgcccaggctggttttgaactcctgggctcaaacagtcctcccaccctagcctccccaagtgctgggattacaggcatgagccactgtgcctggccataaatgtatagtttaaagagtaaaatggatagtgtttccatctttaaggaacagaacactaccaactaccttagaagcactcatatgtcttcacccggttgaatgccccaccctctctaccaaagtaagtgctagcctgacctgtagtgaataatttccttgctcttcacatactgttcatttttaaaaacattgagcatcaagcacagattagctgtgtggggaaagcacagtgtttccaatgttgaatgaagtctgctggagaacataatgtgatctcaaggtcagagtggacttcagcttctccaagaatttacaaggggcccttctggggaagccagggagcagcaaggcttgaatgagtcctgggcgtagcagggctgccaccatcagggcccgtggccacactatccatggaccagaccctgatcatctggcaagaatgtggatggagggtgccggctgctgagttctgtttttgtagtccccacagctgaccttttgatttcgggaggacgtcaaagccgagcgctgctgtgggatggagtgaggatcttcagctgatctggagggcaggaagcttctccatcatgtcaaggtaagccgagtagaaagaatgtgaatgggatcgcccgggtgacctgtcctcagctgagctgcgggaagcccgcagggatcttggtgctgagggctcctgatgtgtctgtcctgaatccttgctccaggccagaatcactgccctcggggtctggtgccagctctcatcttgacacctctcctctattttgctgagaatctcctgggaatgttgacttcttttgattttcctgtcctcctctccttcgatggatctgtttcctgtgaggaaacacttgaggagaaaggcttagcctcggatctgaattcttaatccacaggagggtcactgggtttatcttctcctatgcatcatcttcttgaacagggctggatgaagtaaaaactagcaaagtctggccgggcgcggtggctcacgcctgtaatcccagcactttgggaggctgaggctggcggatcacaaggtcaggagatcgagactatcctgattaacacggtgcaaccctgtctctactaaaaatccaaaaatttgaccgggtgtggtggcaggcacctatagtcccagctactcgggaggctgaggcaggagaatggcgtgaacctgggaggcggagcttgcagtgagccgagatcgtgcactgcactccagcctgggcaacagagcgagactccatctcagaaacaaaaacaaaaaacaaagaaactagcaaaatctgtgttcatccttgtgtgtggattgatatgtatgggttgggaggctggaggctggggtggacacgcagacccagagagccaaaacagcaagggccgtgagcacctgctgcaggccacttccctgttctttctggagcttcagttatttatgtgttggggatcctggacagttccctcattttctcttctcttctctttttcttttcttttctttttttttttttttttgagacagaatcttattctgtcacccaggctggagtgcagaggtgcaatcatagctcactgtagcctccaactcctgggctcaagcgatcttcccgcctcagcctcccaagtagctaggactacaggtacacgccaccaagcccagccaatttttaaattttttgtagaaatgggtctcactgtgttgtccaggctgatctcaaactcctggcctcatgattctcccatcttggcctcccaaagtgttgggattacaggcgtgagcccctggatctggccagctccctcattttttggttactccagtgtcgttttgtcattttactcttattttgtggcgattcactcaactttcatccttcagtcccttctcttgagtttttcagttttgctaacaagttcttaatttccaagaactcttttatatcttcctgtacttgtttcatgaatacaatatcttatctgaggatagtattttttttcttcatcccacgtaattccatttcctctaaggttgtttttttttttttgtttgtttgtttgtttgtttgtttgtttgtttttgccttggtcttggttttgcacattagaggttttaacttcaggtgtcaggtaatcactgggtgtcgactgatgaagcctgggaaatgtaaaagtccagatcaaatgggtgagagtgcggtcttttgagtcttttgagtttcactgtaggatggtctggctgggctgttcactggggaagcacagcagtgctctctttaggtcttcagagatttgccagattaccccaaggggcccttcctatgtgatgggaaggatcggcctggccgcatcttggagcccagtaggggaagaaggctaggactctttgcactcagcgttcagcatgacagcatatggtcacttcatccttttgttttcagtgtggcgcccattctctggatccatgctggcatcccctagttccaaacctcacttatactctctagagaataacctcctagcttcggccatgttgaggaaaaggctgtagctctgtagtttggaaactaggaatgggtttctcacccagcttttacccattccatacttaagcctcccctccaccccaacttccatggggtaacaacgccacagttctgtgtatttaaagattcttagcattttcttctgctggttttgggtgtggtattctcaggtctgctaaggaatttgccactggtctctctccttttcaacttctaaaatgattttgtggttgttgcccctctgctttccctgtatttctaaattaatgtccttttaaaagaaattcttttactatatttactgttttgtagtaggattttaatagaggagcaaaattaagtttatgtatcaatctgtgatttcttaaccccaaagtaaggtttttctttgctattattttactgtcatttattggagtcttgaatggcctaaaatgtataccttattccttctaacagcagcatccccttctaatttttgggtgtgttggccaggctttaattagagaggaagaaccagtgtatttcatatatatacaaatttgttaaaggaattggcttgcaagattgtgggtgctggctaagcaagtccagaatcagggaggtcatgggcacagaccacaactgttgtctatgggcagtcaggagggaagtgaatgagcagaatggaactccacaggcacaagtacagcagacgccactgcctgtgggtggaatttcttttctttttcagggaagcttcaacttttaaggcctttttaggcttctgcttttaaagcttttcaactgattgaatcgggctcacccagatctttcaggatactcttttttttttttttgagacggagtctcgctctgttgctcaggctggagtgcagagatttggctcactgcaagctctgcctccca

SEQ ID NO: 6824 - DNA, 325446 bp, Homo sapiens
  misc_feature (1)...(325446): n = A,T,C or G, or insertion/deletion polymorphism (see Tables 1-2)
atttttaattatatttacataaagatgagtgattatttaactcattttaaaattccattctaattttaaacatgcattctccttagatagttataaaggaaaagagcagtaggtgatcaattactcagggtagattttcaattagtaaattatctgtgttctttgtttctattttcccttctattaactgcctaattttagacatttggctgcttattagaatttcctccaaaatgataaggtagcttaaaacactccattaatacttagaaaccttggtagatttcatgcaaaagagcatcacatttatagatcaaggaagtttctacgctgtatataaattttgccctggaatccttctgtcacatatataaaaagtagcagtttgggtgctattataacacttacaggtaagtaaaactaactttaaaatgtagaggtgttgaaatataacaaagaaataggctatacttatattttcctttctatcaacaaccttcatagtttttctcaataatacactctagcttaaaaatgcaaatcatccttaatttctaacattttagactggcctgtacatcagtagctgctgtaaacctgaactatttgctcatgaagtcaataagagctcagcctttgactgtttatcagcaatttattgggcaggcactgcattttaagtggcagcattaaaaaaaaaaaaggcagatgatacatctaaaaatgcaaggtttctgcattttttccctgactatatgtgaaataataagtattaataaggtccatgttggcaaaatgtttacttttttaaatcttaagttaatcccctattgttgttaattggcacagttggagactatgtcataaatcgtgatgtgagctatgacatcttagtcactcatatttaggtatctcctaatttctcagcttacatattactgaaatgcagctttacattgctttatccctaagcctaccagaaaactgctaaggattgtagacatttcatcaggtaatcaatacaaagttttcaaaactttgacaattacctatttctctaatagatgagtaatttaagtattgatataggcccgcactgctaacaatgttttggtcaatgacaaaccacatataccacagtggtcccatatgattataatatggtactttgtgccctttctatgtttagatacacaaagatttaccattgtgttacagttgcctagagtatttaatacagtaacatgctgtacacgtttgtagcctaggggcaataggctataccatataaccgaggtgtgtagtaggtcacacatctggtttgtgtcagtatactctgtgatgttcacatgatgaaatcacctgatgacgcattacccaatctcaggtattctttcatagcaacagtaaacagactaagacaagcttccaccatgtgccaggcactattctggtaattggagatacacagcaaacaagacagctattcagagtccttgttcacatggcactaacaccctagtgaacagagataaatgataagtgagaaaacaaataaacgaacaagaccattttgtatagtgataagtgctataaatacaatgaaacagggtagtatgatagtgaaagaaaaagtgtgtatgtgtacatggggtgtccaaaaatttttgataagattcttggaaaaaaagcctttctaaaataaagtaacatttgaggttagacttgatggagcacaaggggccagctatgtgaaaatctctggataccaaggccctgaacagggtttcccatttcacatgtatgaagaacacaaaggtggcctgaggtattagagatgcattctccattcctttagacactagccaagtgaatgtattaaaatttaaattaaaataaaatacaaaagttcagctcctcagtgacaccaaccatggttcaagtattcaatggccacatgtggttagtggcaaccatgttggacagcagagggtctatttgtcattgaagaaagttctaataaatagtacttcaccagtgaagtaggagcattggaataggaggagaggtcagagagaattacttggaaagatcatgaaggtccttgtaggactgtcatgaggactgtgatgaggactgcattctgcaagtacgatgggtagcctttgggtagttttaaataggggagggacataattcaatttatatttttaaagtgttactctgctatatagaaaatgaattataagtagggcaagatcagttagttactgcacttgtcctggccaaggaagatgatgggtctttggcaggttattataagagggacagtgaaaagtaaatggatttagaatatattttagagacaggatcaagtggatttcctaatcgactaaaagtaaracaagataaacaaaggaaagaatcaagacccgttccctcttctggggcctgagcaactaggtagatggttatgttctttactgggatgtaacaagattgagaaaatatagtttgggtgggtaggggataggtaggaagggaattgtaagttaagaattttgttttggataccttatgttttaggtacctattagatataaatatataataatcagataggtagcagagaatgattgaacccatactacggaacgtaaacttactgaattttacaatagaatcccctgacgcttaactatatttaataaagctcaaatgtgaagggttagatccttttcccaaaaaactgtaaaaacatgtttgctagatttgactaagtggaagatttatcaagtaaaacttaaatttttatttctgttgtccatgctctactatttttctgcacgtacaacattttccttattctttggctgtgttgtcactttcttgaactaggactcaccactatctgtagaaaagaggcagtgtttatatgtgattgctccctatccagtttatgtattgcagcttatttcatttaatatactctgttaaaggtacattattagtcgcttctttcagttagtatagccctgcaggtttctgcatctctctaacattagcattttgttgtctttgttcacttgcctctgggttctggatggtatggggagaaaaatctaccttctttccttttgatgggacaaataactttttgattatgatttgttaaagaaacctggatgccaggacattgcctccttattttattgaagagttccaggatgttattaacacatggatttagaatattcttgttttgctgccattagcaaatgccattttttcctgttacaacttttaaaaaacatctgcttcccataccttaagtgttcagtttttatgataatattatattaaattttctaaagaactgagataattgtgggggtaggggacagataaaattgaaatattctaaaatttcccttactatgcttttctttttaaccttgatatatgccagatttttggtttattattttaatatgttatttttgatgccaacagatatgaatgattttccaatcaaggtttttcactccgatgtgtcccaggtaggatctggcatatgaatcatatgtctaaaaaggaaactcatgaaagtatgtgtgcgtgctagggggctcatttgtctttggcaaagacattgctgctcctgtttccttaattattaaacagatggtgcccactgccattgactagctgcccaactcatactcctgtgtggtagcacaattctggacatctgacagagagaagctatacctttatagtttctcatatctacttatgtcataatattaatatctgccttctactagaacaggctgcttcccatgaagctgtttaaaacttaagtcatcttctccccctgtccccataaattaattttatctcaaggatctccttttggctttttttattgcttcatgtctacatacaaaatacagtggcatattgaatcaattatctaaatgctctaggctgtaaatacactttaacctggaatgtcaagataattaagacaaaattggattattaagattattattagtgagggcaaatgacatctaagatagccatgttaaaagtggagtatcatattaaaaagacaactagatcccagggaacatcaatagagtttaagtccattgaacagatactgaattctttttcataatctgccaaaaaaaggttagcttgaaaattttcttttagtttctcaaatatcacactgctgcagtacacgaacctttactcattaataactaaggtcctgatttttttcatatgctttgctcgaagatgtagtattttgcagccatagacagtcttctaagatctctcctagtgttaacccacctatcctcacctctcccttgagatttttctttattttttgatgaactatctgggcttttaaactttgttaaccttttttgaggatacggtcacttaatctcaatgtaattttactttccacagtcaaaaactattgtgtaatactcatgcactggatttaaatgactgctgcctctccttcctttctttttatactattgtggtctaggtaaggctgattcttccatcatttgaaccaacaggccaggcttgggttctcataaagcagaccttccagcaggagcgaccaaaggatgacactgtcacctgaaattggactgctgttgtacctgacttgggaacatctttgaatcagacagtagaagtggctgtcattttcagggacagtagaaagtatgttggctctcatctgccaagtaggcaaacacaatcttttttttttttttttccttccaacgttctagggagctcagcctcagggctagccgcagccccccacaccccggggctgcggtgggctgcgcggtggatcagcctcagcagcccctgctccagcctgtagggtgaaccggccgctttcccagcaaaggagcaatcgagctgagggtagcgcctcctccgcaggagggggcgggagctcggctgagaaagctttcctagggagttgccttaaagaaagaaagcggaattgtcgatcactccagttgccagttttatacaattttaagcagtcgtcgccactcgtttcccctttgcaaaactgcaaatcaccaccaaccttgcatcaaatagaagtggggagggaaaaaaaaagcaaatctccttctcccttctcaccctccctttcttctcaccctcccttcctctcttactcgctccttctccctccctcccttctgcggctgccgctagtctctcggtctggctctctctccgacgggacttagcaacttcttatttctcagccccttgtccatttttttttttccatcctttgccatgaattggattgacagaggcgggggaggctttgctttctgccccagggaatggcgattcgcgtcctggggccgtgccggggagaatcggcagaggagaaagaaagagtgatagaaaaagagctgcaggaaggaggagaagggagacctccatctgccgcgggcccggcgcgctgcagcgcagcgcagcgccgagctgcgcctcggaatggcccggagcccgccctgcgcccccggctcctccagcgtcagcggctcctgcgcgcgggatgcattgggcaatttttgaaatcctgaagtaggaagagaccccggaggatataagtcgggggtgggggtggagcagagaatctgtgaaagatattcaaagagagaaaaggggaatcctgatcgtttctgcccgtgcttgttttcaacttgagcgtgctagcctttaacttgaagaagtctcattggagcatctagcattctccaggagttattcgaaagctgaaactttcagtggattgtgggcctggggagaagaaggattccgagggtggaattgggaagabcgtgcgtgcgtktgtgtgtgtgtgtgtgygcgcgcgcgcgtgggtcggggcgggggcgtcggggggccactgggaattcagtgaagagggcaccctataccatggcagtgcccggcgacgctgcacgagtcaggracaagcccgtccacagtggggtgagtcaagcccccacggcgggccgggactgccaccatcgtgcggaccccgcatcgccgcgggactcgggctgccgtggctgctggggagacctggtgctgcagccgctccggagctctcggaaactttcctcygcgctgtgcgcgggctccctgtcctttctgctggcgctgctggtgaggctggtccgcggggaggtcggctgtgacctggagcagtgtaaggaggcggcggcggcggaggaggaggaagcagccccgggagcagaagggggcgtcttcccggggcctcggggaggtgctcccgggggcggtgcgcggctcagcccctggctgcagccctcggcgctgctcttcagtctcctgtgtgccttcttctggatgggcttgtacctcctgcgcgccggggtgcgcctgcctctggctgtcgcgctgctggccgcctgctgcgggggggaagcgctcgtccagattgggctgggcgtcggggaggatcacttactctcactccccgccgcgggggtggtgctcagctgcttggccgccgcgacatggctggtgctgaggctgaggctgggcgtcctcatgatcgccttgactagcgckgtcaggaccgtgtccctcatttccttagagaggttcaaggtcgcctggagaccttacctggcgtacctggccggcgtgctggggatcctcttggccaggtacgtggaacaaatcttgccgcagtccgcggaggcggctccaagggagcatttggggtcccagctgattgctgggaccaaggaagatatcccggtgtttaagaggaggaggcggtccagctccgtcgtgtccgccgagatgtccggctgcagcagcaagtcccatcggaggacctccctgccctgtataccgagggaacaggtaagcactggcaactcctctctcggctcttggaaacttgaaacacttggcaaccggcgcagagtggagagaatccgagcgctgggaactaaagggaagatagcctagaaaactggtctaacttcagaattaagaaactagcaggttttttttttgttttttttgtttttttttttttgtttttttgccctctctttcacacagtagttttataacctgaacgactgaaacacaattaacaaaactagatggcatgtgtagggtcttccacagctgggccaactttttagatctgctacacctggtgtatggcttgcctactcttttcagtactcttacgctttccttccttagcagaaattttagaattaagtttagattttagcaatgagtgatttttttaacacatagattttactagatttctactttttaaaaagtaaaatctttttaatgaaatgatattaaacatttatgaaaaccagtaaaaagattctagagcaaagcaagctgtgcttgaaggtgaggaattgatacacattttctggttttgcagtaagttttatttggagagactgcagctgatggtgcccaatttgtttttaaatataatttaggggcatacattattacatgctagtgtgttttgtatcacaaacttcaacttggggaataatatgtctgaactttggaattgttcaaaattgtcaactgcgttttagtgtcaactaaaaacaaaagagttctctttagtatgtgcatacttaagtggatatttataaattcaaatggatttatgcagattttacaggaaatactaattcgggaggccatttctaagattgctggagatgtatatcttcccacaacgtgggaggaggaggaacctgggattataaagttgtaaataaaactttagtcacttttggggatgagtctccttattatcattaagtgatttaaaactatagaacagttgctataaagggcataaaggaacaaatcccaattttaaatgcatactgtgtctaaaaaagcataccgaagggtatgcctccctagttgaagcagatttgttcacctctctatttgaagtggatttgacacttgatggggaggaggagctggttggatacagcaagtggaaatttacatttttccctttaaattaatgcctacctgtggtactattaggacaactttagggagcaagagaatatcctaagataaagtaagctttttctttttaggttattctgtggataatcatttgggtatttctaagaaatagcagtcaccatatggtgtgggtggctagttggtttctgaaatggagttgattacacagatctatggctgtttgacattattgagcagagtagatgacagcatcatagtctgtttattttaaagcaaatgtagttatttgctttttgtttcgataaaacaaatgtttcttgtctttaagcttactctaagagtggaggggaaaacaggccactgactgatagttttggtaaaaatttggaaattgttaaaatggagtaagttatctatttgagggtaaactaaccattttaatttcttttcacagttatgggagagaatgtcttaaatgaaaacaccaccgctttaagtatgttcagaatacactattcattaacttatagggaaataggatgttactattgcaaaattcacaaccataatttctaaggaaaatctgggatttaatcacaacttgattccaaattgatatcatttaccctgtggaattattttttaaaattttatattaacatttataagttaagaaattaagggtggatagaagataagaaggtggttaggtaaattaaccagcagcattcatttaacccacacatttttattgggtttctctggtttaaattgataaatggagaatttgaattatctacgaagttatcaaaataagcattgcatatttaatgttttgctgattaatgctgttggaaaatgcataatcgcaatctatttctgtaattttctttggtcactattttttttaaagactgtgttaatgaagattattctaaagtgggaaactttgtcttatgcttgatggaaacacaagaatacatttagcagaaattgagatacttgaagttttaatgagggcatgggtgagtgtgtgcgtgtcactgaagactggtttttatatatgacccattaaaagttgttgctgagcataattgtggggagtgggtggaaactaacacagtgtactatcttataagataggacagtatctcatatacgttagccttactgtgtgaaaagttcaggagctacccacagtaaatggcttatctgttttatcataaggaaacaaacttctgattaagggtgcaaagtgtaccactgtcatttgcatactttgtgaagtcaaacatcaaaataattataaaataagtatataacactcccctgaatgtcatctgctttttttctgaaggaatgtctactttcaactcaagacaatactcataggcaacaagtgaattttaaatagtcatttaagaacttaaacgcacagtctgtcagagtcctcttgagaatttatttgcactttgctcattgtgaggcttaccagtgagagaatttcatcattttcttctctgtatgaatggcagtggctggttactgatgaactatccctcttcagtgaccctcagttccaaaagtgcaaagagaatatatgataaaaattctcataagagaaaccaattgacagatacatttttctctctccctccctttttttctttcaagaactgtaagtctgtagcactggtgtctgtgaatgcaagtggaaatatctttattctcaggaaaaaacaaagtttatagttctttaaagtttaaagaactataaagtttgtttagcttttagtttagtcctgacaacccagtgtccgcaatactgaggctgattttgtagatgagtgtgtcaaactactyttttggctgccagtgttaagaaggcaagtgtctgttaaggtgtgtgtatcttttctaagtggactttcgcatcccagagcagatatgtctctctcaaagtaccactgtgccctcggcccgaaacatgggaatatacagaggtacctagactttcttggagtattagatattatgcatgattaatatgttatttttcaatgtaaaattttaattttgcaatttttttgttattgcaaattgtatttgaaggggtgtctctccattctctttataaataaagaactataattggctgctcattcttctctaattactgagaycaccttacacattcacttttgaaagatttcaaaccaatgcaattttattttagttacytgttaaggaaaattttatatttttacctgtggtttcaggtaaatacaaaggcatatgactgtctccrttaatgcatttgtaccacttaatgacarcatttttttgggatggatacaacatcatccattttgatcttagttgtcgaaagaagagtcaagtttttcaccactgatgtgagaaagacacttttaggagagaaagcaaacaacagcaaagcaaaaataggagaaatgggtatggtgtttgatggtaggcactggatgggaggcattgttattctttgacaaaaaacttgcttatttcttctcaaaatgtagaatacattgtttaaattcctaaatgcctgtcaatgtaacatattgttcaaattgagtaagtttcagaaataatcacggacttttaattaaattgtagcttctacatttcagtagtgttactcagtttatggtgattcaaagagcaatcttgattacttatgacttggtgacagaattaaaattaattaatgtcaatttctgaaaatactgaaaagggaaaacaagatttccttatcccttgggaaaggtgaaggaaaagaattttttgtgtgtcggggggacaaaaattgtaattttactttgtgaatacagatatttaaagcatactgaaaaagttttttaagtgacataaatagtcagtgaatctatataaatttacagaggctggaaggagtgaaaacagtaattttactctttctgtattgagtcgaaagtgtaaaaagttaaaactgtagaactgaaagaaatgctgtgtatgctgggctgtcatgttaattaaataaacaaccagaacagtgactctgtgtatgaaatacattttgaaaagccttgggggagggggtgcaggcaggcaagggtgagtgacactggcatgaaaaaacattcattctatctgcagtgacatttgtgtgaatttgttgtagtctattagaaaattcagatctgagaaataatctcttcagagcgctagttgaataaaggctttaccaaattgaattttacttctattttaagcaagttctcattctgtcaaggtaggatgtttataaacctcaaaattagaagtatgcctatatattttaagatttttccattaatatggtttgtgtcagtcagcccagtagagtcaatgttgacttcattgaaaacgtgtgttattttatctatcaaaagaaagagtttattttgggattaggataggagttgtgtttttgagaaagagttattgttgtgagttatactgtcctggatgtgtgaagataatcaatgcaactattgtatcatgcctttgcattgggcgatggggaaatgtctyatgctcccggaagtgatgcataaccctacaggtttatggtgaattgtttacttagctgccatatgtctcctcttcagtggagtcttcctgctccatttctgtgtggtgtttatatcttcttaaaaaaaccctcaaattgagattaaaaaatattatgcttatattctgcattcatgtgtttaatgaacctctgtgaaataattctgaagaccctcagaaagtccagtctcctattcttgcacctaaagatgtgttccattaatgttcaaatgaagataattcctttatatagaaacttgaatccttttggtaattacctatatatactttcatgataggtagtattttttattaaaggagattttttgttgytgtttgtttttttagtaaggctactatggaattgttttaactttgaactgagaatgtatgtttgtgctgttattgatataaaatatacagatttgatcactgagaaaaaagtctaacagatgtgcctgagttgtagtttagaggaagatgtgttgtatracaatcgtaaaaaatattagttgaccatacctgttcattgtgaatgtataccactgttttaaaagaagatgctacccatagctaatgttacccattatccataaaggcctttgatcaatcaacctaccaggtctcaaatcaacacattttatctgtgcattagtccttgtgctaaaaatcaaaaataatatacagatagatgtgacacagcatttgtctctgcaaagtttagagcctagtgagattaaygagaagtgaacataagaaaaagggaagtcacagtgaaatatcttagataatggagaaatgcatataataacttggagcaggtttttaacctggctccaggactcattcatctcctctctgaaattgtatgcagaacttcatttgttcattcttaggagcaaaaagtcttagtgtcataggttttcagaaggtcctcaacacatagatggttaaacataaatggcttagattttaagcaactttacattttgaagacatggagaatgtttttgaaaatggaaattactttggtgtacctttacagtctgctctgaaacaaaggtaaaataatatttcatttaggacatgttacacttcaaaatagtacactgattgattgtatttatgtcgagttagtttatgactgtaaatagctggttgcactgatattttaaatgcttaattctgaaaaggctgtagttagtagactacaattagtctgattttagagagaaggaaactgagagttagctatatgtgtgaagatagcccaaggcaagatggcttttgtccatttcctctttgacttgactgtgctactgaggaaacagtaggaaaggagtcaggctgctaactttaaccctgggtatcatttktaatttttcccatggagccaactctaaattctcattcagcattagaagactgaataatcagattgagtgtcagatgtgtaaataacacaaaacttgttaataccaggtagcctctggaatgaattattcttgactttgtcacgtaaatgaatatcagttgcactgaaaagtctaactttgtggagtcttatcaaacaaaagtatttagcagtggcttaaatattgaatatttttattttagattttcaatatgtttatttttgtatgttcaggatttccaaattcaaggcaaagcataatctgcagattggtaaggcatttcttcattagcaaaaacagctggtaatttttttcacctgttattttgcagtgtttccttagaatttcattaaaatataagtaaatagggtawaatatcagaggaggtcatgaagaacattaccatttcgaagatggaaagctatttgagagaagtcacaaactaagcaatgtctgtgtttttgatttgattagagctgtcatttgttatttaggaatctgtgaatgattattaaagctttcaagtatagccagtcctgctaacataataataayattacattaagggcactcatgttctttcctcctgagaagatgactggttacagggggcacatattgtttgctgaagtgtgtgtatgtgcatgtgcatgtgtgtacctgtatgtgcatttatgatttgtgtgtgtgcatgtgtgattttcccctggcagaaaattgctttggttgtrtcaatttagtgaagaaacagtgtcacccagtggctttgatgaaaacagtcctataaacattatagataagcactgtccagtagaaatacaacacaagccatacatttgattttacattttctagaggccatacacacccaagaaacagatgaaatgaattataataatatgctttatttaacccagcatagcatgtcaacatgtaatcggtgtaaaaaaaatgaaatattttgcattctgtttttttgtgagtctaaatatcttgtgtgtgttttacacttaaagcacatttcagtttggcctagccccatttcaagtattaaatagacacaggtggctaatggctaccatattggacagtgcagctctatatttttaaagatttgtaatatttgagatactaatgtcacctcttcagttataatgaaaagtctttgtagatttaataacaatatacagtctttaaaattatatgtgtaatcttgatagctcatttttgtaccactctaatagttgccaagtctatttgcccttttttcttcatttctcattattgcatttattttaaaatatgattattttcatcggagggggagatttagcagagttccttaataaaagacctttatattaacctgatttataacacagtatcaatatttccagttaattatgaatttgcctttaggagtttggtatgtaacagggattgcttatggatacactgtaaacacaacacatgttcatgatgattagtctataattgggttatctaatgtctctttagaaatgaaagtgcttatgtttgtaggtcattatctttgtaacttaggaaactaaaagtcacaagcctgctcctagctttaatggatgaaaattgtaacagtgtctgtaaagggctaacttttcactactgtttatwtaaataccactttcatggaaacacaatgaaaatggttcattctgtgtatagagcagattggagattttgatagtgtggaatttttaaagtaggaatttagattaggtgagttttggagccattttctgagttcactcyggtttgcaatttcaaactgatttcagatgaaaaagtctggaaatgtttaatgtcatgtcctctccatcacctttccttatactctatgaattcgttaacaatagccgtaattccaattctacatcaagaaataaagagaaaattatatatggcattttactttatatatagatatatagattaacttttaaaaatacatttattatgtgtataacgtttatatctgtgtgtgatgcttttagtgattgggacagggtatattacttatttttacactgcagattaatatagacagattttatatcatagatacatagattttcacttactagaaattctaaaaagatcaaaaggcaatagaatcatggtatacaaagaagcacatttggacaaaatgaaataatgtggatgctggctcgcttctggtaaaagctgacttaatttagagttcttgaagaagctagctgaagaatgaaaygtcatygtaacacacatctgtttcttgaaagagtttatacttgaatgtaactagtcactgttagctctggctaattttgaagttgatttaaattaatatagaggttgttctggtacttttytttttggtcagtctttttctgttctccatctctatctacatgcacattttctttcatttcattttctttttacctaatagagtcttctccctccgaatgtgtttaaaattttaaggaatgccattctgtctctcccagtaccttgttagaatattgaaataattttatgcaagaatcttgtggttttggtttaataggattttagtaaaaattttccatcttgtgaagtaagtttaaataactgaatatttatgctatgtctgtggcaagtgtttcctcctctccaggtataaaccacttaaagagacctaatggaagtttgaagtcatagagatattattcagtgggtaatgtttaattctgtggcaacagttatacagctatgtggaatcagcatccttagcccatttttaagctagcatgaacacaaataaatgaaatagtttttatttttatcgtattttagagatccacttcagaaatgctctttagtgagcagtgtttgtcctcgtgatatgaaacatccccttgtttgggagttattatttcagggtccagcctcagcagcagtctctcaggaagtttggaagggagagagcctgctgaactgcttatgctgtattgagaatttgctttctagtctcaggaactaaggaagtcagattcagattaagacaatttttattataaaaggaatcaaatttttgtagcttccttttctcagccataagcatttcatttagaaaattctggcccagtgtcttgcttattgtaagtgctggctggatggtaggaaaaatggatgaaaaagaaataaaagacttttaacctgaaatatttatctccccattctcctgaggttgaggtagtgactaagttgatttaaggaaatttctatgggaagaagagaagaaataagactatcaacaaagctatacattttcagttttaatatggtgtttacatttttgttacttaaatattttcttgcatatgttacataaggggttgcatttgcctgtgcccttactggtaggaaatcccatgttcagcatgagtcctagataattatttttagctcactctcaactgaaaataaccaaagctaccaccaagatcattgtagtgtaaacctttgaaaaatttctgaaatttgggttcatattttagaaaaataaaatgtcaagtgtttttcacattcaactaataaattgagagagaacaaactctgactttattttcttccattccatcccacagggctctgacaggtgctcttcagctatcaccttttttatactctagtagtctgcattcttgttagaggttcttactgaatagctgtattttctgaaaagtctaatgtaaagcaaatgttatctccttagcttttaattgtgatcaattacaaaacaaagtttgagatggttgcttccagagatgacattgtgaaattgactttttaaaaatgtcatccaactgccgtgctrgttccatcatgtggaatgatctagaaatttggtagcataattgcagaatcaagttgaactgaaaaatcagaagcttatagggttttattgcagtgataaatttagcttttcagtcatttttctttggtccacctactttttaatagaacttgacttgtgaaaatcaaaaaatttaagtcaaataagaatgttttgttgttgcagttttaatacttagagaagatacagtattgttatatcctctcactgaaatcagagacatatcttttgagtatgttaggcagatgatcatgacattagatgaactaggaatacaatatttaggaaaaaagtgatttcgaaccttayggtgtcaagtttctttttatctgtacatgtcaagtgttctcacaggcagactttttagagagattgctatcactgacaacttccagagtttgagagttttttgaatatactacttaaaaaaatctccatatggttttcatttgaaaaaayatattacaaactgagacattcactataaattaaattgaaataatcaaaatataattaagctatttgtgagtttacattttgyaaaacattttagaagcaaaatcatttaactttgtttgcattttgagacaaggagctaactgtgtgtatcatcttgagtagtgtctgtttttattcctagggaytgttttccctataattggagttgttttttgctaggtaagtaggatccaaataacagcatagttattaaggcagtagcctcgttttgtccacttctcgtcattcctttttacttaaataacaattagatttgctcatcttaacccctttacagagctacagctagagcttttaagtgtttttggtggaacttccttaagcaattaactagtcctaataaaaagtgtgagaattagattgggaatgttggatacatatataactaaacaccgattaagtaagttatctaaaaaataaagtggcattcagatatgaaaaccaccataaaaatgagtgccaaaaactaatggtagtatttttgcttgtgcacaaagaagactagatcaaaatcaaatgaataattcctcagttttcaaaaaatattttatggtcttttgagggcataatattagtgcatgtaaaaactagaacsctttatgatttgaaaagaggagaagatgctragagagacactcttggaagctgggcaggaaatccagccatgcattgcctcaaggtctgtcattagatcaaaagcactcaggggacgatggtctgtgtaagaggtcctaatgctattcacgaactctcctgacattcattagtttccaagacattgattcttattctttaactttttagcacatttatcattttcacttatacatgtatgctaatagcaatcttatgtgaacttttacctcttatatgaccagaattgattaaaaatgtyggcaagtaagtttgttatttaatatctctgaactttctctattttacattgaatatttgctacattgtaagcattacagtatgactagattcttctttttttctaacttctcccctgttgatrattattcttatataactataatgccatgttaatcaaactattgtttatgaattataacagtaaatgcccctggttaatagattaatcaacctgccttagatgcttttgaagtctgtgaggacattgcttaatttcacctacatataattacatatcatttgacactctctaaatcgagctgtttattgtagttctcaaaatttagtgtgaataaaaattatttgggaaaactattaaaatgcagacgtttaaatactagattatagatcctgtaaccttccagatactctgatttagttaagtgtagagtgggatcctgaaatctgtggttttaaggaacacctcagttgcttctgttgagaatcacaggactataaacttgtgtctactgaaactgtacaggaagttctgacttttgcaatccaattcaacaaacagtttaaaagtgcttggctcagacaagaagggtcagtatcatggggaaaaactatacacacgcactatagtttatgaacctatgacattcataaatgtttcactttgatttcatttctttgaagttcaaaaaaacttcattgatgatacctcaaagaagttttcttaaccaccctggatatcaatttcctcatctgtaaaataggaataggaatatcagcttcactacctatctcatatggctgttttaaaggctaaatcaaaataaattgctatacaaatgttaaatagaaagaatatatgcactctctagactgtcacagaccaaagcttgtaatatataccagtttcttaaactttcaaaactttagtgaccctgtctgtaccataagaataatataactgatttcttaacgttgcaaaggttaaattaatgtaataatggacagaggttcttgttaaacactgtgcccagctgaacatgaataatacatattcttgcccattagggccaggtcattgaaggttataatctaaatttcagaaagcactatgtaaaacaatgcaaacaaatttgcatttgattacaaaaactcacaagtcttacaaaatatgaaaatttaatggaagttaattaaaacagtattagggagttaaaktgtaagcaaagccactgccaaatgaggcatcctaggagccagataaggcaacagtagaaggagagagatctgatagggacttcagatgcttcgggtgcttcattgaaaaaggcttaagagagatatttaaaaaaattggtggagtctttgaatgtcttcgtaaaaatgatgcttttgagggtcggttgtgtagtgtgtcctataaccccacgtacagaaacttgatttgtgctttaaatttgacttgtactctagctgccattataacctatattttgtcttgaaaaacaaaattattttcaaaaattttagtttcatttttcatggtaaaatatcagtcattcccaacccttttctcattatataccagtggtgccattattctcaaatgacagggactttctgcttattaactgtataatacagctaagccctggctcagctgtggccctcartggaaggtagtgagtgtttattttatcacataaaaatattcctcaggatgctgtctctttttaccagcttccacagggctttactctaggccttaaccctcagaccactcttcttccagatttttccacttattgaatgatctttcagtctagtctgaggtagttattttggtttggccctaggagcagcaggagtcctgtggagtctcagtctactcctrttggtttcagtttataaattctgcctggagtggtcatctctttcctaacttggttacagacagtccatggatttccacttttgtgayagaagatggaaaaaggtgaggaggaggggacagcagatcacataggccatgaggggtcactgcaagactcgttctgaggcagatgggataccatcaaagggttttgagcaaagaaaggatgttaccagccttatgttgaatagggtgtctcatattctctgtgttgagtgagagtaggtgttacgatgtaagaaggaaaccaattaagattgttgcaataatccagagatggttgggagttggaccaaaatgataatgtcaggggcagattttaaatatatattgaaatcagtactgccaagttgggtattgatgggctggtatttcctttgaggacagacagagagttcctttaatgttttctcttattttagagaccaaataataaaggaatatttatctttatttcttgctttaaaaatatctgattgggttgacatttttttttttttttctctaattttatcttctgcctacaccttccggaagatatacaaactggagacctgacattcgggaaagtcatgaaatctgcttacatggaaataaattctaatcaagcatctcaaactcttcaaaagttttttagtttgttaggatactataacgttttgtgtaataaaagttggttttgaaattttattttgatataaatgtctttatattttaaaatctgttttaacaagatgaaattttaatmaatttgtgtcattcacatgctcttccttttaaagagatgtatttgcagctgatactctacctatcttttttaaaaattttaatttaatttaattttaaaattccagaatacatgtgcaggatgtgcaggtttgctatgtaggtaaacatatactatggtgctttgctgcatctatcaacctgtcacctaagtattaaacccagcaagcattaactatttatcctgctttttttcaccctgtcgccccacccgacagactccagcatgttgttcccctccccatgtccatgtgttatcattgttcagctcccacttataagtgaaaacatgtggtgtttgsttttctgtttctgcattagtttgctaagaataatggcttccagctccatccgtgtccctgcaaaggagacgacctcattcctctttatggctgcatagtattccatggtgtatatgtaccacattttctttatctagtctatcgttgatgggcatttgagttgattccatgtctttgctattgtgaatagtactgctgtgaacataaacatgcaygtatttttataatagaatgactcacattcctttgggtgtattcccagtaatgggattgctgagtaaaatggtattactggttctaggtctttgaggaatcaccacactgtcttccacaatggttgagccaatttacattcccaccaccagtgtaaacgcgttgttatttctccacagcctcaccagcacctgttgtttcttgactttttagtaaatgcaaatcaaaaccacaatgagataccatctcacaccagttagaatggcgnnnnnnnnnnnnnnnnnnnnnnnnnnnnnnnnnnnnnnnnnnnnnnnnnnnnnnnnnnnnnnnnnnnnnnnnnnnnnnnnnnnnnnnnnnnnnnnnnnnnnnnnnnnnnnnnnnnnnnnnnnnnnnnnnnnnnnnnnnnnnnnnnnnnnnnnnnnnnnnnnnnnnnnnnnnnnnnnnnnnnnnnnnnnnnnnnnnnnnnnnnnnnnnnnnnnnnnnnnnnnnnnnnnnnnnnnnnnnnnnnnnnnnnnnnnnnnnnnnnnnnnnnnnnnnnnnnnnnnnnnnnnnnnnnnnnnnnnnnnnnnnnnnnnnnnnnnnnnnnnnnnnnnnnnnnnnnnnnnnnnnnnnnnnnnnnnnnnnnnnnnnnnnnnnnnnnnnnnnnnnnnnnnnnnnnnnnnnnnnnnnnnnnnnnnnnnnnnnnnnnnnnnnnnnnnnnnnnnnnnnnnnnnnnnnnnnnnctcactcataggtgggaattgaacaataagaacacttggacacaggaaggggaacatcacacatcggggcctgttgtggggtggggggagtggggaggtatagcattaggagatatacctaatgtaaatgacgagttaatgggtgcagcacaccaacatggcacatgtatacatatggaacaaagctgcacgttgtgtacaagtaccctagaacttaaagtataatacaaagtattatattaattattaattatattaattattaatatataawatataaaatatatatataaatatatataaaatatatatataaatatatataaaatatatataaatatatataaatatatataaaatatatataaatatataaawatatatawatatatatataaatatatataaatatatataaatatatataaatatatatataaatatatataaatatataaaaatatatataaatatataaaaatatatataaatatataaaaaataaaaatataaatataaatatattaattatattaatatattatattatattatagtataktatagtataataaaaaaatactaaaaaaaaattgccattctgactggcatgtgatggtatctcaatgtggttttggtttgcatttctctaatgatcggtgatgttgagctttttttcatgtttgttggccacataaatgtcttcttttgagaaatgtctgtttatggcctttgtccactttttaatggggttggggttgtttgtttttttcttttttcttctttctttttttctggtagagttggggtttcaccatgttggccagactggtctccgtctcctgacstcaagtgatccacctgccttggcctcccamaatgtgggattataagtgagagccactgcgcctggcctttttcttgtaaatttaaattccttgtagattctggatattagacctttgtcagatgaatagattgcaaaaattttctcccattctataggttgtttgttcactctgatgattgttttgctatggagaagctctttaattagatccatttctcaatttttgcttttgttgcaattgcttttgatgtttttgtcatgaaatctttgcccatgcctatgtcctaaatgatattgtccagattgtcttctagggtttttatagtttttggctttgcatttaagtctttaatccatcttgagttaatttttgtataagttataagaaaggggtccagtttcaattttctgggtatggctagccagttcttccaggaccatgtgttaaatagggaatcctttgcccattgcttgtttttgtcaggtttgttgaagatcagatggttgtagatgtgcagtcatatttctgagttctgtattggttccattggtctatgtgtctgtttttgtaccagtaccatgctgatttggttactgtggccttgtagtatagtttgaaatcaggtagcacaatgcctgctgctttgttctttttgcttaggattgtcttggctgtgtgggctcttttttttggtttcatatgaattttaaagtagctttttctaattttgtgaagaatgtcaatggtagtttaatgggaatagctttgaatctataaattactttgggcagtatggccagtttcacaatattgattctccctatctatgagcatagaatgtttttccatttgtttgtgtcctctctcattccttggatgctctaaatatcttaagctctagtatagcaaaaacatgagactttcaaagaaaattcaaggctttctctattagtctttgaatagtctgacaaatcccaattccatcaaagacatattgccaatacatcccaggtctttttatagaggaaatacttctattttgtatccatattaactcagactatctgttgacatacagagcacttcagtgataggtgctatataaatatttaaattaggatagctgattgctctgtaagttaggagtttgctaattctacattgtggttaatttctgattatgaaacattktttacatactgcttgggaacaacaaaagataagatattttaaaatgtgtgaaatgaagagtttttaaatcacatgggaaaatacttttgatgagtggaaagtgaaatcatgaaacacaattgaggataggccaaattcacagcagaaaggaaacttgtcaagatgttcattcttgtttatgtgggagaataatgggttatttttacgtacttttatatcttttttctgtattttgtaagttttcaaccctccacacgtattttacaatcagcaaaacaaagctttataaagaaatgtattcctttgacattgttcctttggatatgttcacagaatatttattagggccattgccttagtggtcgtttgggttggagacatggaaattgcacctccaggtgcttttaggaatggtaatgtgtgatattcagtactatataaaacacccttggaagtaaaatccttttgcattcctaatttttgtcccagatggctggacaggcttaaaatttcttataaaattggagatcctagtggtacatgatcctccaaggtagatccctgaaattttagatcggcctacagacaatttttgtaactttacctgaaggtagcgctttatgaaaatatatacatccacgtgtatgcacatatataccgaaacatgtttcagtttttaccaaggctttttggtgtctttttgttttagacgtggcaacaaaactctaccacgtcaactgatacattgagaagaacatgaaaacaaatgttgttctactaaggagagaaaattccttataaaacatgtaggaggagagtattgagactacctcactgattaccaggctaataaggttacaaataaagatcaggttcataatgatttttgtttaaagtaatgagcatgttttctaaaaatgagtaatttctatgttttgttgttttcgtgtatctgagttacatacactgtatataatattgattaacttcagtttcatttcccaggattttgttgagtattccctgcatttcctgcgtaagactaaggaactttatacatttccatttgttgttgcttgtttgaataaatgaatagagaaagaaaacaatgtgtacataatattttttaaaatggtgccacatctaggattattaaaatgctttttcatttgaagagctgtacaattttgcagaaataaatttgagaatattaaaacagtttctataactactgagaaaaatagagagtgtgctctcacttaaccaagaaaaaaatctttctagaagaaaatatgatagaatcagagaatgtaaacagaaaaatcacttttackcaatcattccacccagtttttacggttctgtcgaaggagagttagcagaatagtactagctgattatgcttgcgatggttaaggtgacagagactggtagccatttcctttctctctctctctttctgtgtgtgtgaggaggaaagggggcaatcagtactgaagttagcatttgggtagaatccagatctcagccttgcaggtcagagatgcaatttttccataaaactagaggttatccactgaggaggcacactaataatacaactatatctcatcaatcagaatgtcaggttattaatggacacaggaatttaactgtaaggaagatcagagtgccagtacttactagtcagtgcttcttgtttttagtgggaaagtcacctttagcatggttggctcctagactgtagctgaggatctctggcttgtgggaattctccttggaaaacttacactgtttgagttttttattctagaacgtttgaagagtgcccacaacatcccagaaaatgtggggattgctgggggaagattcagaaatgaaccatccttgcaccctccctgagtaaagatactacagtaacaaatgattatactgccaagggataaatactttgaaaaacagaaagtcatgagaactttgccctccagaaaggtcatagctaaatttaatgctcaaatactgtcaccctcttaacatggatttctggtaaagttctgtcttcctgtcttttctgacttttccttttgatttatgttttacattctcacgtgtttatgttagtagtaggctgactataatcaatttcagtacaatataaagaatgtatctaaaatagaaaaaaaaaacccagtgtattcgtaaaagaatatttctatatatttcccctatgggcataaggcccagaggatatgaggtagggaaggattaagatgtgttgaagagctggacatcaggtgtggagtgcatactgggttgtggaaaagacaggtggaaaagacatgtgaaaaagacacatagccctgcttttgtgmtgaggagtagaggtgggatgctgggaaattttaagaggtaagataagggggatgtggggccggtgtggagaggggagcaggatgaagacttgagtgttttaagattaggttgaggaatttgatattttatgtgtaccaaacattatattttttaaccaaagagtgatgtgaacagattaaacatrattattctagcagtggattaggtggggacccaaatggacacaaggaggcrtttaagagggtattgtgaaagtcctgggtagagacattgaagatttattaagatagtagtggtgggcaggaaaggtgatttaagaaaaaaaaaaaaaaaactgcagttgggaggattagcttgtgattgatagtggaaggtgttaacaaagggcatgaacgccacttaaaactgtgaacctgagaaactagaaagatagtggcgctggtcactgagaaaaaaagcatcagatcagtttttgtttattttagtttcggggtgaaggagggaagatgatgtgtttggtttggacatattcagtgtatgttacttttgcaacctcatgtgaccctgtctccttgaagctgctcaattttcttagttcacaaaaaaatattttaataccacaaccacgttagttcaccgtattttcctgattagtatgtacatgctttttagaactggagcttcttgtgcccagcctatcactacaaacacagaaatgttgtaggctttggacatttcaatttgtgcaaagactatcaccctatttaagattagatgttaagcacggtcctaaatcttacagggcagatgactttttactcttggtgctgaatcctaccgatgaaagatattactgagtcagtacagacttcagcttctgtgtaaccctctaacgatccccagggcaatatactgttgtaacctttgatcacacttaaaaagtacatgggcaaggttcttatccttgagcagatgagtgcttttcatatgactagttaaaaacttactttatcagtagagacaatctaggctgtcgagagaagttaaccttgtaaaattatcaggttgagttccactttgatgtttttcttgggttattctagatgcttactatagtttgtcttttgtacagttaatatatgtgtgtataaattaggctatattcaatgatgctagctagcatcatcgtgtgtgtgtatgtatacatatatataacatatatattctcatatatatatatatatatatayacacacacatacatgcattatacatatatatatatatacaattccggaccgttgactctggatcaagggtccggaagtgcaatccactgttgattctttgctcacatagttaagtttcccacattgtacaatcttcaatgctttcactactcttctagacttgtgtttatatatcatagtaaatttttggaggacttttttttttccgtttatgtatgtgttacttttcctgaaaaacatcagtgctkttgtatcacaggattggagggaaattaaaggtagagctcaatttatgaaatgcctaacaagtgatcattgttaagcttttgcctaatcactaccataatagggaactaagtccccttccatgccattttgttctycccttttcccctcctctctgtttagatatggtcttttgaaattgaggagtccagaatctggtacaacagatatggtatgactggaacaaagcgaagggtggctgtcacctcttttgtagaacaataatttgtgaaccttttttacaatatacacttgcctaagcatcaaccctcaacctacagagcatcaacgtgtgggtgagcaggaagggggacgtgtaattttgtcgtatgcctacttacgaaccactagtctagttaatgagacccttaacacatactaggactgcacttgcttttttttgtcagcataataatctatagatgtatattttgtttgtatcagctaaagctttgaagaccttcacatgagttaatactacactccattcatctgtcctgtgcctttggtactttagaccttctgtttttgtttggtcccaatgcaaataggaagataactaaggtttctgctttgttaaataacttctggtgatttatgtatagctagaacagtgaaaactgggaggcaaaaacactacataaatattaaaacaatttgacaaatttataactatcactgtaggtctaaaatgtgtaggtctaaaatgtacctggactagatgtggtaacacatgcctttagtccaagatactgaagtggctggggtgggaggattgtttgagcccagtagctcaagatcagcctgggcaacatagtgagatcctgtctcataaataaataaataaataaataaatacataaataaataaataaataaataaaatctagctggacattatggaaaacagtatggaggttcctcaaaaaactaaaaatagaactcccatgtgatccagcagtcctactgctgagtatgtactcaaaggaaatcagtatgctcccatgtttattgtagcactgttcacaatagctaagatacagaattaacttcagtgtctatcaacagatgaatagatgcagaacatgtggtatataaacacaatggaatactattcagccttaaaaagaatgtaatactgtcatttgcagcaacatggctagaactggaggtcattatgttagggaaaataaaccaggcacagacaagtacttcaagttctcacttatatgtgggagcctaaaaagtggatcttgtgtaggtagaaagtagaatggtgattgccagaggctgggaagggaagaggggaggaaggaatgaagacatttggttaatggatacaaacatacaattagatggaaggaatacattctagtatttgatagcacagcagagaaattatagttaacagtaatttattttatatttcaaaatagctagagtggaagaattgtaatgttcctttattagtctgttttcacgctgcctataaagacatacctgaaactgagcaatttacaaaagaaagaggtttaattggacttacagttccacatggctggggaagcctcacaatcatggcagaaggcaagggggaccaagtcacatcttacatagatggcggcaagcaaagacagagagccaagagaaaaagtttctccttataaaaccatcagatctcatgagacttattcactaccacaagaacagaatgggggaaactgctgccatcattcagttacctcccaccagttccctcccagaactatgggaattatgggaggtacaattcaagataagatttgggtggggacacagccaaactatatcagtctccaacacaaagaaagataaatgtttaaggtgatgtatcatccagttacctgatttgattattacacattgtatacatatatccaaacgttacatataccccaaactatgtacaactctgatgtatcaattaaaawgtaaagaaaaacaaaacagaaaaaaagctggaaaaggaaggcttgagatttgatgcactaaattctgtgtacttttggaaataatattaacataaggtggcaccgttaatggtgaaatgaacttttcatcctaggtgcaccctttgagatggcaggcacaatggctctttgtcttctacaagggtgattatcacatggtaggctttttcaaacactaacctgccttcgattctgatatgttctctctagggcacctcccaacctcctgaatcaatgctgtagtgagccacagttactgatgtgtgtgtcacatccatcaggtatgttgacgtgagagaaaaagtttacaaatcgcagctctataaacttgaacctagaagggcatgaacctaatttgtggaccacgcaagcatttactttcctgtacaaagttcctgtaaggagaaatttaaataaatatagtgtagaggaagggcctttccaggagtttctttaacatcagtgaaatattcttgcaagaggcaatatttgactcagtattttcattggtcatttagattttacttttgactttaattactggtattctagccttcaatggtwgactgtttcatgtttctccagaaagttaggtttcatttttattttctatagtttatgagtccatgcttgtaacttatagggaaatcataaaaacagaacagagtgtagttagaacactgaacttctaaaaggatatccctgccttagagatggtatataatactttttcatgagttgggataaataagaaacctctttgtggcactttgggcaagaaaagaagttttgctgtagttaacattgtgatgaaatggactattaatctgaagagttgcacctggaattttttaactaatgtagttaacaattaatttgtataataaatagctatcagagaagcattataatgatatcagatgctacatattcttctcaaagtactaaattttacaattataatctccacagaagaaaatacgattttaaactgcaaataaaacatgcaagaacttgaatcttttattctgcttctacttgctgtgacttttcatgtttttaagtagggtattgcattgattgtcaactgggccaaattttgcccctgcctgaagatattatttagtttttaggacttgaagagtgctactggtttgacatctgctaggtaaagttcaggagtgttggtaaacatcctacagttcagaggacaactccctataagaaagaattatctgactcaaaatgtcagtaatgctaaggttgagatatatcttagattattgtgcatttattttaatccatactccatatggaaagaaggatggaatcaatagaaattgaatttttcctaattatgaacatagtgatagcaggatctgttgatggagggattcaaatacagcgcagtgattaagatgctggatttgttatcagggttgagttctggtttccactctagccacttgttagccatgtggtcttggtaaaatgattagtctctctgagacagaatgtcatttataaaatgtggataataaattctaccttacaggtttgcttggatgaataaaattgcttgcagcctggaaagtattacatgttcaataaattgtagctactgttctatttagaatataaactgatattggtagcatagtatttatatggttatacagagagtgagatggtagaaatattaacagaaatgaatttcttgaatataaatatttctttacagtttaatgaagagctgtagtatttacacatagtattatatatgtatactatgtatacacatagtatatatatacatagtataatatgtatactatgtgtacacatagtataatatgtatactatgtgtacacatagtatatatatacatagtattatatatgtatactatgtatacacatagtatatatatagtattatatatgtatactatatatacacatagtattatatatgtatactacatataactagaatagaatcattatatatatatatatatctctagcaaagcacagtaacataggtatataactagaaaataatatttgacaatttggggagacctatagagatgcaaccttcaagacagtaaactaacgttaaaaatgccraattattaacagaggttatcaatgaggttcgttaaaaagaaaaaatattttcccttttaaaattttttattcttttattattttattttagsgacaggatattgctgtgtcactgtcactcaggctgaagtgcagtggcatgatcatagctcactgtaaccttgaacacttacgctcaagtgaccctctggccttggcatcccaaarcactgggattacaaacatgagccactgcacttggcctattcttccatattgtcatattgcttaattttgttttcaaaaaacatacattccttttgtaatttagaaaacaagtattataaatgaaaaaaaccctcatagctccccaatataaatggtgaaaaatataatcgttaaaacattcctcttctaatttataaggttacccytttttgctggtttatctctattagttggttttcctcttcagtcacctttctaaaagtggataagctgtaggacccattaacattttactggcatgataaagctggtcatgttgatgcctttatcgcctaagctggcatgtagtgctattgtgaagccagtacagtttcgtctgggtggtgagtagaggaaaagtgcagaagaatttagaacttgaatgtctaaagccagaactctatccttgaccaagtcttccctaataatttattaaaaacttcaatagaaatatagaaagcatattatttaaacttccagttgacaaaaactggaagacatacatactagcttagatgattgagtatcagtttcaaaatatgcatagagttgaataacgagtaaacattaaattttaaaaatatttaatttaaaaatatttaaaaggagaaaaggtaaatttctataaatttagatttaggaataattttataatttcatgatgagagaagctggaccattatctaatgcccgttacctaagggttagtttgccacagttcattgaactgtctcttagactagattttgaaagcaaacttttcagaatcctttgctatgtttgtagcattgtgaccagttctgcttgctgtattttaagaggagtattgatcactatgaagtggtcagaaagcctggaattagtcaaatccctgctctgccatgtattaactctgtggctttaggtaaattgtaatgcttaatctctcaaagcttaggttttcttatatagaaaattttttttaagctaccccagaaaaatgttttggggattgactgagattataaagatgctaataataataacttaataaaccttgtatgttgcttactctaagccaagctaaattctaaaaatgtatgtttgtaagtacatttaattctcattagtactctgaggttgatactgttgttctcattttacagctgaagacacaggcacagtgagcctgtctctatatatgtctctctatatgtctttatatatgtstctatatattctagtaaatcatagttaaaaatttttgtgcatatgagtgctagacatggtatcatgtgtttatatacctttgttaatttttgccagaagaaggaagttgggcttatctcaataaacgttttgagcccttttggtacctataaagatacatataaagaattatacttatggtatatctcaaaactgagtttgtttcctataacccatactaaaaacaatttatcaagttaatatagtaatatrttgtgtaagtatacatgtataatatagtaagatgtatatgataatatatgttcaagttaatatagcataattagcaaaatcataattgggttcaaataatattattgactgatactttaaaatatttcccaactattatgctgttccatttacttttaaaaaaaatagagatattcttttcaatttagagtgtaaaataattgcctcctccgtatatattttaaagatggcctataaactagattcattaattcaaaattactaaaataggcaactcagtaacaaagagaatcagctcattttcttagatgctaacaaaactaattatacaaattctgacaaagtggacattgcaaatgaatgaaaataaaaggattgttcacgatcttattgattaaataaggagaggctttgactgagtagatgatttattgaatacttaattgaacattaattgattatttaaatcattttaaagaatcagtagtattcatccctccatgagaatgacaggttttttttttttgttttttttttcgggagtactggcaatcaccatctgattcagtctaacgttttytggctggggcaggaactctgaactttatttccaaatgagtaataatgataaacaatcctagaggaaagtgggaaaatgcctgatggcttattggcgggaaaaagaagggtgtgtgagaggaggaattattcagttatcactggtctggagaagaaagagcatggcccatttgcaaaaatgattcttagttcacttttttttttttttttgcctttagtgatattatgggtaatagcgataaatttttattttctcaatttatatatatcagatttctcactctgtgtcatcaattaattcattcaaatccatttccaaaactttaatctcgttaaccttgccaatactgttttgaaaatctgtcttgagtttctgagttataaacagcctcatattttcataaatatgaaagaaagccatcaaaaaaactgcacttatttttttagccttggtttctctgtattctgtaaaatgatatagcctaataagagagctttactctagtggccttcattatagcccatgtgcaggatgattctgaaatatataaattaaatgaatggaaacagrcatgytgacaagtttgtttagcaccaacgattggatatgctattcttaaaccaaaacttttgtttactcattcattcctagaatttcagtattttaagaagtctcagtgctacaggatttcctgtatttttttaaaatgtggtaacatatacataaaatttaccatgttaaccatttttaaatatacagttcagtgacattaagtacatttacattgttgggcaactgaaaccacagtccacttccggaactttttcatcttcccaaactgatactctatgcacatttaaacaacaacttcccattccctcttcctcccagcccctggtaactaccattccactttctgtctccatgaatttaactattcttgatatcttatatgagtggattcatgatgtttgtccttttatgactggcttagtttacttggcataatgtcttcagagttcatccatgtygtagcacatgtcagaatttccttcctttttaaggctgaataatattccattatatacgtatgccatattttgtttatccatttattattgatggatacttgggttgctttcactttttgtttattgtacatatgttgctatgaatatgtgtgtatgaataggaagatttttatattgtttaaaagtggcaataatgtgaactttttgtataacatcaccaagttgacaaaggagctgcagcaaatgtgggtggttttactgcattttaaaaactagaacaccttcttaaactgatcctaatcaatcagctcctcatggaaagattagagcttacaggaagagaatgaaaggcatacatgaaacacatttagcacattaagacttaaattttcatttaaaactgaaattttattgcttggcttgtctttacatacaggattcagactattaaaaagctgatagaaaaagcttaaaatactattattttagtaatcctagagaagcaaagaagcctcttaacaaataacaaaaatgtgggcataaataacacatttatttcaagataacttaatgcttttttattaggctctttttggaactaatgaaactattatccaaggaggagataaattaaatttccacctacaagatcagtatagcaatattctgaattcaaaattctgttgttaaggatggtgtaaccatatatgacaagscttttacaaactcctttttgaacattgctttaagcaatcatttstgtatttgtattaattttcaatctaatcattccaaatgaggcaaagttttgtgtaccagtgattgaattagaagaaagaacaagttattttgtatagtctaaaagctttgtaagaatcctctgcttgcagtgtttgcacagttctccattagccctgtcgtgttttcttcttctttgagacatccattagtagatactttaacactaatccgttttctgtcccaaatacataggagtccaggagccagggatgcaggtgtcattttaccttctagtagtctatttttgtgttctggtgcatgtccgactgagctctatttttaaaagtacggagctgcttgctacctgaagccagagagatactgaagaatgaaagacctcgagagtcctgctgtctaaaggagtagcacagccagacactgatgagggtggaggtagtagctgagtcttttgttataaaagctcatgttgactcgttaacatkggttttttttttttttttttkttttttktttttttttttttttgagatggagtctcgatctgtcgcccaggctggagtgcagtggcgctatcacggctcactgcaagctccacctccctggttcacaccattctcctgcctcagcctcccaggtagctgggactacaggcgcccgccactgcgcccgtgaccgcacccggctaagtttttgtatttttagtggagacgaggtttcactgtgttagccaagatggtctcgatctcctgacctcgtgatccgcccgcctcggcctcccaaattgctgggattataggcgtgagccactgcgcccggtcaacattgttaatattttaatacacatttttgtttattttgtttgttcttttctctattgctaattttcgcccagtatgctaagcattttagagagatcatgaatcctcattttgcttccctttgtttgctcttttcccttttgctaattttctcctagtatgctaagcattttagagatatcacagattctcttaagattagaggtatgtattattatttatttttaaggcaaaagggattaagtaatttacccaaagtctcactgtttatcagatgcagaggctgggtttgggtccgggtctgtcttgtgctgatggcttcctgtttctgttacactagatggccaaaacatcactggaacttacaggatataactttcttcaaagtggtaatcattatacccagtccttctttccgttttctactctcactgtcctagtttatggccgtatcacttygtagttggatgggctgttgcagtaacttctcaactggtctccctaccctcatgccatctgaatattaatttattcattgaactaccacactacatcttcttgatgtacagctctaatcaggcagcagttttgttgaatgttaatatttaatcatgtaaatcctttgataaaaagtagtttgtagttgttttttgcctttcaaatgaaataaatacctccttgtttgggattcaggaccctctctaatctacccttcttaacattcagtcatttyaaactgctactgccttcatcacatcaattttctagtgactttgaagcgtgccttttctctctcaagacagagataggtagatctcttgaggtcctacttctgtctaccacattattgccctctgcccctaattctcatctctctatcctgatctccaaccagcttaggttgaaattttacccatcttctacctgcttcacgatgtgttttctgatcatccccgttggaagctctttctccttcctctgagtctccatagcgctgtatctattgctgtcttacggcacttacattctccgtcttggattgtgaatagttttataagtgagggtgagttccttgaggatgatcaatgtataattgagcccacctctcctgcgccccacattatttattgcagtgccatgtagatgcttaacaaatgtttttgaggcaatgagatatcatcataatttgaatgcaggtagtgcttggaaatttagataatatcttaagtatatgttatctcattaaatctgataacaatagtgtggaatttggtgattatccccagttgatgaatggtacttaggaattcacagacataggttcagtatgtatctgtggagmtttgtggatagttgtgctgctggggaagttgttaggtagaagtccaagttaaacagtagggagctaacaagacctcctgggaaattggatcctggatttcttttttttaattctttttttgagagagagtctcactctgctgtgcagtggcacgaccttggctcactgcagcctccgcctcccgggtcaagcaattctcctggctcagcctcccaagtaggtgggattacaggtgtgtgccaccacgccctgctaatttttgtatttttagtacagatgtggttttgctatgttggccagactggtctcgaactcctggcctcaggtgatccacctgccttggcctcccaaaatgctgagattatagttgtgagccaccacgcctggcctggatcctggatttctgaaccaaggttgtgatttggactcaccctcaggaaatcaaatataaaatcatttactaagtcccacaccatcagtttttcatcttacggtgggccctagatgttggaatttttgtttttaagtgtaacaactttgaaaaatattatattgaatgtatagaagacaactatgaatataaatttattggtattataaacactaaaaaattttgagcaaataatttacagacttctttttgtaaaatataaattcagtgttttctttatatctgcagtattgtgaaaaataaatttttttctaatgcctggctgaaaaataggtctgtatcctagttgtacaagaataacccttcagaggcacaggattatgttgctataatcctaagtgagctgtaagagttaaatgcattataatgggtctgcttgggtaccagtaaagattatatttaaaactcaaaataggaaacagaaaagtcttgtgtatgaatgagaaacatttgatgaaaggaagttacataagaatagagaaataatatataactcctactcattatgtaataatgtctcatttttctttctccttaaggaatgccatcacatgaatttttattgttgctgttacattggtaaccaaatttcattttcttactgtgtgggtgattttaattgaattttttcttgcttgctcaaggtctatctttatcaacttgaattattgcaaaatgcaacagttctataacatcttcagagacaattaaaatgtttggagatattttcctgatgctgaatggctcaacttttcatgctttatactagtatgtgtgcctctttaaatgttaattctctcccttacagttagctgtccggtgtggtgtggttagcaggtatctttgtttctgttttgaagaagaattgcgactttgcagggagagcacttaaccatgcttgtcaggttaatagtcttatttattcacagttgtagtcagtgggcactagatggaggcctgagggtgacagtatatttttcctgtgtaggacagctcttaggatttgtgagcaccattccatttaccatctagcagccttttctccattacaataaaatttacaattgtattatgaatgaagagcttgttggaattgcttcttaaagagaatgaagtcatttaacatcagaatgtgcaaaatgacaattccgtgatgaaaaaggagaatttagaagtatgacaacctacattttgtcttttttataaggcctccccaaaatttttatttcagggctatttcaaatctgagcttcaaataaaaacaaacaaaatgttaggactatcaattctaataaatttttatttaggtttttctggcacagttagaaatttagttatatataatacatatgtagatacatatatatatgtatcttgagagacgttagattagacatggtaggcactcaatttctgaaaattttcaaactctataatttagttactctttagatttctacttcaacttcctaatgaattattttctttcaaaggctcttcctggaatttttctgtttttggcaggtatgtttgcatatctcaagtgasacaatttggccaggtttctgaaaaagaatactttaaaagaaaaatgtaggttggctcttaagtgttttaatgttatttgagataaactaaaatagagcataatcatatggtatattaataggaatatgtgctgatttcttaagccccattcaaattttacgatagtttttgtttcttttaataaatttgtttggtttataactttatctcaggggggatatattattattttttcctcatttcttgagtgaaattttagcagaagtgacttaattataatcttggagatgcatgttgcttacaactaattgggtcctggacttaataaaatcacttatgtagaaagccatatactgtaggttaaaaaagaaaagggacaactttggtaattttcaagttaaaaatagaatataagtttcatgaggtcaggaaccacatctcttaattttttctttattctgagttcaacctaattattatatgcatgacagatactctttaaacttttttattgatttattggttacaaaataaatatattgaatggtactggcaattctagctttgtttcccacagatctggctttatctaagaatatttctctaatggaaatagcagttcctaaaagtttaattaactctttgacctcagaccaccttatttatatatgtctaaattatttcctttccaggcatgattcatattccttgagctattggccacgtgccagggaccattgccattccacacatgtgtaggttacagagttttttttttttttttttttttgagcaggaactagcatgtaaatcctttcttcaaaatatgtatttatctactggctgatacctgacaaaggagtgataatggttccctactgcttgccgactcaaggacagagttttctgctacctttatttcttcccccaaaatttattttgacagactgctttattgagagagagaatgaatataggatcagtgtttctgtacaaacatttgaatttggtgtgaaggagggataagcgtcagaggaaatggaaaaggggaaatagaaaagaggaagtatggtccatgctgcccaaaccgctgcttcttattaatccttctctgtcccctcagcagtttttctctatctttgctgtgtggattttgtccattctattatgggtgtctacctccagggataacccaggcctcttatggtttctttgtgcacacgctctccttactccagtcgctacctcctgttttctttgagcctgccagattccttcccaccttcatcctcttccagtccttgggatgacctaaattctcttctgtgcttactagaatcctgttcatctttcattccccatttccaggcccctctctttcacaaagctttctgaatctatacagcttcattctcattcacctgagctgctcacacctggcacctcacagtttagcatttccttactctgttgtgtggtcttcatttcctgacctcatcatagacatcccattgttttcttttttgtttggctttattgagatataattgaaaataaaatcgtatatattcacagaatacaatgtgatgatttgatatacatatacattgtgaaataatgaccacaatcaaactaacacatcgatcatagttacctgtgtgtggtggagttagggggtggtggcgaccatacttaaagtctgctctcttagcaaactttgagtaaatgatacagtatttttaactatattgtaaattagatccccagaacatgtgaacttactcatcttgtaactgaaagtttctacctttggaccaacatctccctattccctccaccttccagcgcttgacaatcaccattctaccctctgtttttatgagttcaactttcttagattccacatgtaagtgagatcatgtggtatggcttatttcacttagcatgatatcctacaggttcacccatgttgtgcaaatrgtaggattttctcctttttatggctgaatartatttcattgtgtatgcacacacatacatatacacacatcacatgttctttatccatttatatattgttgaacacttaggttgtttcaatgtcttggctttgtaaatagtgctgcaataaacatgggagggcagatatctctgtgacatgctgtttttatttcctttgcatgtatacccataaatgagattgctggatcttagggcagttctgtttttaagtttttgaggaatctcagtgttgtttttcgtaatcagtttactaaattacattcccactaacagcatgtaagggttcccgtttttccacacccttgccaacacttgttatctttttggtagtatccatcctaataggtgtgagggaatatctcattatgatttttatttgcattccccggatgattactgaagttgagcaccttttcatgtacttgttggccatttgtatgtcttctttaaaaatagttctttgcccattaaatcaagttacttattttttgctgttgtataagttcccgatatattttggatattaatctcttattgggtgtatgatgtgcagttattttctcctattctgtaggttgcattttcatttcattgatcacttcctttgttgtggagaagccttttagtttgatggagtcctactggtttacttttgcttttgttgcctatgctttcggtgtcatacccataaaatcattgccaatacgaacgtctttttctgtgttttattagaggagtcttatggcttcaggtcttacatttaagtctttagttcattttgagctaattttgtgtatggttaagataacagtcaatattatttttgtgtgtatggatatacagttttccaagcaccatttattaaagacatattctttccccattgtttattctgtgcccttgttaaggattaggtgaccgcatgtgcataggtttatttctgggctctctgttctgttctattggtctatgtgatagacatcctgtcttatgctgcttttctgccttattggaggcaaaagtcactggtatactatacagtttgggatcagcatagatgttgattacaggctctgtgatctagagaaagttacttagcatctctgtgccttttcwttctctatttaatrgggacaatatttcctatctccaaatgttattacttaatcttgagataatttgcttacagcatctgtcaaagtgccaaacatatagcaggtacacaatataattttgttttcctcataaatacatggttaggttcagcatggttattcatgaaaaacttyttttaaaaaattgarcaactgaataaattctaattgaatggctgaattatttgaaaggcaaaaaaggcaggcaataaagttagtctgaagtatcttcatgtaggtattcttggtgtagaagtgtagtaactctaaatctagcaaaacaagctttattcccatatactgtagctgattaccaagttcccagagggaggttggtggtgctttggggtccagtttattagattggattagatggggtagatgcaagaagatataccagcattcccaattccttccaatacaaagattttgtggcttattaaatttttaagtgattatggagtacttaattttagctttttataaacttataaatttttttaaaaactatttccagttggctttcatatgtttttcatagtatagatatagcatattacatatctatattgactacatgaagaaaagcaactagtgtgtaaaaattaatttttttgtttttgttgaatgtcattgtttcagacttctcttgtactgaagtgtagtaaaatgtattttctatttttatttatttatttattttgagactaaatgttgctctgtcccccaggctgtagtgcagtgacttgatcttggctcactgcaacctccgtctgcctcctgggttgaagcaattctgcctctgcatcctaagtagctgggactacaggtgcgcgccaccacgcccagctaatttttgtatttttagtagagatggggtttcaccttattggtcaggctggtctcgaactcctgaccttgtgatccacccgcttcagcccccgaaagtgttgggattacaggcgtgagccaccatgcctggccaatgtgttttctttcaaataaaactttattagaaaaatcatgtattataactaatattttagaaatctataagagtatggctgaagttaaaaatttaaacaagtgttattagtcttcctacataaaatattggtatggaatctgcataccttaaataaaagcttgtagttacaaaactttatattcttagtaatattgtatactctagtttaatttamatggctgtttggctctgttaatgatagaaaacccttcattattaaggacagcacttcacagaaaattgactgaagctaactttaacttgcagatggcgttcattaaagagtttcttttcataagggtcatttttcatttttatttcaaagattaaatggatttatacataattatttcaacatgacatctgttctcattttttcctttcagagctttcttcccaaatattccatgtttgtattttgtaaaccatacaaacaagttttaaaggaaaatatataatcctgagtgattacataatttattgccgttctctatcttatgcttttaattttatttaatgcatgtcttaagtttttcaacagacttttctaaatgccatgataatattaagctctktgacaacattaattatgtgtacatatattatttcgattgcacagtttttgagtgcaatgatggatccattgagaatgaggattctggaaagctctaaaagagtggcttgtgtatttttccttcttcctttttacccgctttcctctctccctccctttcttctggaaatgggaatttttttaatgaaatttcatgcaaattcaatgaatgaatggtaaaacaaatctgatccaaactattgacagaagtggaggcaggcacagaactccagcctcttcatcatctcctcrtttcctcctgaattccttttcatgtagtttcttggacagatgcatctggaatctgaaagtaatatttaatagagtattcacattcttaatagttgttatatttgtaagtcagcgacacaggttgaagccacaagcaatatttagtcttgaataggttttactttttaaaattctatttgagcttttttcttttttattaattgtggtcatttctacaactctttctagaaaactgtatttctcagatttgaatatatttgttattattagctctcttatttaaagatgaactaagtttcttaaggacaaaaaagaaaataatttttacctacaatttgatactatgtagagagaacattttctttcagaaatgatcaaaattgtgaaatctttgatagatggaagaaagtagttgtctttgcttgtaatgaatactttcaaaataaagtcgctgaataaaaatagtgatcttaygaaatattatagttggatatcatcagagaggtgatattataaatcttctaccccagatartgattttttaatagtctttctgttrcaaatgtttagtcactactgaaatacattatatgaaagagagctcaccacaaatcaaaccaatacaaaggagtattacaaggaaaaaggctttgaatccaagtgcacattggagcaagctgctattcttttacagattarctatttgttattgcgcattcagcaaattccttagcttttggtcttctgtctactaaaggaaaatttaaattccagctctgcaagtttgttgagtaataatataaatggattatctcatagacaaatgttttaaaataaaatattgctrtaggatacttgctatattgaaccaaaaactgccttgtaactttgactcctttgtcctagtgtttattttctatcctacatgtctgttaggattcccaagtcttgctgtccccaggctaaagctattcattgaattcaactgtccattgtctgacctcattttcatattccttaaacattgctcttccctgggatgcactagttaaatcttattgtggtattgggctrtccttttttgtagccatcctcagggaagccacacttgtttggcatgaccctgttgtcttggctgcactcaattgtacgtccccaagctgagcagtgagattctgattcaggcattcagtattgggaccaagggagagttaagttagtcttttccaacatgcaaaagctgtagggcttgaagcagagaaagtcaattcacagagaaaatgaaacataatttctgttctttctgctagtgtggggagaggaagagggatctcagttacttcaggactttcatgattcttactctacttcttcctgaagctacaccgtgatcctgccctttgttctagaaataaccacctccgtcagctacctagagttagtttctgatactgcagttactatttttcatcaaaagatgatgtttgttttgttgttgttgttgttttgggtgagaaccattaagatgtgtcctgtgatatcatttttacttgtcaattatgtctccataatttttaaaagaygctgttcattataagaccttcccaattcagaggtatcaaaatgtgaaaaaaatactttaatatagcaatctattttgaaaacatctctgttaaaatctagggctcagaattgaacatgaaaactggctcccctcttcccctgaaatggtggcactaaaataaaagccaacatatttcctgttctgtccacagagcccttatctcttgtctccagaaacctatgaaacatttccatttagatgtccccatcaaacgtatttcacaattcatgctcttctgccttgtcaggctggatctccttactttgttttcatagcagcaccatttaccccatcttctaaactagtgaccaaagagagtaatttgggatttttttcttctttcaaattttggcatttatttttaaattaatattttaaatcatggtataatacacataacaaagtttaccatcttggtcatttttaagtgcacattttaatggtaataagttaattcacattgttgtgcaaccatcatcaatatccatcttcagaactctttccattttacaaaactgaaacactgtacccactaagaaattactccccatttcttcctttaccaagcctctggtagccaccattccactttctgtccctawgaatttgactactttaggtaccttttagaagtaaaataggacagtatgtgtctttttttgtgactagcttattttacttggcataatgtattcaaggtttatgtgtattgtagcatgtgtcagagttttgacatttcttgtgttgacattattctgctacttactcttttttttttcctatctttatgctgtcgctgacaactagaaggcctaaggttttattactttgcacctgcgctactgaaataatgtcctaacaggtctctggagattccctccctgcttactgtcataatctgtaatgcrtgaatartctttathtacatggctttcttctgrttgttgacaataggactatcatgaatggacctccatgggtggttagtgcaatgtagaggtccgagataaccccattcttgctaaaaacattacacattttcatctaatgtccccgacgtagtctatcccttcaatgtaatttccgagacctttacaatataggtagaccctttaaaaaattaccgtgtgcttaaatttatattccaccattgttagccaaggrccttcatttcaattttatagtcatttaattttctcagtgtttatatctgtgtcttcttctttttgcctttaattcccctcagccaaaaatttcagcatacttatgatctatccaaatatgtgttctgtgtatagcttatctttttcattaaaacttcactattgtttcagccctgtatagttcacttagttacacgtgtaattttaaacactgttgttgactgtgttgtactggttagaagccayattaactagatttcagtttcttgaaaatttatacattagcaagcatagtgtaaatatgtattaagtgggcaataaatatttgytgtgttagtggcattttaatagtacatgatggaataaatgatagatgtgttgtaaaagcttttattgcatgattgccagtttctacctcattgttgtttctaaatctcccacttttaatttacctgaaagtgctttaatgtgtgaaaatatttaagaaattattagtgttccttttttctcctgagaatcacacggacaactttttttgatttaatctatattttgtctagcattatcccaacattagaagtagttaatgtatccataggcaattgttagatacatatgtaagaaagtgaaaaaccracagacagacaaaacccacctaagtcaataatattggcaataggatttagaatgctgttatggcacatgagatgctccacatcctacctacatggaatatggggtatgtgtaaagaatattgtttagccctattttttcgtttgtttcttttgaactactccgttttccttaactctccttatctttttctgaatgaccttaaactcaaggtagtcrttgagtgggagggatgatttttagccatctttttcctccaactcaggtagataggatttaccagcttggycttaatttcctcctttctgttaacattgaaaaccatcatactaactgtaaaaatcaaatactgtaataagagtgagggagtgcatgttttaaagtctgtmgctatattagctcataccacatatgtggcaagaagcagatactgtacaaatcagttcaataatgaggcattgaaacacaagttacatacygtgctaggaataaaatgataaacagagtaacactatyctgtccttttggatttttatagtttagtaggaatgtattaagtaatgacaagtacatgaatatgattaaagggatgtaaaatactgaatagcaaagggattttactttgtctatgggaccagtgaaaacctttgagaaagtgttctttaaacaaagacttgaaagttgagcaggaggtagccaggcataaaggaacccagagagttttccaagtggagttttccaaaaagcatgtgtgaagacttgcaagcttgtrcaacccaccattttttttgttgttgctgttctgttttgttttgctttaggattttagcagcctgaagccatggatctttgtttctgtctctagttttaagtggaaaagtgggctgaggaaggggcttcactggcccagcaagaaacagaaatttggaacccatgactgtatttctcctgtggacaccccctgcctaggacaagagagagctgtgctgtagaatgctggggaaatggaaaggcagcattggtggaacagagagcatggagaaatcgtcagtgctgggaaattgtgggagctgagcaacaagtgtgagatgagacaggtgggggccaaatgatgcagggcctagctctacttgtcaaggattttgaaatgaaccttaaaggaagctatttaaaggcttagtcaagggcctattatggtgtgatttgtgttttaaagtagccattcacctgcattatggagaatgaaatgaaaggaagccaggagtaaatgtgggaaaaccagcagccaggacagtggaggagagcatctttgaccagtgtgatggtacgggagrgtgaaaatagatggactttagagacgtttagtaatagttttaaactcatgtgctgtaaattcgatttgattttaagaggtgacaggaaggcaggaggcaacaatagctttcaggtttataccttgagtagttctgtgaaaggtgatgatagataacagaatgtgattcctgagatgagaaaaactggccaaagaacagattctggagagacggcaaagaggaattctgtgatattatacattattgtatgttaatatatagtgtaatatttatgtatacgtatatttgattatatgcctataggatacygattttggaatcatccctccacaaatggccaataaggccacggaattagacaaaatatattgggagcttgtagaaaaagaagcactcttgagaatacaagtacttaacaagagagtagargtgaatttagggcagacaaccatagatttcaaatcatatagcaggaaaaagtcttgtacatcatccaatctgatataatcaaaatgaagatgaatgaaatgaaattctgtcagactgtataaatttctctaagtcaygcatagaaagtctcctaagtctaygtttcttgtgtaggttttgaaaaatacaattcagcttcctattgatattttgtctgaattgaattatatattgcgaaggtgtcaaaaatgttttcctatgtttaaatttaacaccctttggtggcagcaaattttcacatctctcttgagtattcaaatttgttaaaatatgaaacacagtgcttggccaaaaacagataatatttgctgaatgaatcaaacgggtttctgagacratcaatyctttaaagatagagactcagttatttgtctttttcttctgagcsaagtacaaatacttacataacaattatattgaattattgttatttttttcttgtagctattttttctcatggtgtaaactgagggcaataattggcatttttcagagcaaaagtttgatgtttaaaaatctaataaatataaaccactattagacctaaaagtatgtcaaacataatacaactctgattataaagtactcattacttttttgatcataaagattaaactttacaggattgctgataaacttaatagcacattttttttttgctttccaaaaaagcttttatttaaagactttcttttttaaccacagaatgtcaagatagttatgttctatttattgctgatttctccctttctatttttttcctttctttttgtatcatgcccatagcagctgtttccctaacccttaccccaacccacaggctttcccacgctccttttttggctctcatttggcatcgatcctgagtttgacagataaaacatgtgtctgaattgtagttacagccaaactacaatctatcagcttttccctcagggtaattatgcttattttaycccaaaacaaggtaattgttttgtgataaagtattcagttcactcggaataagccgttggcctccttttatctacttatttatttatttatttatttatttatattttttattttttttgagacggagtctcactcagcttcccagaccggagtgcagtggcatcgatttcagcttactgcaaccaccagctcactgcaaccaccgtctcctgggttcaagcgattctcccatctcagcctcccaagtagctgggcttataggcacccgccatcatgcccagctaatttttgtattttagtagagacggggtttcaccatgttgrccaggctggtcttgaactcctgacctcaggtgatctgcccgcctcggcctcccagagtgctaggattacaggcgtgagccaccatgcccggctggcctccttttatttaattcctcatccaatgataacatgctgacagatgactcaggttctttggagtcagtgtgaatgaagctcatgggatattagaattggagacagaaacagagaggcagtacaggcttcagtgttagacagaaatgggattcagtccaaacttggacacatactaggttgtgactctggatgtgatattcaatttctatgwgtttccatttcctcatgtgtaaaatgagataactacaagccttttgaaactttgatcctgaagaygtcgttttggtagatctaaaatgaatacatggtggatcccatcactgttttatttagaaatacaaaatcaargttattaattctaagatatgcatccatagctctgcagtatccaaagcacagcattaactttagttgcatgaaaatttcccaagttggtatatggatgtatatgaaattggagtggtcatggaaagcatatgtgactttaaaaaatgaaaattctcactcgaggttatcaacacccttggacttaaagatctgattgtgaattgtctaaattatgtgaaacagacaaactaccgttaggttgttttcctatgcggaatatttgacaactaaacttaaattcacaaatttaagacatgaatggatataacccacctttgtatgtgaatgcatgtgtgtgtatgtgtgtgtgtcactaaatggtcacaatttaaaacaagaccagaattaagcattcaaaaaacatttattaagcagccactatgtgccaggaatagtagaataaataaaatcttctaaagtttrcagttactttaaagtactccaaatttargcatacttcacacgtgctatataaaacataaaacaacttaattcttyattagtgtgtatttcagttgcatctttaggctttttctgaatgccttcattacttcttaaagccctcaagaaattatgaaaactcagaaggcaacctatctgatttcttaaatttaaatttcctggttaatttatttagattatttgmaaattcttctttgcccaggtacctcayacatacatggactatactacttggtcacttttaatttagaaggaacttcctttaggaacagatattttgtatagctgtaaattatttaaattcacatgaaatcactctttatattcaaagtacataaggtgagatgtagtttctttttcttataaatttatcctattaagggaataaattggctattttatttaaaacagaaatagaaattttatgaatgatggttgggaactttaaccaaaatgtacataatgtgcataaatgatgggaaactttgtttctgcaactagaattcatgctataatgtggacattgttagtctataagttaatacgtgtaatttaaccttatccctgtacttgatagatcattagttagcagagttatttatgtgacattatgtggcatgccttaatttttagaaccagtttactttttcaaaaaatacattgcagtacacaaaagtcctgtagaaaaaggtcatttgaagtcttatattagaatgatataatttccttttttgttttactttgagttttaaaaattgatttatttggaaacagattagcaagtccccaattatatctttagatactggtatattaaagaatattttacaaaatcacagtatcaaccatagcctcgagaggtaaaacttatcctattyttaatttccagtggtagcactttrtaaataaaaattatggtgtatgtgccaaaagcctggacttttgtctggcaaaggttgtttaaaacttgaagagacatcaagaaatatgtgagttcatccacccagatctagccagaactgcttttgaatggttctgtggctcatttaggcaattaaagccttgtgattgccctattaaaagtctgaaagtatgcatataacccaccagtgttttacagaggaataataggtaagatttataaaacatctgaaatgaaaaaaatgtaggataataaaagcaggtatttgttgagtacttactgagtgttcgaggcagcgtacttagataatctctgagttttgttatacgtattaaatgagttaatataaagcacatatgtgcctggcacataaatgttatgtatttacagtaacaacaataacagttgtcattgatttaattatacattattatcctaaaaataacagaaaatcaatagatgggagagccgggattggaattscaggctgtctgtctctgaagtccattctccatatcactgagctattctagttttcctrggtagagaatctaggatggccaaaaaatgtccccagagcctccctgtaagctgtcctccacaacagacttctggaatagaaagaagttggcttatgacctcttgtcactgcctagtccttgggtgtgataaagttatttaaactgtttgaactcctccttctgtaagcaggggatatcagtaatatcaatcctaaatgtgtcgggaggattaaatgagataatgcatgcatattgctgctgaacacaaagtctgtcacataataggtactcaataaaggaaggctgtccttgttgctttgaggaatgcagatgactgattccattggttctgagtgctcagtttgtggcctgactgaattatgtgcaccagatytggtggtaggtttttgtgaattgacctcaccccggttgcatcttagcttttctccaccttttaggggatatactttcctcagccgtttcatttaaattgtatttaatgtggttatatttttaaaaggtggtttttaaaggctttcttttttaaccacagaatgtcaagatagttatgttctgtttattgccgatttctctctttctgtttttttcctttctttttgtatcatgcccgtggcaactgtttccctaacccttgattagcttactttctgaaataagagcgtaaaataataaaaataatggttactatattgtgttagttttcccacaacactttttttaatgcttttacattttacataannnnnnnnnnnnnnnnnnnntttttaatgcttttacattttacataactgggaatagtattatatattgattagtgttctatatttttaaattaacagtatgttataacccattttatacattaaaagtctgtagaaattacttctatgcttcttaatattccgtatatgactgtgtcatattttatgtaagtaattctctcttgttaggcttgttgattatctcctggttttgtcagtataaataatactgaagtgcatattttagtaaattcttggttgcacttctgattactgttttcagatatatgtctgtatatggggttatagattaaagaaactaagccctctatgctttaaaataatggttttcaacctcataattaaaattggatgaaatttcttttaaaaatcttagagcagtgatttttaaagtgccctgtgacatctcctttggggttgctattgagaggggagagttacacactgaaggtggcttttcttaaatgccgtttcttttttattttattttttttgcttataccaggtgaaacttattttcttttgaggcaagatcttgctctgtcattgagggtggagtgcagtggtacgatcatagctccctgcaggcttgaactcctaggttcaagtgattcacctgccttagcctccctagtagctgggactacaggtgtgcaccaccatgtcccactgtttttgttttttgtttttttcaattttcttttagagacagggtctctaaaagacgctgtgttttttagttccaaggatgcttttcaaaatatcgagtttcacaaaaaataaagtcaagatatgttgcttcatgtggctaatgtttttgttccattttataataaaatgtaaatattaaattctcatataactcattagagaaccacaaataaatgcatttacttaataaataatttattttaaattatatgacaaccctatgattaaatttaatattgtattttttttttttttttttgagacaaagtctcactctgtcacccaggctggagtgcagtggctgtgatctcggctcactgcaacatctgcctccgaggttcaagtgattcttctgcctcagcctcttgagtagctgggattacagatgtgtgccaccatgcctggctaattcttttatgtttagtagatatggggtttcaccatgttggccaggctagtctcgaactcctgacctcaagtgatccacccaccttggtgaggacacagagccaaaccgtatcgaatatcattaaaaagaaactgtggcatgggatagtttaggaattttttaaaaatcaggtgaagaatattttgttgacttgtcatcataatttttatttacaaagatatggaaaaatatttagatcttggtgcaagtatagaaagaacactattctacctatttccaaagggcttggttatcacatggagccagggcttcggagaagagaggatgtctgtattggagagagactatttggcagtattcttggcaacttggtagggactcgcagaaaactgcagtatgactcttacctataaatccgatctccacgctctaaactcagtcaagtctcgagctcatgattgcttacctccgagttttatgttatttttaacacaagaatggtctgagttcatgcggaggttgactgatgtagggtagaggctaccctggaataagctagcatccgagaggaatgaaactccattggtaatgacaagtagcaggactcttggccaagagttaagttggggcaggaagtttgaactgactgctgaattgggggacattcagggcaattgtacacgtattgcaagggacagggaggctccaggtgacagcttggttacatgattttttttcaagagcaatgtacaggaagcacaggccttactttttattgttgtatggagcagagtcccagaaggaccggctgtggagtgctgaataaaatccctgtgaatgcacaccgrgttctctgaaaatacaagcttctagtcatttctgggttaaggtgtagtccatttcgctttgctatcagattacacataagttattgagcaataaaaggaagaatgtcttgttctttattcatatgttctaaatctggtaggccatcgaactgtactttaataagaataggggaaggacaggtatacgagtgttggacttgttccatattgtcccatttggcagaacaggaccaaaaagtagtctttttctttttttctgatcattagaggtatttaagagcagaaacaaagtttggtggggataaaatagagaacactgaaatggtaaaaccacaataatattgacaaataggatagttatattagacaaaamcatgttccttgagtctggaaattgttagtgtcaagttacactatgtattaaggcaccgtaacatattgtggcactgacttttaggcacatatatttgtatatctttctaatttttttcaaaagtggatttttctgccatttatrtttgccatcgtataaataaaatttttatgttttgatgttcaacagccattttatactaataggagctctaactgtgacaatcaaataaattaatgtttttatacatgtctttatcggacttaaatctgtgttcacaccagataacaactcaagactgtgactatgctattggctatgaggagtgttgctttaattgcagcgaagttaatctgtagaatttaacaattatgttgccatctatcttaagggtttataactctggtatagaataagcaaatagcataaaacacttgtacctgtgtgtactcctcagagttttattggtaataaaaaaaaaaaaaaaaaccacccatgctcacttttgtgcttgggaacagaatctgtttctaacctttgctattaacaggaagtgggagaggtgaaatgagccctggttttgtggccgggccagagcactctgtgttcctgagagtggtattcaggtttcatgtctgtctagcttcttgctcctttgaatagctggcctttgaagtgctaaaaacatagattggtaatgagcaatgtaaagtaaagagtgggaaaatatttggaaaattcaagctctgagaatagcctgtctgggatgatttggctcaggctgtgttgtaactgtgtttttctttcccaggtaaattgtgaagttttatgaatataatagtataaatttcctctataagaataattgaaaaatctcaacttcacttgcgtttttggtagaacgattgctatatttagtttaaaattttagggcggcaggccgggcgcaatggctcacgcctgtaatcctagcactttgggaggccraggygggcggatcackaggtcaggagatcgagaccatcctggctaacatggtgaaactccatctctactaaaaatacaaaaaattagccgggcatggtggcgggcacctgtagtcccagctactcgggaggctgaggggagaatggcgtgaacycgggaagtggagcttgcagtgagccaagatcgcaccactgcactccagcctgggcaacagagcgagactctgtctcaaaaaaaaaaaaatttagggtggcactaactgtcgagtcttttaaaaagataatctatgccttgaagtgccatttttatttttgtaattacaaatgggtatcagaagaatggaatctaatatgaagttgaggtcatatattaaatctaacacctttgaataaaagtagaccttttgttccattgcatgttattattgaggggcccccattataatacaacagtggcctgttttagaaaatattctctatcagaaaaacaccataatttaaaaagacatatttccaccaaagtcacattctaaaatgtatacagaaggacatggaataaccgcatatagacttagtgtatcatgtccccattcttccaagaaaataggcaaattttgttaaacagccccaaaggtaaatatgaatatttttatatttttagaaaggtttgaattttaaaagacaatcttagttctagtatgtttatctcttgccttggaggcagttcttaaaactataaaacttgagttgtgactgtcagaatccaacacttatatgtttatttggaggacataattttaaaatactgacatctttatctaatttgttatattatgttacagtaatagtttaatattgtagtgcatgatattagacttgaaatgctagaaatcactggaatgtatagccaatgaagcctgggttgatttttgatatttttggattatatagtaccaaattataatcccatattctatattcagatctctgaaaaaagtggcctttcattgatcaaaatatatttatataaaacattttaatgaagaatacctatttataaaatatscagaggaaatatatgcagatgtaaaattgagcccaataaatccttgtgttttcataggtatgaaagttacaataaataatggcaattagatattgtgtgtgtcagaaaatcaatttttctcccaaatcaatccctctctttctttctgtttctgtatctctttcacagacacaatgtaaacacctatgcatatgtgctcatatctgttttagttgacttctttcttgagactttaaattctgaaatgttttacactgcatgtacagctaagattaaagtcttctttttaacagtacactttttataatgccttgaacttgtttctctgtggcagaggaaaacagcctcatgcacctggacaaacaaaggtgttccttcaaaaacagactttcagaatcattaattctggtttagaaataattatgaaggttaagtggactctcatgcgtaagattttagagctggtgagtggctaatctgtgctttacttccccttgttttcatccttcttataccaccggtattaccgtgcctcctcttaacagttttgttccctctgtagcaagtgagccagagacagtgcttcagcttcctatagcctcctggtggtatgcagggacagctggctgagatcatatgcacttctacccaaacatatcccaaggtaaggctacaggtagtaaagctgtgaccagaaggtagatttaaaaaaaaattatttaggtcctggaaatatagaaagagcagatagtgccctatagtaataaccaagtgagcaataactagggtgtgagtggagttattgtgtttagtctaagaatgaagaaatagcagtgttcggtgaagtggaatttggtgaggcatatacaaaccagaggtagaaagtagtggatttttgcagtttcatgcataaccgtaagtgcagtattaaaaaaatacatattgcgaaagtaaaacttttaaaggatacttctcagcttgaaattcttaatacattgtagcaatcatattagttcttgctgtaaaataaggtggctataaaataagttagtcaattttgagttgtgagttgaaaaggaaaaagtagtgattaatggagacatgagctaggaaaaagcatttggagagcggataatttacatcagtaggcctctcaacttttctttacctccccactgccctctttcaattacttcccttagatcacaagtttctgttttagtagaaaaatttttctatagatacaaatagatgtaagggagcataaatgaattcctgattactctgtaagctaagaatttaaacatatgttcaggattgtatttttataaaaatttttattgcaaattattaatatagattcacagatgaataaaaaatgatgtggtcctatttatgtaaagcaaaacaaatatttgataggtggtgtagaatgatgtttacacctgnnnnnnnnnnnnnnnnnnnnaaaaatatgcaagtttatatcactcacactgtggagaaaaccagtcagtaacaaactgttaagtcttaacagtgattataatattgaaaagaacaatatcaacagtagaacaaccatatcaagacagtggatcatgaagcaatgactataggattccctcctaaatttcgttcatygtaacacccacactgtgttctgtctctgtgcacagcacaacaaactcacttcaaagccaaatgaggacttggcatactcaggaaattctagtaatgagatgctcttagttttactgttacagtatgtagcacttcatcttaggcaaatatgacagtctgtggaatcctgtgtcattcatttgaaagaactgacaaaagaacatgtttttagatcaacttgcatttgcaggaacacacatgggttgccaaaaatatccatttagagtgtttaaaagaggcacacgcctggattggcctcggtgaccaataatgtctggtggtaatgcgtgttttttggagtagtctttaattactaaacaaggtggtgacatacataaagccagtgggttttttttccaccggmagatgggtgctaaagaaactgagcgattttatttttttcatcatataatatttctgatggtcttgcctccttcaagtctcaacatgtgtctctttaaagagaatatttcacctttcaaaatgaagtctcctaatgactcacttaaatgtttattgttttcttgccgtaaggaactttgtgacttgtaaatatgaatttatgtatgcatttttgtatgaataaatacatttataaaattgatatttaaaaagagctagcacttaagttaggccagacgtttttctaagcactttacagatgctaattttctaatcctttcaacagccctgaaaagtgactttcatatttaggattgaatataaactcattctaagattgtctataacctatttctgtgttgcttagcatagttctatttaasagaactaagacaaacatatagaaatatgatgatgacaatgatgatattatattactttcccaagtgtctggcactatgcgtatttcaccaagcatttgtagagaagcggcagaatatgatgattatgagcctcaattctggaatgagactaacctggttttaaatcctggctgtgcttcttacaggttgtgtgatttgtggtaagttacttaaattgtctgtgcttcagtttcttcatttgttaaatgtgtatgacacctatttcatagaattgttatacagattacgttaattactaaaaaattatttcgagctcttagaatagggactggcacatattcaatacaaaataagtaataaaatacagaggtatgtatttgaatattcaagacttcttggaaggaaaatacttaatgctgttgaggaaaattttaagcaattagaatggcaactagaagagattttgtaacaaactatagtggattatctcacatatttatccctcattcaggcaactacacatctgagttctctgcttgttactagagctcatggttgctggctccgaatgagaactgaatatgaaaattttcagtttgtgaaaaacatctggagcttttagttgactacaagcttaatatgagccaactgtatgttgcaactgcttaaaagagaaaaaaagaataaaaaaccctgaagaattccttaggcattataaatagaaataagagtgtccacatcatgggaagtaacatagttgacgtacttcacactggccgcatcacggctggaataccatgttccgtccaagacaccataattttaggaaagacttggacaaactggagtgccagaagtctggaaatatgagaaatggaggaagtgggactgtatagtgtagagaagactaataggaactaaaacacttgtctccaactatttatamggttgtcatttagaaaaatggacacgcttatatattgccctagaaaacaaagagtagaatcaatataatgaaagtaccatgtatatttttactcagtattaagggtgaaaactaatgggtaccagtgctgagtcttgcagcaatcatataagaattcctgtatatggccgaagcttacattcagttacattcactaaaataagatttttgcattcatatcctcattgggcttgggcagtaaaggaattaaatcccccaaaagttcattaaaattttagggctgttctatgattgcatggatggttaaaattagacctgatggcactattggttattctaagaaaggagctaaaagtctatataattggtttactttttattcagtctagttttkaaatcttaagaatggatcaaggaacattggatgaagaagggacacagggtaatgttattttcccaaatttcagaaattcttccaatttaggttcagcaggtaattaagaatgatttcatgcatgtcagcaaaaatagtttgatacaggactcattgaatattgtattgtgttgggaactgatcagagaaaaccatggtgtttgtccgtgaactctcgttgctttttatctaagaggggttgaaatgttgcgtgcttttgaattttatcatggacaatacttgagatttgtaccagtacactaagggttatttttaaggattgagtaaaatggaagtgtattaatgggaaatagaatagaagatagctatagtatgaccttggaaactgactttacgttttacaggcatgtttttctttccatatttcattcttgtatcttgaaataagctgtacttatggttaggtatatgctagatcttagaattcctttaaattcatcttgtcaaaatatcagccattctgtatgaatattaccaagtttaagacattggtttatgttcaatttcagcagtttgtataactgatttgaaaaagcaataaataggcttcawaattttatattttttataggaaacaggtaatttaatacatttaatacattaatacatttataatgtatgtattttttcatgaggtagactatgtaaaaagtaaagaagatgatctaaatccagaattaaaaggcacagtcacatttttttttcttttgcagcattggatagtatcagtttgttataatctagaatatataatatattctgtttttacatttcttaactaaatcctctttttaaaatataaataaatatctttaaaataatattttaggccgggcatggtggctcattcctgtaatcccagcactttgggaggctgagacgggcggatcacgaggtcaggaggtcaggagtaatcccacatcgttcaagtcagtaatgaatttatttgaatcaaaagtggatacatttaaggaattgtttctatacatccaattaggtaattctggttggctaaattgagagctggtcataatcccaaaagacacaattctgaatgtcataattctgaatgttaaaatcccagaagagtaaaatctctaaagtctaaaatccagaaaatcacaatccccaaaacatcaaaatcctgaaaatgtaattctgaaaaaaattaaaatattattattagtagtagtagtatttttgagacggagtctcgctctgtcgcccaggctggagtgcagaggtgcgatctccactcactgcaagctccacctcccgggttcaggctatcctcctgcctcagcctcccaagcagctgcgactacaggcgcccgccgccacgcccggctaattttttttgtatttttagtagagacggggtttcaccgtgtttgccaggatggtctcaatctcctgacctcgtgatccgcccgtctcagcctcccaaagtgctgggattacaggaatgagccaccatgcccggcctaaaatattattttaaagatatttatttatattttaaaaagaggatttagttaagaaatgtaaaaacagaatataggccactttacacaacaaaatatgcaataacaacatacatgcttttgcacatataaacactcaagtatgctaatgacagtcatactggtataatagttatgacaagatgaactgtccttataaagaagtaggtcaaaaaaggacaatgtataaatgcgtaccactatgattgatagttgtgtgcaacagctttctaactttggtcatctgaaataatataatgagcaacctaagtcttttgacaagatccatcaaaaactgtgataggttaccaacatatatgtagtcacccaaagagctgagatctcaagaaattttatatttcacaaatgcaaatgtacaaaagaacatctcttcatttactgagaaaatttcaatgtttttacatacgtacacaacacttaacacaaagtaaacatagttcacttctgtgaagtcgaatttgcaaaaaatgcataaaacagaactctcaaagtctctatacagtttatacctccagtaatggaaacgatgtgaagatgaaatacataacatagtgaattgctttacggggtttctaggtattcctcaatcctgtaaagttgacatctacaattaagcccatacgttctagtgataaatagaggtcagaaaaatagcatacgtgggtttggcttctgttttccttctttttttcttcagttattcttttgactgtgttttcttattattaacccttgcctcaaattgttccctgggagagtgctgcaggctacagccctttttcaaatggtgaaaaatttgagagaatagtggtatgaagaacattttgaatgcaaggctgtttagttgtgaatattgcattgatcacatctgtgtttctgaagctctgtgacttgctctcctaagcctagagcaatcttcactgaactaactctgtggggtaaagaaatggttctaagtaataataataggctcactttaacttagaaggtagatattgttgagtgactttagttagcatctgctgcattcaaaacatgctgggaggtgagggattatgaaagagaaagttgaaatacatagatttggacaatagaaaaagtatgtttaattttttctagttattgttgatgttttattttttaccttcatcatttcagtttcttattttgtttcagatacagaaacatcaaatccatgttccatacatcttagacactgatttttttttttatgtcattttgacatccctccagcacccaaatgccaacatctgctacattttgccacacggttgtaggcttgaactctgaaatgcccctaaatgtttttaaaatttctttgtgtatgttttcaaaataaccttcctttgagttctcagttttatgtgaactgtagttaaactcttttttttccatgacttgtagcatatggtatttaactgtttgcyagtatcgctttctgaaatgaacctatttgtacaaaggcattttaagagaacagtgcacttaatcagagaacctccttcaaggtgactctactgcttaaacatggtttaaaaaaattaaaatatttrtggctcagcattgttgtttcattgtctatcaaagttaataaaaataactggcctttgagaaagagtacacctttaaaatttttgaaggccaaatgatttttttttatttttcatccagaartatctatccctaaaggaagagaaactttcttcagaaaggtatttgttttaatcaaggaagtttctgctgagattaataacttggtatcatcccttagttcctgrtaaacatcataccttaaatgagtcttctgttttttaactagtttttcttttgtctaaaacaaaattgcctcttttgttttagagatgaattactcaatttttaattgttttgggggcagggtgcattattttcctattgaagaacaaaatgtaaaacactgccctgaaaggaatatttgcaaaaccatgaaagtgagcaaagttgagatgggctactctatagaaattttgcattttattctaaaatactgtattttgccatgatttgttccctggtgtgtatagaagcattggctgcagcctgaattcctgagcccttcagttctccacttttagtgtatataaacacaatttcactgagcttggaagaatcatgttgtagtgaaggtaatattattggcctctttcttttgttgctttgctgctttgtggagagggataagtttattgtaaaagcttctttaaatccatgttcttatacagggctatagatatcttacccgtcagttccaggcaagtcaccctttctgggctgcagttagccacaatagttaaatattctggttttttggaagatttttaaaaaatctctattctatccacctagttctgagagagtatttccctcagtttgtctcatttgtgggaagaaatattatctgcccgtctttattactaccccaatatcaagtttacatatttatgtgtttgccattctataattacgtctgaaacaggttgattatctattttcaaaataaaagatacagaatgaaatgaggctgtagggagaatgaatgaaccaaaaagaaaaaaaaggttttgcatattttaatttctgaaaagtttctccagtaggtttatcagatgatttttgttgttgttcttcacagaaatgttgttcggccatgtatgttcatgagggaaaaaagttctcatcctttgagagtatgaggattgtatacacgatgtatataatgttggagaaaaaggtttttattagtttcatgacattagtttccttagctgcctttctgagaatggtccttatgtttaagatgggggcatttaagttattgtcaggattaaattcaatcgaaagaattaagtgttaggaaactgtgccttgcctgtcaaatagtgactagtcaggaaaamacacacacacacacacacacacacacgcacacwcacgcacgcacaaatgcatgcacacattcctcactgctattttgacgtatatgtacctatagtatgtctaaatttttcatggtattagattatacttcaattatttgaaattaatttaaagaacagaaactaagaggaatcatagaatcaaagataactatgcgccttatctcaattgtgtataaaccttttgaaagaaaataggttcatttaatagtttaataacacattttgcagttgttgtaaggttcgtaagtttttgtttgctgagtattaaggcaaaatttttaaacaaatgaaattaagtggcctggtgacctggcttcaagtattaatctgtaagcacttttaaaatgcatgcttagcagcatggtttcttttttttacaaatcttttgcaaagagcagtgataatgtgccaatgacaatgaaatatttgaacaagaaaagttgtttttatttatrgagaaacaagtaaaggccctaaggtggttaaatgattgcttaaagtcacacagaagtggcatggctctgatttcccagtttaccagatacttagatactcttttcaatgatggaaaagcaaataataaataatttactttctagatattgttgaattcttactatgtttctgggcttctatgagatgctggaagatttcttaaaagtgaagagggtgaaatggggaggtgttagtcaaagggtatacagttttggttatgcaagatgagtaagttytaaagatctgtgtagtatattgcctacagttaacagtacatactctgttgtagacttaaaaagagggtagattttatgttgtgttcttatcacaaaaaaaggtgggaggaaayttctggaggtgatggataggtttatggcacagattgtggtgatggtttcacaagtatatatatgcttatctccaaactcatcaagttgtatatatttaatatgtgtagctttttgcatgtcgatcataccttaataaaataggtcaaaaaaagaggaagagcttcaattatttttctcttctttcctttttccataccttcataaaaattcagagtgcaaatttcttagtttatttcacctactttctgagcaatattttttaaaacctgtgttacatttcaaaagcaatattcaatttattatggcattgactagaataacttgttcttgaaacttaggtaaatggttatgaagtaatcaaaatgtatctttcagtatgctttttttttgtgctggagtagaaaacccaactaaaaatgatatacattttaataaccaaagtatattatctcacagatggaagtctrgaaggtcttaagggtgactccatcaaggagttctggctccattttcccaggaattctcttgattttgccctcctctaaatgaaacaatgtaattgaagcacttctgaacctcatattcaactataacaatgaatagatgaagagtgaggaagaattttcccagcagcctccaaaaatcctccttttattaacctgactaatctttttttgaactattcccttcgaagggcagtgggatcactgtataaccaaactttggtgggacacagcagacctgtgacactggctcacatgggagaggagtaaaacaccccaggaagggagaaagattatggacagctcaccctgccccttagaaaaactggagactatgtgttcctgaaatgaaacaagacaagtgttcattgcactctgagaatacattatgatgtagaaaaaaatttgagatctataggatatgaaagtggcacacaggcttggaaattacagcaattagtggtaatgtattatcttgggtactgcttggggtctctatatgtaagatgactttaaatatatgaaaattttgacaaacattgatactactctctcaaggaagctgtgtatttcccatttattttgtctgcaatctggtttttaataaattcaagactcaagttaacttttaataaatactgtacatattttactatcagaattttaagaacagcatacgttttttaaaaaaatacacaagatgtaattttagtaaggttaggaagagcatgtactgctggaagtatagttctgtaactacatagacaaaatatatgtcttctctgtcacaattttgccttcagattcattgtttgtagaatgtttcttaaggcttcacagatattgtaatttcttatagatggattgtggagagagatcatgtgtagatagaattcctacrtggtcccagtgttttaagtatagtagtcttctgccactctaatattgaataagaagtgctagtggaaaaattgggtgatcgattacttatttccactctgagatcaggtctcatttaccttgaatttgatttgttcttcctcagactcagtgtttctgatgcaggtggtgttaggctcccacattgttaaaataatgtgcaacattggtattcttttaaaataccattaacatgctttatctttgttcatttgtcaaatcaaggctttactattgaaggtgactttttttttttcctgcgtttcagctgagtttctcttacaatagtcttgactgctgcctgtttttgctcatgactactgattgcctgtaccctaaatcctctctggaccaggaagggaacatacatttgcaatgttggaaacttggagttcgttttcattgaaattctataggggctttgaatttgtgtggggtgttctgtgtatacaaagtatagaaaaaacctctattgctatctatcttcatttaaggggagagccagggaggctgtttagaattaaatgtttttagagagtgtttgctagcttttagtaactcctagacctggtaaggatcaggaccaggcaggtgtgaggactatacctgttaacaaaagcagccctgatccctgtgctgagagggagtatagtgtagtggcagggacggggaaagcagatacatataaaatcatatgacatgtaagaaggggaaactacatggtgctgagaagaaactatgtttatttcatgaaatgctgactgagctaagatctagggagaaatcagaaattaaattcccacaatatcatgaagaatagacttgaaaacagtatgagccttggctttcccttatttgagtcaatatgctgattgtatagagtgggatttattccattgggatcatattttttcagatactaaagagtaacttttagtttgggaagagcaaaatgtctccaattatcccaaggattaaaaactttaaagcaacttttcattcatattaatgtgaaaaagaatccacttagaaagaaatgagggttccacattgaaagacactttagcatttattacattgtgtattgttgaagtaagacttcaggtattcatttgattttaaaatatgtatggagcacctactacatagtaagcattttcctgagtgctggagcacagcagccaatgaagcagaaatgtcctggggggccttgaacttggaggtacttcccatttctcactctgtcatagggaatccccactgcattccttgttactgtagagtcaactgtgagattcttggtcgtggaacattttcattccattactaacatcagttatctctgactagcatttgtattcaggtcgattaaaaatatccctctgctgttgaatgaaatcttagaatcttaattcttctacgtcattcaatagaatttaggcttgtcttccagatttaaaaaaaaatcatctaaggtgcagtatgtactgaaatagtgaacctggaacaaccccatattccaytgatattctttttttttcctggttatacaactgctggaacaatagtgtaacaatgtcaaagaaaatttgtctgggaggtaggaagattggtgataggaaaagtactattattatggacaagctctagatttgggagtcataagatttgagtatggttcctggatctaattcctggtagtaaggaggccatgcrtaagtcgcttaccttgaccaatctattttctacttttctaaaatggtaattctatttgctctgcttaactcacagctcttgtaaggatcacatgagaaatgctcagttgtttttatactgtcatacaggcacaaagctaggggtgattaaattttagaccgcaagtgtggactaaccgttattagtacaatatagtgtcagagctgggcaaacaatttaaataagggaaactggactttgttctccccatcccacccctgcttttttgttttgttttgttttgttttttgtgtttcttgtgttgcattatacgggcaagattgagatttttggtgtgggaggggtttttctggtgtccctcaaattcaattacgtaggtaaaggtggaattgatccttgttactcaaagtaagacttgtcaacaaactcagcattacctgggagctgctagaaatgcagggtctcaggttccactccagatggctggatcaaaatctgcattttaacaaaatccccacgtttattgtatgcaaattttcctaaacagagaagttgacagatttctaaaactaccctgatcattccaaaagactctttaggaagttacrgcttcaatgacagcagctgcgagatgttttagcaccacctgggagaacgggggattgggtgggggagaggggctatactaaaaaacaaaacaaaacaaaaaaaactatgctgctttctgttcccaaggaaacattttaggggtgaaaggttcatattccattatcagtcccctgagcccaccagtgttcaaaaatgtttttttcccaagacttttatggcacttaagtcagactgctcctattggaataacagaccaaaaatgactgacagttatagtgtctgggattagggagaaaaatatttagtgagaggaactgggagtttatcaggagacatgaatgatttcatctccaggattctggttttnnnnnnnnnnnnnnnnnnnnnnnnnnnnnnnnnnnnnnnnnnnnnnnnnnnnnnnnnnnnnnnnnnnnnnnnnnnnnnnnnnnnnnnnnnnnnnnnnnnnnnnnnnnnnnnnnnnnnnnnnnnnnnnnnnnnnnnnnnnnnnnnnnnnnnnnnnnnnnnnnnnnnnnnnnnnnnnnnnnnnnnnnnnnnnnnnnnnnnnnnnnnnnnnnnnnnnnnnnnnnnnnnnnnnnnnnnnnnnnnnnnnnnnnnnnnnnnnnnnnnnnnnnnnnnnnnnnnnnnnnnnnnnnnnnnnnnnnnnnnnnnnnnnnntttacatgtaattgcgaattagccctcacttccagtcatggcaaggtttaggattaaatgatattgaactagctttccccttagtaacattgcttttctttgcaggatgataaagctaatttttaatcatacctcctctacagttttaataattatgacttttcttctttttcctcttttctttttgcctcctgcctggagtcctgagtaaaatttaagattgtgtgtgtgtgtgtgtgtgcccttgacgctatctgattcctttgagtattgactacacatctggactgtgctactaaacaaagttgagagtgttggatgatgtgaaataaatcaactttgagactagagatgagtggatggctcatgacaaaaatttcaggctttatttttccaattttgctataaattagttaaaagtttgttatggccagcatttgggaacctgtgttgcatcagactcagccttcattcaattatttaacatatattgatcatatccctactatatgctattagtattatgggttaggccattcttgcatacctaaggttgtgtaaattataaagaaaagaggcatttacccatacctgaggctgggtaaattataaagaaaagaggcttaattggctcacggttctgcagactgggcaagcatggtgctggcctctgctcagcttctggggaggcctccaggagtttttactcatggcagaagggaagcaggagcaggtgtgtcacatggcgagaaagggagcaaagtgaacaccgggagggtgccacacactcgtaaacaaccagatttggggagaacaaacttactaatatgagaacagcaccaagccattcatgagaaacctgtcccccatgatctcatcacctctaatcaggcctacctccaacattggggatgacaattcaacrtgagatttagaggggtaagatatccaaactttatcaaggaccgtaatggaaatagacttgtactcatacagcttacattttatcctagtagacatgcctttgattgcatagcttgaaaggttgaaatgaactaaattgagggttgtttatattaaataaagctattttcccccaattttagctaaacctctttttatgtaaagaaaaaggattttttttttccagtaagatttaccagtcaaagcaggaaatcattttgttacaattgtcttacaaagcagccctgtgcaaggctgttgctaatgttaagacttttcttgggggtctccgatagctgattctctctcgagaagtcttcctattcttggatgtagagtgttgctaaaaagaattagttccattttctccagagtgctctaagttatagctatttatcttttaaggaagctcctaagtatccacaggtgttcagccccctaaaatttcaatttatcttcagcacagccagcttttcagtgtttactataaggctttaaccacatggtaattcctcccttaaagaagtctgctgtatataatgttaaggcagggttgtcagggctgttatgctgtgtcccaagccaaatacatttctcarcattccaaggttatgcgaatacacagaaataattattttcagatgttgacattgcacttagtgatttagtaatatgagaaaatatggttcaaaagttattcatctaaaaagcaatgcaaaatatagtagagacaaatatggtatgcattcaggcacatactgtgaagtagaaatgttggagtgatttagctttctgtcataacatctttatcacacaggatatggacttgctatgatgtgagttagcatgtttcctctgacacaactagagtccagagatgtgccttgcttctagtccaataatcactttcaatcactgagccagacccatgattcgtggattctcttgtcacttaagatgttgtctttttttttttttgagatggagtcttgctttgtctcccaggctgaagtgcagtggcatgatattggctcactgcaacctccacttcccaggttcaagcgattctcctgcctccacctcccaggttaaagcgattctcctgtctcagcctcctgagtagctgggactataggcacgtaccaccacgcctggctaattttttttgtgtttttagtgaagacggggtttcaccatgttggtcagggtggtctcaaactcctgatctcaggtgatctgcctgcctcaccctttcagagtgctgggattacaggtgtgagtcactgtgcctgaccaatatgttccattcttaagtcagttttgaatgttaaaaaatgaaatctttacagtttcaaaatataatttttctgtaatgatccagaaaataacaataggacttttaaaaagggcttttcttagctttgcaagaaaagagataagagcagaaaggttcactttttgaagagamcaagactcactcagttggaaagttactctaaatttactttttcctaacattgatttatgacattcagtatgaattttgtctgtttatatccacatatcatgtagtcaacatagaaaagggaaaaacctgaatgaagttttattatactcattgattctttatatgcatgaaaggggaaattatcattatttcttaatagtctttaaatttctacggtagcatttgaggaaaatgaaatgaactccatttgatatatgacctattgcacttaaaaatattcagatcactggttattgctgactgcttataaggcaaaatrttttgattttactgtattgttcatgctgcgagcaaaatgggtgtctgctaagtttttattttaaaatgcatatttctgtctttaccttgtagccttgcaatgcgtaattcaaaatgtttgcaaagtacaagtttattatattgtttgtctgcttcttattataactttaaaaagaaaatgggacaccctcctctcaccccaccctagagacagattttccatgacagaatagttttaaacatcaggatattgcataagtcagtctggaaaaaataggaacagacagctagcactatctagtagagctttgcttttgtgacaacattttttgattaaataactctacataaatgataatttccctacatagtttgataccaatatctaagttgatatcaactttcaaaatccataattgtttctgtgtacattctttctgattgtttttatttgggtactgtataaaaaatgatgagaatttaaaagtcattgtatgatataaatccaaagaaatctaattaagctctgagtctaatgagtgtgagagaaacctgttcaagggatgtttcaaagagttaacattgtggtggggtatgaaaaagtgatggtgtgtaggatattgccttgctccaggttttacaaggaatagttaggatttaatttttggcccccaaaagacttaaattttaacgtaattataaggaaaaagaaattggtggcatggctgtgtgatcctatgggttgcttgggactgagtatagtgaaaagtttgtgaagtagacgttaatattcaaagcccatttcagaaaagttgaaatcagagcagtaagcaaaattattctccaagtcccttttaattttatttgctcacttaagccaaaagaactgggataggctgtatctttttcacgttacaatgatcaaactacaggggccaagtgcaattctattcatatttcttttcaagggcaaatctatttctcaataagtcacatcacttacataacacttcttgagtacttgtttactacagcctggacaaagggtatcaaggaacagtaggtttacttggtggtggagtctgaggaaaaataaaactatttgttaacagccagttgtttacaaggatccttatctagtttgtgaaatctttatccctgtgggatgaagagtgtgatctaactcattgtggaagcttagctttcttccctttctgctcctggagctagaggttttccatcagagatggatatattcttttgggattccttatcaatatgccatgccattttagaatgacttcacctatctcacctttgattatttatgagtaaaaggagggagaaaactacccgttttgtgaaattgtttctgacacatgaataaaacattatgtatcatactaataaattataatgaaattgtatgccaggattggatctaattccttgaattattcaacagtgaagctcagtaagttcaaggcactaccacaaagtactgttgggagtataatggatacataagaagtaatactggttaaaggaaaatagaacataattgagaaaaataaattctgcaaatatataattaagtaccatgaagcaattagaaactgtgttatagtccagacttgaaagagattatttcctgaggcaaagggagcattcatggagtagagtagtcattgagtaggatccttcrtggagcagatagtcattgagtgggttctgaagggtgagtggaatttgaacagggagagacctgagaaagacgtagtcgaaggcaacatcattagtagcagaagagtgaaaaaaatatrgtattgaagaagaatagtgcaattatgtaatgggtcataaaatggattagattgacaagttaattctcactaagagccaggtactttgctaaaataagcattttacataaattatttagccctcacagtaaacctaagaagtagaaatgtatggataaagaatttaggacatgatacaactaatatgtggcagcagatgaacttgaaaccagggactggggtcttgaccactaatctctgttccctgatgttggtatttggtactacagggaaggatggatatttcattctgtaagctgtggtcactcacaggatgtttttgagcagagtgagcaatgtgttcctcccaattactctgtctcatctcacccatccctctcttcaaccctgcctttaaactacygagataaaccatttggaattacagatctgatcatatagtgcatgtgcttatgatcctccggggcccacagcatgcatttcttgtttcttcccatggtgtacaaggccttgccaatctctatagcttcatttgtaactactttcctttctctgaaatctccttgctgtattcttctgcttttccttaggttagtgcctcctcctggatgacccttttgcatttctggatccatctattctgctctgcttttctcatttcttgtgaaatattgaactgcttattaaccttcttcttcataaaaatttgaaaatctgtttccagatttgtagttctacaccaaaatggaattcagtcattgacactacctattccatattaaaatggcttttaaaattatgtaatgtattttttaccccaaatttccagtgtgcgacccatattcatgacctgttttgtctattagttaggataggctaagctatcttgcagtaacaacaaccacaaatattgtaatggcttacaacaaaaaagatttccctcatgtttgtgtagattgaagggaagactgcttatcatagttacctctgaaggaagctccacttgacatgttctttcacaatcacataggagagggagagcacatggtagtcacacgctggttctcagcacttctggctggtagtgatgcataccacttgttcatgcatttcactgacctcgcatggcctcaccaaatgtcaaggagacagggaagcaccatcctaccacgtggctgaaagtgggagacgcayggaaatacttagttcacaccactgcaatgggttaaagatctgaaattgtaagacaattcttttgaaatttatgttcactagtagtttgtaatagtgtcgagtcaaatgtagcagtttggaagtgaaaactaaaacaatcctaaagaggtgagattgtatcttttaaaatcattatctcagttgaaaactgaatattgaagcatatgcttaaacttaacacaataaatgtaagcatttcatggccatggcacaaaaatgtgttaaaactatatcgttcatccactgacagtgttgaagaacaaagcagtgtcacagaaaataggttgcattattcttagaaatatatcatgctttgagggatccttttttttaatggaggtcatgatcatctttcataaataatttatcagttaatggtagtgaacagagtttgaatgagtcaaaattctacaatgaaatgctcctgtataggtgtaagtatataaatgtatatataaatatacatatacaaatgtaaatatataaatgtatatatttaatgtgtatttgcccctagtttaatttgtcagcagtaactgctggtttttatttctttttgcaagaaattatatagaaattgatttgagggagatttaaaataaatgtttagtgagaggaaatcttactctgtcctatctatggatattgataaactgtaccactgtattcctaactcctaacttggatataggagcttgactatctgcatagatacgtaaggggatatggctgacaggaggaattacaaatgtacttatttaacaattaatgctgacataagctatttgggtaatacctcatttttttttagaatgaatgatgactgtcagtgtgactgaggatacagacatgaaattaggaaatcgaaaataaatatctgtttccttcaaaaaatttgactagtcatttttttgactagctttttaaaaattgcataagactaactcttttcgtttgctgtgtgtacattaaatatgtctgtataggtccctttgctttcttttgccccacagtaattatgttgaaaattataaacagaggcattagcataaattaaggattaagtatggaaatcataaaaaaccctacttccatgaaaatgaaatttctttttgaaaagagaaataggtattattctacttattttcgtttagcaaattttcttatggaacatcattactctgcctctcagaagatttgccaaagtgtttaaaactccctctgaatgtttgtacttcaataacctattgaaagcacaactgattttgtttgtgctaggtttatctccatttaaaggcagactccttcggtgagctcccctgtggcaatatgagagaaggaaaagaaggagggaggaccttgcaggactggtttatatagcaggaagttaagagacaagagagctctacaattattgagcacaggaaaattgatttcctattcatagtagtgtggcacatgtagaggagtctttaaagatgatacagcatgccattcctttcccctccgttgtgtaatcaaccagccaatatttatcaagtacctgttagtttcacttacagagtacctgtagctgagttttcttttcttttctgctttctttatccctgctctctagctcctgacctgtccatcacgaatatcagttttccatgtgccttagacctgtcttccatctaataagacttcacactgctcacttttcctttctgacactgaatacacataawcaacagagagcaatgtctsttaaacccataaacccattcaaaaaccaaaaccaaaccaaataaaatgaattggttgtattaatttgtatcatccatttacattttgagaagcatagtcaatcagataaacttactgttttaattctaaattcactgactttctgtcagtctctatgttccctrtatgtagcagctgggttaagaatataattgtcttgacaacaaattattgacatttacgagctcaaaagttacctcagaagcttttgaaatyaaagaaataaaagtgttaattctctctgatctgaacaagccaggactcagtgtcagccctttataggtcaggctgtggaaggaatgcataggatgaaataccastgcatgcctggtgcactaaaactaaatgggatttcagcagatgaagggaaagggtgaggaatcaagccttaaattgtctgcctcaggcatggtaagaagacttggacagtaatagaaacaggaagtgtttgctgtgaagcttgagtatattcaaagtaaatcagtttgtgttccattaaggaatcctggctctaggttggagcctacgcgggatcagtaaattttgcactaggaaatacctaatgtcaagccttagaaaacacctcatactgtggccagctgtcatcaaatccatcgccactgctagtaaaataactccaaagcaagtgaaactggcagtaattgcacaagtaaacgggttgcaaaagagcaaaatgggtacgtttcagaacatcatttctgttaggctccatgttatactgcttacagtagaaacaaatggaagtcgagaggtgaagcctggcattaagtttactagtgatccaggaataactgttagcagctgggcctgggtgctttttccctgctttgtcctggaaagatttcacatcttaagggaaatgaactacacaccttgagaaaatttttttttctatcatattgtataaatctgtgtaaatctcattttccccctttttggagttaagtagcataattaactgtaaggcttttccaaatactttcttaaccctgaaaaactttccctcgggacttacagtatagccaaatggatatcgattattgctaaatgtaaatacatatgcacatatgaggtgaagctgtattaaaatatgggtggcagtgtctttaactcagatttgggatgctttatacagtcatgggaaatatcaggggatcaacttgaaattctttaaaagttracaraattttggaacgatcaaggaacatgggaatatggcctcaccttttctttctcactgatgacataaatgccgccctcactgtgttgtttattgtttcttccagataatctttgcatactcagtacttggaatatagagccattgccctgtactcattttttccttcctggaggtataaatagactgatgacgccctatgctctctgcagtctgtgcatcattcataccgtacatctcctttctaggtcacaaagcttttaaaaaaaatcagcagtggtagcagcatgtgagaagatgagcatatgactgactccttcctttcacctcagagccgtgcctttgatagcatccagacagcagtgcatggaaacatgacatttgggtggttcaagaatatcagagggaaaaatagccattcttaccaaataacttaaaaatagcatagtctgagcatttttcccttcgccctttctcccccaacgtgcctgaaatgaagcccttcccatccaaagcaaaactaggaatttgtgttttgtgagaatttgaagagcctgcctctcttactacaactgctttcttccttccaaatgtataagcttaagtcgtgagaaaatgtcatctgtctcattctgcttccctctctagtaaaataaaaatggtcatgctttcagacggtcatgtattattgagtgcctactgagtgaggaaccatgtgttgagtgttttgagatggggtgagggaaaacnnnnnnnnnnnnnnnnnnnnnnnnnnnnnnnnnnnnnnnnnnnnnnnnnatggggtgagggaaaacattatttttctgctttcctcgagcttcattatgtgttatatttcatggtatctaagccaacagttggcgagaaggctgatccttagaggtaatctcacgttcaaggaaggtcgggaacaaggttggtgagtagtggggacagagttcttgttaccactggagtttgtgtcctggatgccaggtatacatcatcttattctcttcttgatttgtcagtactttttagggaccattagttctctgcctactatgtgccagactctaccctaagcatttagaattccagttaacaataggtaaatcttctattcatttaaaatttcattctaacagctagtaatgtatttggaggaataaatgccgtgaagaaaagcagaccgagtgttatctataggtagttatgggagatgtatgttatcttatattggttgatcagggagacacaaactgataaaggggcgattgcttatttctctgaaagaagcaaggaaatgagaaccacctggatggctgagggaactgcagtccaaggagaaaaaacagcaagcgtaaatctcacaggtgagggtgcatcagtggagcaagggcaagagtgttatgataagaggtcctgaaggcagcagtgagaaatgccctggaagcctgtgccagacatattgaggagtgtggattttattctgataaagacattgcagaggagtggcatcatttcacttgctcttcagaagagaaactggaacacagatgggcaaaggaggcagcatgagacaagcctctctcttgcaagccatccggatgagagataacagtggcttggaggtgacagtgaaggtggtaggaggatattcttaaagtagagccagttgaatttgctaattgtgatattgtaaaatatgtatttggtcttcatccctgttttctgtcatacagctcctaaaacccttgataagaatatcctttgtgtgctaataagacgactagtggctggaggcccctttgtaacttctggatgggggctggtcaccagaatggtcaggggattgggactttcagccccatctctcaacctctgcagggctgaaggttgtgttgattactaatggccagtgatacagtcagtcatacctgtagaattgaagcctctatgtaaaacctaaaggacagggttcagaggacttytggatagctgaacatgtggaggttcctagaaggtggtacaaccacccagggaggacatgggagctctgcaccccttctcctatacttcaccctatgcagctctccaactggctgttcattcatatgctttgtaatttttttataataaatgggtaaataaatatgaaatgtttctctgaattctgtgagctgctctagaaaattaatcaaacacaaagaggtgggttataggatctctgatttataactggttggtcgaaatacaggtcacaacctgggatttggaattggcatctgaagaggggggcagtcttgagggactgaggggygatgctatgtccaggtggatagtgttaggattgaattgaattagacgatgctcagctggtgtctgttgaagaatctggtgtcagaagtgttgagtgatgtgtgagagtaggagaaacaatggtttttcctacattctcttacactaatggatttgtattcggagagattggaaagatggatctgtcatttmctgagatgggaagtcacagcgaggagcccattaaccatatattaaaactccattagtaatattaagactgtccattctagaagaggtggtggstcacgcccgtaatcctagctagcactttgggaggccgaggcgggtggatcacctgaggtcaggatttcgagaccagcctggccaacttggtgaaaccccgtctctactaaaactaccaaaaattagccgggcgtagtgctgggcacctgtaattccagctactcaggaggctgagacaggagaatcgattgaacccgggaggcggcggttgctgtgagccgaggtcgcgtcaatgcacaacagcctgggcaacaagagcgaaactctgtctccagggggaaatattagtgaagaggacaatattgtaacctacaaaaattctgtggtaggtatgttacttttgttaacagacttttctgaataaagtactccaaagtaacttggagttaagacattttaatattatgccttggttttcaaaacatgaatggtttccttctcttttcatgaatttggatatgaatgcaggcacttacctacgtaatttctaatattgatgatactggtgtttcttaaattcactaaaaaattttatttgtaaagggtaacctgcgttacattatttaaagtttttattttaaggtttttttttttttttgagatggagtcttgctttattgccctggctggtgtcaaacttttgggttcaagcagtccccacgccctagcctcctgagtagttggaattaccacattacattttgaaagaagagagtttacaaatgtctgtttccatgcattttaaaagaggtcttgttacaaaagattcagttaatctctttaaatggaatttattttggtttcctacttcctccattaaagtacattaatccttcttaacatatgtatttatcacctgctggattgctaagtatgtaaaagctactttgtaaaagcaatgccgtagctaaaaaaatgtattgcatagcagccaatgtgatttagccatttcaacattgcattttattaacaggacactccagacctaaatggtgaaaagatttcccactcaaattgtcccctagcaagagaagattggaatatagaggaatctccttttctcctcgtgattctgccttttgatgaagtaataatctgtgttattccagttcttttaaatgttaattcattttaacagttgcttcagaaaataaaattttatgaggcaaaatacagcaaartatttcaacaccacatttttgtttttccaaccagagtttgtttcatttacagacattgtcatttattttttatttttattcattttttagaacatcttaaatttttaatcctttatttacaggttgcctagacgacttttgattaagaaaactgtagaaagttggtaactgccaaagtggtaggcggtggcacgtgtcagtttccacagagtccttccatgtggggtatctgaatgcactgcacggggtctctgctcacacttactggagccaattgtggcagattttagtctacaagtcgcttttccccctatttctctgtaaacttcagcattcttacagaaatatttacagtccttagagtattattcagctaggtcagcctgaagtggatgctcaggctgggggtcattcaccagtgctgtgagggactggattacttggtcagttttggttgctggcttccagttttcagcactaatttactggcagagagacctgccccttttagtggacatttgggtgacagatctttaagtgtgctcttcggtggtttgaatgggtgctctgctggaaagttgatttcgattctgaaggcccccttatatggagggttgtcaggaacaataagcccttgccaagtcaataaattagctccatctacctggaagttacggaagtttttcattccacaattgcatatttcttcaagctccttcatcagccttctgctggtgccgtcttggatttgatgctgctcctttcccagaatgcatcgcagcccaacattgccatttattatgctttattttgttgagcttgatgctttgcattagtttgtttacttattcaataattatatattgagtgcttactagagttgtctagtttctcaaaattgtgaggtttatgctaaacactggggacacagcagtgaatgagacctagtccctgtcatccaggggccaataggtcacagatgtgaattagccctttcccttgacttttgggattccaatttcaaagaggttgtaaaagagasagtgccatattcttgaaccttttagccaactaggtaaaaataaattttcacatatttctattgagcccactggacaccaatatactttaataattgtgtttaaaatagaaaactccttcarcttgaagctgtcttttatttgagaaaagtgaaaaagagattcgtgggatattataaaagatgaacaagatgcctaaaatggacaatgctcctttacatgttactttaacatttgagagaatgctatcaaaatgcagaactggctaaaagtgttagaaggagtagttcaagttgtcttcaaccaagagtcatctrgaatttggctgcaccctggtatatcaaatacgctgtatgggaatgtgcttatattttgatgagtaatgtgtttttataacaaatgaagatgcatgtcagaatgttgagctggtcaggtctcactagggatttgaagaatagcataacagcaagtgggcaccaaagaaaaattgagtttacttggatacacgagaactctgccttctgacttggtctgagaacttgttcaaggcaagaaacagtttctaacttcagctgaatcacagtgtgaaggtgaacaagtaaaaaagctcagttacctgcagaaagttgcttgcagtttcagttttacaaagctcactgtttaaatctagtagttaccttttaatcccttcagatatgtcagcaaaaattctagtatttggaaatatgccttgatcacttgcaaaaggctctggaagacagaagtcatagtaaagtgtcaggtattttaagaatctggttcaaacttccaaacaaagaatgtttcagacctcagtgtattaacagttttcctaactattcagttattcggtggtcttttattttttatttttatttttttcgaggtggagtcttgctctgtctaccaggctggagtgcagtgctgccatctcagctcactgcaacctccgcctcctgggtacaagcaattctcctgcctcagcctcccaagtagctgggattataggtgtgtgccaccacacccagctaatgtttgtatctttagtagagacagggttttgccatgttggccaggctggtctcaaactcctggcctcaagtgatccgcccaccttggccttccaggtctcaagtgatctgcccgcctcagcctcccaaannnnnnnnnnnnnnnnnnnnctgctgggattacaggcataagcaagtacacccagcctcattaccttatagtttttaatttttttgtgggagaaaggaccagtgacttttttgaatgtgagaagaatcccaaagcaaaaggtgatttatttcctttcctttaattctgccacaatacacggcaccccagcatctagaagaatcttctcatgtgtgagatgaatgtgtttgacttcttttggaaagagtcagattttatattcatttagaaatatctgtgcctataacgtggttgcagttgtacatggcacacagttgtttatttaactgtgtttcatcctttcatcttgtgtgggatgctcacacttaaccgcatttctcttcattgcatagtgtagccctgactcactggctcttcatctgatcagtctgccttgcttttgtatctgaacagtatctctcatcacctgaccaaaatgctctgctccgataggtctcagcttagatgttacttcttggaatgcttccctggacaatgctttccatattcacaaagggagtacttaatcccagtaaaatattagtgctcctgaattgtgtcattcctctgcatgcatcagactagttctcatcgtggttcatatagtctaacgcgtgcagatgcaagattagtctctgtcttgttcattgttcttcttagtgcctgatttagcacatgaaatatagcaatcatgcctaatgagtgtaagtgaaacaaaataattttttagaatttggaagtcatttgtcttaatgtgtatttttctcccttttctggtcatcagcattagaactgaagtcatcttcaatatctctctctctcatcccttcattaaatcattcaccaagttttgacagttttcctttgcaatgtgtctccaaatggtcatcctcttctcctttttcagattaggattcttgttttctttactcattggtaaaacaagtttgggaaatgctagttacgcagttaatggtgtagttaccgcaggacttgacaaaacctctaatgaaagaataaaacatttgctatatttgtttgatcagagaaacttttttccatctcaggggatcttatgtggttaatgatctgcaaaacccacctgggggaatgctggtagaattgtgcaacagtcaccctttcatcacgggctgtggatcatttgacttgaacttaatgatagacatcagctatagacagcaaacacatggaagggaagcatgccagccccctgacactgaatggcttctgaccctcgcactctttgggtggctcagaccatgttaccttgattaggtgaaggggccccaagtagggaattatgcaccttattcacctgctaaagacactgctaattcttcttgcagtacttcctcaatgctgtcttgataagatttaaagagttttttagcctctgcctttaggcaccttcagaaagaatgccatgtactcctatttaattcctgcctacaccactgttttgaatctgtaggtgcaagggatttaaaagccaaccacaatgaagttgagtttttgtttcccagatttgtgattgactggttttggatgacaaacttgatnnnnnnnnnnnnnnnnnnnnnnnnnnnnnnnnnnnnnnnnnnnnnnnnnnnnnnnnnnnnnnnnnnnnnnnnnnnnnnnnnnnnnnnnnnnnnnnnnnnnnnnnnnnnnnnnnnnnnnnnnnnnnnnnnnnnnnnnnnnnnnnnnnnnnnnnnnnnnnnnnnnnnnnnnnnnnnnnnnnnnnnnnnnnnnnnnnnnnnnnnnnnnnnnnnnnnnnnnnnnnnnnnnnnnnnnnnnnnnnnnnnnnnctgcccaccttggctactcaatacctgggattacaggcattgagccactgtgcctggcccaaacttgataatgtagaagtcatttgctgaggtaccagtatacaggtggcaaaaacaatggaaagagagaacgatgatttgtcaagagtatctaagaactaagtaaaatagaaagttcaattttcacttaaaggagccagagaggaaaagcctgtaaaatgttagatactttttgtcattgttttgaatataagtagggatcatgttcgggaaatcatgttgttgacacattgataatcccattagatttttccagttgctccgagtctcccttcctggctctgtttctcttacatctcagattcgatctatctgaaaattttattccacctgacttcaaaatagctagagtctcaccatttaactatctacacagttaccatcatctgttgccggaattatctgttgcctgcttccactcttgcctccttacagtttactcatcacgcagtggcagaactaatcctttgaaaggtgaatcagaccatgccatttctctgcaatcttgcaattgccccaactctcattcagaagaaaatttgacattcttcacccaggcaatagacatcagctatagacagcaaacacatggaagggaagctcagccgtcatctgtctctgtgatatctttgacctcgtgttgtaacactttccccatttactcactctagtcacatcagctcctggctcttgcttgaacccgttaagcatatatctttaccttggattttttgtgcttactgtttcctctgcctggaatgtacttttttccagtgtacacatagattattttttcacttccttgcctgtgctccagttttcctcatgaatacgcttaccctcaccactctatctttacctaactgtatttttctgcagttaccagctgacgtgttattgtttgtattaccagctgacatgttattgtcttattggctgccttctttaactagaacgtaagctcagtaagaggagggctttgtttgttgtttgtttatttattaccttttaagttcaggggtacatgtgcaggtttgttatgtaagtaaactcaggtcatggaggtttgttgtacagattatttaggcactcaggtattgagcctggtacccattatttatttttcccgatcctctccttcctcccaccctccagcctccaatagaccctaatgtgtgtcattcccctctatgtgtccatgtgttctcatcatttagttcccactcataagtgagaacatgtggtatttgattttatgttcctgtgttagtttgctaaggataatggccagctccagccattttcttgcacaggacatgatctcattttttttatgactgcatagtattccatggtgtacatgtacctcattttctttatccagtctaccattgatgggcatttaggttgattccatgtctttgctattgtgaatagtgctgcaatgaccatacatgtgcatttgtctttatgacagaacagtttatgttcctttgggtatatacccagtaatgagatttctgggttgaatggtagttctgtttttagctctttgtggaattgccacactgctttctacagtggctgaactcccaccaacagtgtataagcgtttctttttctccacagcctcaccagcatctgttactttttgactttttaataatggtcattctgattagtgtgagatggtatctcattgtggttttgatttgcatttctctaatgctcagtcatgttgagctttttttcatacgcttgtggccacgtgtacrtcttcttttgaaagtgtttgttcatgttctttgcccactttttaatggagttgtttgttcttttcttgtgagtttaggttccttacagatgctggatattagacctttgtcagatgcatagtttgcaaaaatgttctcccattctgtagattgtctgtttactctgttgataatttcttttgctgtgcagagctctttagtttaattagatttcattggctttatcttgctcattgctaaagaatagtgcttgtagcaggattctggcatgtagtaggcaggcaccagatgcttgccaaataaattaagatgaaagaatgtgagagcaagccctcttgtttgttatggaattcagtatttactaggaaagggtaggctgcctttcagtaaatccctgtcatgtctctatgtttattctaaaattggtaagctttctaaccataaacaaacagataaacatcatattaattgttcctctcctatttctctccttttcttttgtagcatgatgtttttgagtattcaaaaacattaaaaagattgggaaaggtctaagaggtggagagtagaataatccattcagataactcctcttgggtctacgtgaacagattttaggtactgttactgtgtgatggatctgaagctttcctgcatcaaagcgttcatccctggaacattcctatcaatgtaacatacttaatgataaattggcatttgaccacaatagatggtatttttccttaattaaagaaatacatgagaaaaaatgttaaatgttatgaaatgattaaaaatgaactgtccattttaatatttatatccaggacgtcgcgacaacctgtagcttccctcatgaagggatcatctctttcgcagcactccttcgatgagcaggagagtgtatattttagaacctttagagagaattggaagcatttactacgttttcctttaaataagtttgctgagtgacaggaacaagtcagatagcttaagtttgctaaaatacataagcaggtagaattttaaaatgctgaattttgtaatatgttccctgggggttagtttgcttgtgtaatatatcataccaccaaggagatactatacaacaaatctggggagaatttaataaaacaagtattagtgtttcacattcaaaccataaagttgacttcttaggaaattgtatgccccaaatattgatggaaacatgtatctctctgtattgcagcatgaaccaaaccctatgtaaactaaatcgatagctccaaagcaaaaccaacttataataacagaccagagttccagtaattaaaaacgtgacctactctgtacaatactctagctatattaatgtggtaataaagaattattaccaaaaattcgctggaaatgcaattatgtatatgtgtgtccatgggtagagttgccagacattgcatgggggtgcaactagtgatttggttatttcagttcttagaagtttaataatcctttatagctcccttttatctttacagaatagcacttgatgactggtaaaaagaattaacgctatgggcttgcccacaggaatcaagcaaagggcgtatgcttttggatgagtttgccagctggggaccatactgagaataacggttctctctcggactaagcattgagatgctttgtcaagtatccttagcttctgctttctcttcccttggttgagttataccaaagcctccttccgggaaatccctttagtccttttttatacagtcaaatcaaacacttctttatcagaagtgcatctatgtccaacaaaaaacaaaaaccacataaaaacctgacaattcacgtagcaagaaaatttcaagcaaaatctaagcaaggacattggcaaaggaattcctttctaatatgaaatacactacagaaaaagtattctatttcctaattctgagcagggaaatttttctatttattgttattattattattctattatatattattctattctaaattttctatttttttcatttagttttgctcttaatattaacattgctatactgagaccttaaatttatatgggtagcttagatttttctagggctcccaacagtattatacttgtagtatttcacttatggatgaaacaaggcgtatatgaaataaaatttatgcatatacatgcatgtaacacataaaaatatttgcatatatgcacaacttaattcctgtgttttatttttcgttgtacaaaatattttaactgtaattctatatacacacacattatacatataaattattatataatgttatcttagtgattgacccagaatagaatacagattttcttaagtttcaatgcaactagatagaaaaggatataatgtctgtattcaaagtaagggttaatctacttttggtaggttaaaagtagaacattttcttatctgagttattatatctgttaaaaaataacttgtaacataattaaatgtgtcatagttggtttattgcaatgctgtaaaaatttttttaaaaagaactgaactatgccctgattaaattaattaacgtgtcacatagattgccatttagaaaggttatttccctaaaattgctgcattttgagcctatcttctcagtaagttttcacaatgttatttatacagttagatattatgattacttttgtgattcgtttagatactaactttactaattgacagatatgatcatttaccttttttcttcaaaaatatttctagattttttcttcttcatttcagaaatttgaatcattttatatactagtgaattttcatcattttgtatatgttcatcttcacatagatgcatttattatttataaagcagttannnnnnnnnnnnnnnnnnnncagtgcttggtgcctttgtagctttgcctcaagattgttaatatgtttccctgaaagtcctactattgattgactcatatatgcctctgcagttcccatttctatctgatgtagtattgagtttgttgccactatttccttgttttttcaagaatagtccttttacttatcctcagttttatcgaggtatataaatattaagctttccaaaaaaaaaaaaccaattttgggttgatgttagacaaatctttttgtataggtttaagagtgtgctgggttacattttagaaatagcatctgatcagtagttctctcccaccttcttactaatgtgcccttagaaacacaggaaaagatgtatgcagaaaactgtggtgacattcaacctactgcctgcctgggaggagttttcactactataagcagaaaaaactggcaagaatgcctttcttgtctttctacctactgtcagacaagtagagcaaaagaaagccccccagagaaagcccctcagttttgctctacttgtctggtagataggaagacaagctgtccttcctgagagtcagaaacataagattcagaaacacagagctattccagtgaaaagcaaagacagacattaggatactgtccattttttgcatggatacagcctttgaggccatcggactgttgtctacactacattatatagtcattaacatggtgttcactgtggttcacagaatgattgaaaaatgcttatagttaaaccttaagaaggcacagaatttgaatttatacaaaaagaatatgtaagggtataaaaatatgtaaataaaagtgcctagatgcaagagtgatggaaataagtcaaatgttagcagtgctttcttatcagatggagaaattatggaygacttttccttcccagtttagtgtttctttgtacctctgaaaatttgtacaatgtacatctgttatttataattttgtacattgagtgtgtatcaagttactgtttaaacaaaaggaaagaatgggtagaaaatataagacatctatatttttataaatactttttaatatccataatttcatgtaaaattttcaactatcccggaggtagacttttattgatattttagagttatgactaggatagttgtgaaatctttccaactccaaaccccatggtcctcctactataccttgttacaaacagaaaatcatccttatggaaagccttaaaggcagaaaatatataaaataagtataagtatgttatgtgtataaagtaaaaattttaaagacatttttgaggttattagcataatttctatctttttaatttacatacaccttttaatgtgtttgttactagtgatatatgaagaaaaaataatgtataatttcaccatcaagagattgttttacattgtagagcatgttcttcatattttagtgtgtgtacattcatacatatacattcaaaggtttcatagcattaatctgaaatatatacttcaaaagttttcaatttagtaccattaatgatgggaagataatatacttttgagttataacggttttattgtgtatcagtagggcccgctcagaaaatcagaacctactctaatataagcagtaagatattgaatgaaaggaatcaattacagtgataacagaaggactggaggtacaaaagagagaaagggctgttatccaaatatcagaaggctattaccacccaaggctggaggccatgaaatagtgtttgatactgagttgcaggagaggctggtgcttctgctgcaatattaaaacagcattgtgccattgtggcatagcagtcttctaggagccaatactactaatatctgtgaaactctcaggctggataccatagtcacctacggtggctgtcagtagccccctgctgctgttacctcagcagaaaaaaatagcctatacttcttccaccttcaactctctaatcaatgcctcccactggcaggacctgacaagaagccagctggctaaggataaagaaaaatgtagtttagagtcttcctgcctcctgtgaatcagaaagatggggatggagttgatggccaataaagagtttgcacacatttgttcattaattcattttagtaattttcttctttcatactgcttgttttaataacctgcaagtaaataatccacaataatgtcaattcattggctgaaagcgtacaatgtaatttattaaaggcaaaatattgttaggaaatgaataattggagaaataggatggtatcaagaaagatatatgtgcttttctgaagcatctcatacatagtttataagaagaatgcaatatgaaaaattaaaatcagataaatctttaagcttttggaataatatgaaagttttatatggttatggcatggtagaattcacataactgattagttagaacaaagacaagactactttttcattatggaaagtaaacatagtagtcttctcaagattattagcaaattttccttaaaatgcttgcatctgaaaagatggcttcagcctgattattttaaagcctgtgtrgttcatcagtttaagtagggaagtggracttggcgatctcagaggagttctgtagcctccatgcccctgctccccccttttcatggctcactactgccattcacataagcaaacactagcttccctcagtcattcagatcatggatgaatgccattctgtgttagcttaaccaccatcattcttgataaaatataactttttacctgagtaatgcatacctagtataataggctacagtatttcttgaaatgtagagtccgtatcagtggtggtataaaagattgttttacatgcaaygagatatgctggtatataatattaagtgttttgctaaattrtttgcctttcatttctactctaatgttactgattaagataaggggagcagatctcaccttggagctaggatgctttcatgtccctccaaccctcactgattatctttgtaacagagagcaggcctcaggctaggagtgtttgtcagaaaaaaaaaaaaaaaaaaaagaggatcttgtgagaattgaaagagatagcattgtctttccttgactttagttttatggccactttgtacttatataaagtattactgagtttccatttaagtagtgacataaagttttaaaaaataaatccaattggaaasaaaattttatttatagaagactaagtgtacaatattatgggtggctggtccataacatggtagaatcaccaaggtaattgctacatgaataattgaaattttggaagcagtaatatatatagcacatttgcttctatctttttcttctttaattttacataaagatataaaacagaactataggcttatctagaaaaattagataaacataatcattcatctacttctttctctaggtaatgtatattaagctttgggcccaacccagtaactaaatgggatgatggtgatgacgattattattgattattgttttcttaaaagccrtgattcctattaaaatactcttgtagcaaattgtaatgaatttttcccagttggtttaccaagtgcgtaagaatcagatatcagtaaaaatgtcaaagtatacatttataatagcctatcttttccccagaatggcttattattatctctctgcagtgtatcagaatataaatagtattagaaggttttaaaaatatcaattagaatgggaatgaaaggaatactgaaggaaggaaaagagatgaagtgacgaagcacttcttttggccactttcctgctgcatgtctcactttgggtgctacttagawgtagatagagttggcaccaccaaacagggttattactaatcttggatctcacatataacttttaattttaggttgaaaatatgagaaaagtgttcttctcattgacaagtaattagccccagaatttccaaatcaattttgaatatcaggaagattaaaaattgaactactagaggccaggcrcggtggcttatgcctgtaatcccagcactttgggaggctaagatgggcagatcacttgaggtcaggagttcgagaccagcctggccaacatggcaaaactgtgcctctactaaaaatatgaaaatcagctgggcctggtggcttgcacctctagtcccagctactcagaaggctgaggcaggagaatcgcttgaacctgggaggcagagatttcagtgagctgagattgtgccactgaactccagcctggtcaacgagcaagacttcatctaaaacaacaacaacaaaaatcgaatttttttttggttgtttgtgaagattagggtcagtaatagaccccttttaataattgtatttttctcctcagagtggccgtatagataattctgatttgtttgctctattttaaattttagtttgattttttggattttaaaaaatgttattttcaatgtctgaagtttttttattcttcatttactctaaacatttacttcaagctttcatgcaatttggtattcatttgttaaaaacgtcttgtaaaatatcaacatactttaagaaagtaaaagctatactttttttttttatgagtcagcatctcactctgtcatctaggctggggtgcagtgcaggatcatggctcactgtagccttgaccttccaggctcaagggatcctcctacttcggcctcctgagtataccaccatgccaggctaatttttaatttttttgtagagatagggtctccctgtgttgcctaggctggtctcaaactcctggcctcaaacaatcctcttgtcttggcccccgcaaagtgctgggattacaggcatgaaccactgcacctggcaaatctatactcttgattatgcccatgataaattatctcagttataggacatcatctgtgtcaatctaaagagaggaataagaagagtagctattgccaccaatgagactttttgagaataaacatgaaaataacttacagatatttttaagttccaggtatcaaaattgttatagtatgaaaagcaatagagtagttgtcagaaaactttcaactcatcagtgacagagctggagataaatatgtgctgtctgtacatctccacttctttataaaatgaaaataattatcttttcctttgctacctcactgtgttttttgcaatattaagtatatagataagtaatttgtatgtatttttaaaactcaacataattatgttatacttgttatttattgctcaaatcttaatgctatatacctaatatctaagcatgttgtgatttattcctagatgaagaatcatctaagcctatggtaaatatatcaaaaggtattattttgcttatatcatagcaaacaatctctagagctacaaggatgtatagctgcaaatagaaaatatattttctgaaagattagtgaatctgctcttgttgttttcatatttctttcagtagtctctcaatatatttttaaatattacattttctacttacaaaagtagtatgtacctgctgaggaaaatgcagaaaaacattaagaaggggacaaaacatacttaatcccacttcccaggctggggaactgtttatattttggcatagttcctttgttttgtgtctgtgtgtttgtgtgtatatgtattgtatatgcgtgtgtaattcttgttttagacttttctattttacaaaacgaagaccatatggtataaagaatgtggacaccctttatagatggattttccacttaatttatttctttatctgaaaagcagaacctttaatattcattaccacttagtttaggttgttaatgataatgtttactaatgatactgttaggctcacagttcattttatgttgtaatcattattctgcacttgccactagatggctctgttctcagagtgactatttttccaaaagaaaaagtgccctgtatcattgaaatgatgggaaatgttattgcccttattaacattatatggaatgcacacaaatataattgcataataattcaacagagtatgcctgtgataatttaaatggtatttcaatagatccacaaatttaatatatccccttcaaaatgagggttatatttacttagaaagcaatatattcacttaacaaggttcactgtcacttagtaaatcaatattggaattattttttcagctctcgctttttatatcaataactttgatattgagtaagttgttttttcccattgcttggctaattkttatcataattatcttttctgtacttcagtatgatgactgtccttctgtaggcccaagaaatatactctatataagtaagattttcttctggatggctattacggtaagatgttttaccgtgagctgaatcatgattactctcaaagccaatctggtttcaggtgggtcctaagcccatgctaatttctatggccaggattgtacactatgcaaattttcattttccttgaagagtgagtgcaggactataaattgctgacgtgggattgaataaaatgagacacatggatacagacattagtttctcatgtgcaaagaagttgtggtctttgtttatacagggctttctagacatacccagctatttaccatccaatcatattttatagagagaaaaacagatattttaggataaacattctcaccacatgatgaactgataacatggcacactctatttatacccctagcaaatctcagtattatgaattaagaagcagttacatatgagaatatgaaattctaaaaatgaaattagaagtttagccgttgtgcataactcctgtgttttaaggttcatcataccccatttttattttcaatttttaaaaaatatttagttacatatagttcattaaattccaggtctaagttcatcaaatcttcctttctgaggataaaagtcgatgaagttggaggttgcttaacaatttcttctctttaatagcatgtcatagttttcatttttgcagaatatgtattccaagaatagagtagcccttatattggttcatattacgttgttggattacacacgctcattcacagctctgatggtaaaattttctaccaactccccaagctaagtacttacgtgtgttagaatgttaattctctaggtaatttttaaaaatttatttattttattttatttatttgtttatttttttgagacagtctcactctgtcacccaggctggagtgctgtggcacgatcttggctcactgcaacctttgcctgccaggttcaagcaattctcctgcctcagcctcccgagtagcgggactacaggtgcgcgccactgtgcctggctaatttcttgtgtgtttagtagagatggggtttcaccatgctggccaggctgatctggaactcctgaccccgtaatctgcccgcctcagcctcccaaagtactgggattacaggcaggagccaccgtgcccagccagtacttttattttaaaaatttaaaatggtagcatgtcctaaataaaataggaaatataaaagttgaaagtcctggagatggatgaaatagggaaagaaggtaggacaaacagttcctacttcttagaacttgagagactatatctaaaagaatattccagaacagggaagtgttataaataataccaacttgtgccaaaaaatattactcatcttagatctcccttttggggattttggatcaataagaaaccacgtttcaatggaagtggtgcagagcccgttgcctagtgtgaagagccaatgaactaagtcagcaggttaaaacctgaccccctggcccatttatttttctgtctttgcactcttgaaaagcatgttccctagagatctatccaaatagtcactggagtcctgaggccccaccctttgtccagtacactgaaccgtgttatgcaacatggaaattgttcccattccaatgcctgacagccagactcttggaagacaagcaaagaaacaggatgcttctacggagcacaaacacttagcactgacagctacaatctgtgaatgaaactattttttatatgagcaaataattttttaaaaatccaaatattatgaagcatataaacaaaggttctaataattaagagttcttgctgaatgcaaagcaacaattctcctgtgtttcaaggaggagaggaagaagtgaatgagatacacagatgccattcagtagaccatctaacagggtgcgctgagttgtatttaagtgattataatgtgatataatgagtggtcatgagtaatacttcgaatgtgaatgctttttaaaattttcagtgtacttttaaagaaattatttaaaagttaaattatgactagtgtattatttttaagtgtctcatataaaaggcaattttgtctctgtgtgtttctggctctgtttttcagtagttgctgttctagagaaatctaatgtgaatataaaaatcacttaatctattaataagtatgactatataattgtggctttgtgtgtgatagacgaagtttgaattttaggataagtgttttcttttctttcttcttagccatcaccgcctgtcccagttactaaaggtacctctcttttcctctcatcaattttttgtttgaaagataaatgagatcttcagtgtgtgcttaagtcattttatagttatgagtgcaaaaaataaattgccatttgaactccagagttgaattcaaatttttcagaaataagcacatattttatttgttttttgagacttctttgtttttctcattgttgggtgggtagccttttttatatatgccttccaaagcttctttcctgattgttgaattacttatatgttagtttaataggtacattaattttttctatctaattgggagtgaaagaagactgctgttaaacatgagttcttagttattggttgttttcatcttttaaaattttctgatttgaggagaggcagatagacttggttaaaatgatggattataaatatgtgaaatgtctgaatgagatcctttaacaaagaaaataaaaggaatgatgatgcttttttttttttgtatatctaggaatctttatttctgaaatgatttatattaataaagatagtgtaggaatgactttctatattcctgcctagtattctttctgttaatttatactctagatgttgtcacaggaaatgacttataaaaatgtatttattatgcttgcttatataaaggaggatttttaaagtctttattttattcttgtatgtgatacactattaaaaacattgaaatatacatctgccgttatcttttactagattttgaacttcttccacattttaaagatatctactnnnnnnnnnnnnnnnnnnnnnnnnnnnnnnnnnnnnnnnnnnnnnnnnnnnnnnnnnnnnnnnnnnnnnnnnnnnnnnnnnnnnnnnnnnnnnnnnnnnnnnnnnnnnnnnnnnnnnnnnnnnnnnnnnnnnnnnnnnnnnnnnnnnnnnnnnnnnnnnnnnnnnnnnnnnnnnnnnnnnnnnnnnnnnnnnnnnnnnnnnnnnnnnnnnnnnnnnnnnnnnnnnnnnnnnnnnnnnnnnnnnnnnnnnnnnnnnnnnnnnnnnnnnnnnnnnnnnnnnnnnnnnnnnnnnnnnnnnnnnnnnnnnnnnnnnnnnnnnnctaaaaatacaaaaagtagctgggcatggtggcacgcgcctataatcccagctactcaggaggttgaggcagaagaatcacttgaacccgggaggcggaggttgcagtgagctgagattgggccactgcactccagcctggcgacagagcgagactccttctccaaaaaaaaaaaaaaaaaaaaaaaaaaaaaaaaaaagagttgcttaatggatgagaacgtttcttgaaacacttataaaattaatagcacattttctttttgtagccagctttgtgattttgtcccatatgtttaaacaaattaaatagcattgtttaggttttaaaatagcaacattgttctattaggattgattttgatacataaattcattatgacatttatttttccatttgcaattgatttctgagtcttccctttcataccctgagctgtctcagaatcatgctttctttctttttaataacattttgcatgttatacattttacatttgtatgtgttgcttcttatcattagtcttttgtcttaaaattagaatggccaatgattatggtctgtacttgcctgtgatcttgagcaagttatttaacctctctgaatctcattctgtaatctgtgaaattggcccaataatgagggatctataagactgattgtaaacattaaattaaatgataaggatacatgtctggcatggcattagaaatgtagtaaattcttgctaatcatggttatataaacatgccagagatgattcaaattacactgacagcaagggctgcctggtctttcaggttacactgtgcttccccttctatacacagcttccctgtagctcccctctatacgcagctccaagcatgccagacctaagataattatttcactgtggttattgtgacttttaacctaacttctgttgagagaaattaaaaacaagtccttaagaattgtttgttcactggatgttagtagtgggttggcaagcactgtaattgggttttgtaggacttctctacacaaagggtggaagagccactaagcatcctctcaaagtttcaaatatattttctggcaggagttattttgttaaataattctagaggagagtttactaagtagcttattttgcaaactgtgaggctgccactcagtcactaagtgtatcattaatgtggtctaattatctgagccctcacaattccacactgcactggaggagaagtccaaagccttgaagctcactgcctcttctctcatttcagaacccagtgatagtatgcttgagaattactaaacatcaggtataaggagtcagagatgctgaacagaaatcacatgattaccattattattttatatgatttttgcagattttgagacatatttgttcatatttaacccttaaatacctctgagccattctttaacacagaatgactgatatttttcaaattttcctagccaccgtaataatgaatacccttctagttacttgggtgaaacatccaagatccatttttgcctgccttctgaacttcattccttacttttattatgttgtaatatcctgccagtttcatgtctgtcaactcctccctatgctcgcagtcgtagtccatctagtcattctccactcagatggttgtcatggtcccaaagggtcttctctttctagcctcccactctctaatgagtctttgaaattgccttcagagttactttcctaaaatatgcacatctgcagtgtacttatttggcatagaaactggctactttgaatttaatacattaactcaaatcctatgttgtcgataataattatttaggacctgtttcagtttaaaaacaccggaatctcccttctaataaacatgggtgcctttatatgtttttaaaagacattgcatactgtctagagtaacataataaatttttaggtacaacatatatttttgatgacatttgaaaggaaatattatgtgggtggaatagggaaatagtaagttatctaggaaatgaaaacagtaaattatttaacacagcctaacagtgctataactgtaaataacactttagttctgaagttaaaggtcagtgttcagaatgaaggcagacaaaatagatattcccatggcagaactgttctttatggactttcaggaaactctaaatgacattctctgccaataatgactctgggaaattgcatctccttgttttctgaatttattaatacttctatctccaagtcttcctggaaatcatattttaatcttttttttttctgtttttttttcctatccctgccacatgtgttagcaaaactcggattgttttctcttacataacactaatcattcagtatcctccattattttagttgttagggtcatttttgtttttagtataccagaactttgtcttaagaaagaaataattgtgttgatggacttgatggcacaaaacaggagttttttaagtgggaatggaaaatagtttttattttgaatgttgttctgacttgaggtggaatactatattaagagggactctgaggctctgagttcagtgggaaagagggaagtgagaattcatcatgtctgagtgggacatctagttgtaaagggggttgtgtcccagggtttcaagtatgaacactgtaatgagaggtttgaacctagaaccacctgattacaaagcttacatcctttaatagctagtctggattacccctcataaaaatttgcaaatggtcaggaaagtgtgttataatttacaacacttttccacttgaagtattttagrcaggactagggaacaatgtaaggatgtaaaagtggaggtggtagagatggggtttatctcttttcttcttaaataataatcttggaattatgaatctgtatgcacgaatcttgaataagcatcaaaatctttctaaaactttcacagtgcaatgctgtgggttgcattgtgtccttttccccccaacccgaattgatatgttgaagttctaatcccttatgtgatggtatttggtgaaggggcctttggcaggcagttaggtgtagatgaggtcgagagagtgggccctcgtaatgggattagtgtgtttataagaagagacaccagagagcttgaactctctttccatgtcctcacatgtgaggacacagtaagaaggtgtctgtctgtaatccaaggagcaagccgtcattagacaccatccatgctgccacctagatcttggatttcaagtctccagaactgcgaaacaataaatttctgtgttttaagccacccagtctacaatattttgttattacagcttgagctgacatgcccattcccaggttttaccctggagattgattcaacagttctggagaccagcctagcatttgaactcttcagaatctccatacgattttgtaacgtactcttagggtagagcgcaaccaaatttttaatttgtctacaagtggttttcagccttttctgcacattaaaatctttggagcttttaactatgattgattgagaggccccatccgtgatcaattaaatccggggtaaggtcaggtactggtgttttttaaagagctccccaggtgagtctaacatgtagccaagcaaaaggaagaaccactggcctgaatttatcccttttcctctgttcttctgctccataaatcctagtttctagaaatacggagtccaatcatgctctctcttcccctctgggttccccttacatctcagagtgccattgctattattttctgaacagcaaatccatagtttcaaaaaccatcttttttctgttgcctcaagttttccagtactttaaatctcagaatgaggactgtaaaagtaagaaagtaaattgattttctaggatgtttggattctgggcaaattggtgttatttatttaaaactccacatttcaaagatgtaatgggttttagattttataccaaaacaatatttgatatatgatgcctttctaaaggttatctttctgatttttttcccaaaatatatttattgaatacttttttgtaatccctccyagctactgtgttggcactcaggatgtaaatgaaatggtaacatttagaatattttttaaccagcgtggcattgacgcgattggtcagaaagaacattgattgtaarccaccctatggtcatcctggtgcattttggctctgaatttaataccaaaagaggcagctacatccccaccctcttaaggcttatggttccttgtaaagtcttgtatttgaatgtatgttgacatgacctagatcatttttggatactaccctagagtatctgatacagtggatcagagttggggctcagtaatctgcattttcaacatgtttcctaggacactggataggaaaagacaaccaggaagggattactcagttgttccataaagcaattcccattgtcttcagtaaactctagccaactacttgcatattccttttatttctttcagggtgttttctgtggaaaatctctacggtctgatagttggcatcctggcagttaattttatggagagttagcttttgtacattcctacaacatcggctcctcctttccctcccactgcaaaccccagtcagtaggagattctagaaacttgaagagagataccactttgtttttcttcctaaaggtgcaactatttagttggatgtaaaatcctacactcttcagttgttaaatctgtctctgaatctagtcatccctcaggggttttattaatctaaatgaccamcattatcacagctgcaactcatcttaagaactatttctcagaaaaaaacagtaagtagctagtgactctgtacacagagaaaaaaataaagaacagtttaaatcatatcagggtttcttctgaaatttttttcagtgttggaatgtgtaacttttaatctcattttggggaattttaaaatttggtttggattaaagagcaaaatgttggaaaagtaaacagcttattatctaaaggcattaaatatctaaaggcattaaatgtctaaagatattaaagaatgcatactttcagattcacctttttaaatacattgaaatttttattcaccawcatggtaaatcttttaaatctgttygaattaacatattgtaaatgatactcaatatatacatattgtatgtgattttatatgcagtaagttataagacccatggctttttgaacaattgataatgaacatttaaaatggtaagatagatcttagaaatggtatctgatttcctcttacttctagtgagttgtgtcattgaatgttttagataaaatctttgaattatgaatattatgcacatgaaagagtatatataatattggtacagtttaaagaatagcaaacattggtgcatattagcctcaaatttaacactgaaagagacatgtatctccctaccctcttaaaacttacagtcccttgtcgagtcatatttgaatgtatgttgacaagacctacgtcattcttgaataccagccccagagaatctaattcagtagattagagttggagctcaggaatctgtattttcaacatgtttcctggtagactggattggaagagacaactaggaagggattactcggttgtcctataaagtaattcagtgtgtcttcaacaaacactagccaactcgatgcattttcccgttactgctttcagagtgttctactattcagcttaagaaataaaacattatcagtgactacagtttcctgagtgctctaccctgatcccatacttctctcttccttatacagttaacctgtagcatgagttttaagaaaatcattccatagcatggatctcttaaaaatagaattatatatatatatgtttatttttgtctatttttgaacgcgttagaatcatactgtgtttmttctttgactcatttttttcattcaggtttgtttttgagattcaaccgtgttgatatgtataattatagttcattcattttcccactatatattaatgcattatacgaaggtcctataacattgatccattctagtattgatgggtttttggattgttttcaatacttttttgaatattatcaacaatatgaataaaattatatgtggcttttagtgcacatgtacaagtatttctctaaggcatatacctgggagttaaattgttaggttaaatatggtatgtgcttgttcagctttcctaaatagaatcaaagtayactccaaagtgattgtagcaatatacactctccccggcagggtgggtgaattctagttgtcctatataccgacaaatatgatgggtgtaaaatgaaatttactgtggttttaatttttatgtctatgatgaataatgatgttgaagctctttttatatatttaggagtcattcttgaaatgcctttgtttttgttcactttattattgttggtttgtcttcgtattatttcataagattcctttacatattttcgatatgtgtcttttgtcgtctagatatattgtgagtgttttctcgtaggatttttctcaaattttcactctctttaaagtgatttttaggacaaaaattatctttcaattttaatgtatgtggattagttttctctggcatctataacaaattaccgcaaactcagtggcttaaaacaacacacatttattctctttcagttctggaaggtcataagcacgaagtcagtttcactgggccaagatcaaggtttcagcagaggcttgctttctcaggagactccaggggaaaattcttttcctttccttttccaccttctagagcttcattccttgcattccttggctcctggcctcttcctccatcttcaaaggcagcagtttagcatcttgtttccatcttcacattgcctcgactgctgctgtccttaaagtttcctctgcttctttcttctgtggacactggggattatatttaggctccattcagataatcgggggaatctccctatctcaaaatccttaatttagtctcatccgcaaattcccttttgccctataaaataactttgacaggttcagggattagaatgtggctatctttgggggccattattcatcctaacatagaagataaatttatctttttttttattttggtggagatggtagtgagacagtgctgtgactgttgaatcttcagaggccagattagcccaattttgtaagtagtctctttaggtcactgttgatcaaaaatgagtgaccaaatacttctgccacttaaagatgggggaatatttctttttccttaacatctatcacttataccaaatgtaggagaggaaaaaatgtgtgtgaktgtgtgtgtgtgtgtgtgtgtgtgtgtgtgtgtgtgtgtatgttccttcttttaaaattcctgagctcctctctttcctcccatgttaaaatcggtagcatgtccaagcctctgggcctactgccttcggttagctcacacttgctttttcatgtgaagtttgttctatggcataatcttagtaaagcgttttwaaaacaaaaagatacggaggctttttacaaccccttcgcctaattatatgattcattaaaagaatcttgggggtgggcatggtggtgactcatgcctgtcatcccagcactttgggaggacgaggccagcagatcacttgaggtcaggggtttgagaccagcctggccaacgtggtgaaaccccatctctaccaaaaaatacaaaaattagccagacatgttggcacatgcctgtggtccyagctactcgagaggctgaagtaggaggattgattgaacctcggaggcagaggttgcagtgagccgagatgatgccagtgcacttcagcctgggtgacacaccatacacacacacacacacatacacaatcttggtatgtaatgaacagagaaaatgctttcagttttgttttgtgcatctggaaagaaaatgggattcaaatgggctgaagaaacaggccgtacccctaagaaagaaagaaactgagaggcagatattcttggaacttttggtgcagaatgccagaagctagataagcaccccaagtagaaaccagaggaaagtgactgggggcgagaagccataagcacaagaattgtttaaatgcttcagtttgcattttagttcatgctacaagttatgtagttcatgctacaagtttatgcctggagcttaaaatcaggcatttttctctatctaaatttctttgctttaaccattgcattttaaataatttactctcctttcttttgagatataaaagaaagattttgttcttgcttttattcttattttgaggattgtggcaacatgtagaaaaacaggagtagagcattgctattattgacaaaatactaatgttacgaagttattgacctataatgtccttagactgggaaaaatcaatgccttggtaatatctatgccaagtggcaaaaaggagacatcagatatttatgttgttctacataatatttgattttatgatatttgagttttgcgggatatatttgatggatgttatgatcttaataagtagagattgtcaactcttctgtgaatggcatataaaaaatgataagagaatgtcaacggacatttaaagaaaccgaataactgagtaaaataagtaattcaatacttctgccttaaagatgggaacttaaaatttcatatagttagtgtgtcttgattattgcctattccatcttgtggcatcatacaccctgtaaatctacagcaggagaatacagttggcattggagaggaactggtttcatatgattatctaaattatccaagaagaatggactatgaatcccttgaacatatgcttgagtccacagggattcaaaccaacgcctggggtttagatggaaaggccttgcccaaagagcaaaaagatatgacaacaaaattataacccttggcaaattccatcaaattgatttgaatccgtgggctgaaaatgtcagtgcttattaaagtatacattgaaaattattaagaatatgattgctgaatgtcccatattcttttgtgtcattaacaataaagtggcagctgagcatttgtcttgtctaacaggattactgttggctatgaattaaaaaacagaacgtggaggaattgccttgttaactactaatactatttcgtggtttagtatagatgggttaatcctcattctatctacttttatatactcactgctaagccatattttgaggctgtttctctaacagatgcacagggagcactttcttattgctagagtacaaaaaaggaaagacatgtttgtgatgttttcaagaacttcagtgtccgttgcatatataaccttttgaaacaaagaaatcctatgcatttgactaagattgcctgtgaaatctggcgctgctaaaagaaaaatatgagataatattttaccataagtacttctttttcctattaaaaaatatcacagcaaaaacaaacactatgtgccagcaaatttatgcccctaattatcctgagaattatcatgcagtttgcaaggaagaaggggctctagctttccagttgctgatcggcaataatgaacccctgctctgttgttaaatactttttttttggtagagtcataaagaacagcacttctagcaaagatgcaaaatgttaaggccgtaagtcaaaggaataattcgatatctggcttgataaacggatttttaaaaataaccttgatttctgctaaaatcttttcccttgaacataaaagggagtgaaggatttgtatatttcaaggtaattaaaacattactgatttaaaggaatactatcatgtataagacgaagaaaactagaaagatttctttttctctgtcatccagtatgttagccttgagagtgagacccttaaagcagcaacagagtgagactttttgaaaacgccatagcaacctggcctcgtagcccatgcctttctttagaacaacaaagaatggtgcttgaaaagtcttctcatgattcttctgcttcaacagcttgcctttctccttgtcaccagagtaagccattccttccagatcgcatcttctgccagaagccacaagtttggcttcttgaaatctcagaagtactcattcctcaagtaattaattaaaacaaataaataaaatgtgtaaggctttaagcttctgcaggaggctcatattcttccaaaatagtctgtcaacaattacagtatttataataataattgtgagagaaggataattagctttaggaattcttcttcatctagatttttataaagtgttcttaggaatagggatggtttattcctattgacagcttgtcccatgtaggggagtcatgtttgaaggcaacataccagattggaaggagcaatgattcaaaacaggatactgaggaaataaacatactgatatagtatatagttgtaatagctgcagttgtaatcaggcatacataacctaggcagccatttacattttatacaccctcattagagcgagcttctggaaacacattagtcatattatataattaataagtactggatccagagccaataggctgagcaatacacacctgccttcagtgagcccctgatgacacttattctttttgtttttcttgtattttcagtacctacctagcacactgcttgacattcaataaagactcaataaatattggatgtattaaacaagattaaaaactgcctgtaaacgtaatggtgtaaatgtttactgtaaatgtaaacttttccaggaaataatgcttttcgtccacctgttttgaaatataattaaaatgacattttccttttcataatcaggacaagtgttaatattacaaaatccttattaagtcaggacaatgtcaatattttatgggctgtatttcaacattattaattctaatgtaaaatagtcactctttgactataaatctcaaatcatttccaggtcaaaattttggcacatttttttgcctagatttttggatagttgaaatgtctaccagccttctgaattttctcatgcatttttctcactgtcctgattaaagagcagaaaataattacactaattttaaaatatatactttgtgacatttttcaacatttattaaaacccacattttattatggccaggcttcttatctctacttttgcttagaaaaatgacagttagtttggaattcatttttgatttttcaggtagtgttgctgtatttctcaagaataatggttgagttatggtatcgaatacttctaaatattcatccttgttgaaaaggttttagtcattcccttaaaaggttaatagacattgaaaaacactgaataattcatttttatgtacataagctgtatcaaatgtagtgtagtctacaaggtaacatcagggctaaagtttcattccagtggggactgatggactgctctctttttgtgggtataacgtgattgtactagtaagcccaggggactttacaccactcctccttgatcagtcctgaagttcatgtattacctttttacctaaatttctttcagtgttttcttctctgctatcccttgagtatatctcttgagcttatcatgtgtcttggttgttgagggccagaactgaagaactgtccctatcccttcttgtgagttaaaagggaattaaggaaaaggaatctcactgcagaagaatgttttggttgttcatcctatatttaatcttgctcctttragtttatggtcaaacatgagcacatttataaaatgctttcctggggcagcgtggaagaaactgtgtttggaaagtgatattacactgaggacacttgggcaagaggcttctgcagcttcagtcgccattgctttgaagatcatcactcattgctcgaaatcttctatgaactcctgtaagttcagatgttaatagctgaacattgttcaacaaagtcttaaattgattttaaatggactggtatagcaaagcaattggaaggtatacaaaagagcaaaattgagaagctgggtgatctaagcctgaagtcctcaaatatttaaaagacttagtttgtcaagatttaaccatctttttctgrgttcttttcatcactgttgacaaaagcaagcactggagaaaaatttttcttttgcctatggggccagcagtgaagatgagctcatctgtccatcaagctcttgctgctgctacctggcctcatttaatagctgtgaggccaaatccttactgtctttgaagtcagaacatgcaaagtttgagtatttgatgtatctttgagatgtgtcagtggccaaccaatgagagggatttggcagttagtgtcaatgctacaaaagacagttaattgtacgaaaaccacaggataaaactccaagtcaaaacaatagaacatcatccaggttatatattttttagctatgtagcaggggccctctgcattcagggcttttaaacttatttccattaacatctttatcatttacatagtaaagctttcagaatataaaaattcttctgattatggacaagctactgtgtgtccaaagcattgtataatttaacatgatcaactactttttctaaaaatgttatttctcaaagaaataaaatatagcatttgcaaaacacacacacagaggatcttattattgaagaaatgcctaggttatttgcaagtctattaggaataattttccttaacttattgactgttttcatctcatggaaagaagtttccctcctgtctttgctttggattatgtaactttgatttttcttaaagtaatgatttgcctagaagtgaattcattcagcttaaaaaccatagtagggcagtgtgaaaggaaaatttatgaataactttttccactatcttttcacaaagataagttctagtgggagaagctctcaaagtaaccaaacaaaactagcattgacagtgaaggcagaacgccattcaggttctgaaatgaaaccataggagaaattgtcttcattgacttgaccttaactaacttgctagcgttaaccagtgctctggagtctttctgttaaaaataccaactgatgttcatcaattgtggtggttacctggccagtttatgccacttttccttagtgttgtaattgcagaatttaattaaaaattatataaaccactgaaatataagccaaaaatattgttgttgtttctatgaaaacttgattgaatgctttctttgaaagacttgatgaaggcaaagtagatacagcatatatgttaactgaggtgtagatgaaataattagggactgtgggtaaaactgtaatcaaataactgtgcagcattacagatgtttaaattacctttcttctaaaggtgacatgaaatagagagtaggagacctaaaccttgcaggattttagcccttcatagaaagattggtgaatgaatgtctgaataatgaatgtttcaagttgaaactgaatatttattatatgctcatttaattattaaacatgattatttgctttatgtggctctttcaactgtatttactgacgttgttgttgttgttgttattaactagtcctagtcatttggataagaagactcttgccctattagatcaatccctaatcataactggggtactataggacctactctttgttagctacatatagagtaacacaatgaaacagccagcaaaaataagtaaaggaagcattttaatatttatgtatttttaagaacattgacatgaatcccatttattgcttagagcatctcttcacaaatcccccaaactctacagattttcggcttcaacaatttattcagattctccacgtaagtgacttgggaaatagatttttttttttttttttttttttttttttgagnnnnnnnnnnnnnnnnnnnncgcctcccgtgttcacgccgctttcctgcctcagcctcccgagtagctgggactacaggcgcccgccaccacgcccagctaattttttgtattttttgtagagacgggatttcaccgtgttagccaggatggtctcgatctcctgacctcgtgatccacctgcctcggcctcccaaagtgctaggattacaggcgtgagccaccacgctcagcgagaaatagatatttttaacaaggtccccaagtaattttctctaacaagtacagaaagcacaagattatttctccctgttgttttgactcgtgtgattacataattgatcatttaactaagaaatgaaaagtattttagtgactaaaagtattcattgcacacatgtatttttttttctgtaaaaaaaaaaaacctgatgtagaagaatgtttctaagccatataggaacacaaatatttttgttccagaataacttaccagaaggccatggcatagagaaattccctcatttctataagtgtgcttttctcttgaatgagctttacttcagtgttttacttgggcacatgtagggaaagaaaaaaatcatgttcaagttgaggaataagaagagtttcagatgaagagaagcagattctggcacacaaagttgaacagtgcaaaacattgaagcccagctatacataatcaagctggctaagctataatacacattaaaataaaagtttttttctcaatggacaaaattggaactaagtatgtctgactgttttagagataagcacttctcaacttctaacataaaaagagaagctggtgtttatgtgaaagaatctatgtaaaagccatatggaactgtctctaataaatatccatttaatcaaatgtcactatgtttttgaatgttttgtagtttgatgcagagaatgtacttttatttcttcagcagctgctctttttaaatggatgcagctgtactacagatttaatttgcaacaattgcttaatttttagttggttgcttctagtctttcaaaagcaatgtttcatgtttctgtggaaagatttttttcctagaaagtgcaaagtacgatatgacgtaggaattaggcaaataaaagtttctgcttgatttttttaaaacataaaagttgtatttcctctctttatagcactgcttttcctagacatccttttttcagacaacattactaaggagatttgatgcctacatatcagtcttcatctcaaaacttctaaaagaggccttacgcggtagctcactcctgtaatcycagcactttgggaggccgaggtgggcggatcgcgaggtcaggatatcgggaccatcctggccaaaatgttgaagccccgtctctactaaaaatacaaaaattagctgggcgtggtggtgggcgcctgtagttccagctaccggggaggctgagccaggagaattgtttgaaccccggaggcggaggttgcagtgagccgagatcgcaccactgcactccagcctgttgacatagcgacactccatctcaacaaaaacaaaaaacaaacaaacttctaaaagattgtaagctgtaacaaattctggcaartgacttgcaaatgagaagaaaaaaatcacgctcattcatgtaaaatggtatctgctttgagaataacccagtatcaagtatgtgttacttgaattagaactttgactttttaatatagagagatacttttatctttgacgtattttattaaaatgtaaagcacatgatgttcctttcctatttccttatattactctgtttttactgtaatgtttagaaatctactttctagtttaattgttatggagaaatcatcttcctgtatagattaaaattcaatcttttttgaactcaaagaaaaatttggaggsaaagataaatattaatgatggattatctaatatttgttccaatctcaacatgttttacttctcatagccttttatcttccagataaaattatgagcgcagatgtatagacatttaaaatgtgattttaaaaatgtataatgcttttaactttcctcatgtaagacttgtctatagggctctggatgtgtgagcaggctgcctggaacctcctagcctgctggttcctttactcctcccatatccaactgactcatagcttagtgaacagttttttgtttttgttttttctttaaattttgccttctttctggagtattttcaaaaatctccttgtgtatatattggaatatttttagctgttacctaagtacttaatttctttatatagtaggtcatgcagacagaattctgcaatacatacaaatttgtatctcccctcctcaaactagtccctctgagttaaacaaagtagttactataatttccttgggatttttatctcttaaaagtatgctatgcttagtggtatgtatataattcagtaatagtctgttttaatttttatataaggtttttctttaatattttaactgttgcttattaaataaaacccatttgtaataaaaacagagttaagtataatcagtgttcccccaaatcaacgtatctctcttgtacaatttctcatcatattgggtaagggaaaatgtgatttttggcgtatctgtgatttctgaaggaaaggggtttctctgtagaacacaatgtgcttattctttttcactttaacactggtatctattaatggctaatgagctccattaggtttaatcaacatttcagcaatttttgacttgaattttgtttaaactttctgctttgtcttttaccttttgttctttattaygttagctcatttaatttttatacgtaggataaaacatacactttgaaatggcctcagaatttgaaagtatggctgtaaagggtgaaatcactgatgttaagggaacataactaataatggtcattgacgtacggatgactagaaaggccagttgtaattcgtgtttaaaaaattactatatcatcttcaaagatttatttatttatttttgttccttttcttggtgtggtttgtgtgttgatgggtggtgaatttggaggaaagaaatgagtcttgagaaaataccttggtcattcattcttaatatgtttagagaatagcaaactttcagcatattttattgagatcaaaagtagcatgtgaaattagacaatgaaatgtcaatttttgtattagtttcctggggctgttgtcacaaagtaccaaaaactgtgctgcttaaacaataggaatgcattgtcccacagttctggaggctgcaagtcgaagatcaaggtgtcagcaagttggttctttctgagggctgcgagggaaaatctattctgtgcctctctcctagcttttggggactcaagcattccttggcttgtaatggcattcttcccatgcctctttttatatgtctgtctctgaatccaaatttcttttttataaagacacagacatattggattggaacctagcctaatgactccaacttgatcatcagcaatgaccctattttcaaataaggtcatgtttattcacactgaggattagaactgcaaatatgtttttttttaggggggacacaattcaacccataagaattctgaaactttgttttgtccttttttgattagtgttaatacattttcagagtactttatattctcagggcttagaataagacaaagtaagattattcattcgagtatactgggttatttagtaagaaaatggactgagatttcataatgaactctctgctgatattgacatgaaaactagcacattttaaggattcacctatctacatttacatgaaatcaatgttcttataaccttctgacatttacttacctttttgtatttacttatatacttaattttgcttttaagtattattactatctttaatgcatttgtgctcttttttaatatggcaggctatggagtacaaagatttgtgtttttctggattagcaaaaaataaaacaaaactgtaaatccaatcattcagatgagttctttggaacaactgaggagtctgtggcctgaccaacaagactaaggaccttacttcactactatttggatgccacggcttgaggttttgttaatattttagtgtttctcctaataaaatccaagggatagttgttcttttagagcacatttataaattcttattttagcctatcgctgatagacctttaaaaatatattgccttgacatttatattgatagagcatatattagtctgttttcacactgctataaagaactgcctgagactgggtaatttataaaggaaagagctgtaattggctcacagttctacatggctggggaggcctcgggaaacttacaatcatggtggaaggtgaaggggaagcaatgcaccttcttcgcaaggtggcaggaaggagaatgaacacaggaggaactgcctaacactttaaaaccatcagatctcttgagaactcactatcatgagaatagcatggggaagccatccccatgattcaattacatccacttggtgtctcccttgacacatcggaatcatggggattacaattcaagatgagattttgagtggggacacagccaaaccatatcagagggatacattcattaagattaacaattcttacttcccagtgtatatgttcctcatgtttttaaaaaggaaaatatgatagatgtggtgatttagaaactggctgcttctatgtggttcacctaatccaagatttttgcttatttgtttgtttttttgagacagagtcttgctctgtcacctgtgctggagtgcagtggtgcaatctcaatccactgcaacccccgccttccaggttcaagcaattctcatgcgtcagcctcccaggtagctgggattacaggcatgtgccaccacatctggctagtttttgtatttttagtagagatggggtttcaccctgttggccaggctggtctccagcttctggcctcaagtgacctgcctgccttggcctcccaaagtgttgggattacaggcatgagtcaccacgcttggcttaatcacagatattaaaatcacatgtttgtttgagagttagagatacgtgtagagactttcaaagcattacttgaatttttttcatagttttttaaaactttgtttctaattattgaaataatcaatgcttactgaacaaatyttaaaaaataaagagaagtatgtgaagagaagtacttaaaatccaagcataatataatattaaatttgactggcgtagtgtctatctgtgagtgtgtgttcacatgcctatgtgtagaactaaagaataatttaaataaattatgacttatacaaatrtgaatgaatgtatgcccaaaattccatttaactgattgattaatgagggaaccagtaagatgttacaactgattcaaatgagaagttaaagtatcacatacatttaaagtcagraaagaagtgctaaatgaatttacaaaaaggtgcataaggctggacacggtggctcatgcctgtaatcccagcaatttgggaggctgagataggcagatcacttgaggtcaagagtttgagaccagcctggtcaacatggtgaaaccctgtctctactaaaaaaaaaaaaaaaaaaaaaaaaaaattaattccagctacttgggaggctgaggtgggggaattgcttgaacccaggaggcagaagttgtagcgagccaagattgcgccactgcactccagccygggcaacagagagagactcaggcttaagaaaaaawaaaaaataaaataaaaaaagtggtcagtttctacaaggcaatattcaattgcattccaatggatacaacatccatttctatttttgttatttttctgttagtaaatgagattgctgtcagtttctattattttcagagttgtaaaatggctcaaagacaataaaagccagagaaatgcatgagctagtcagggaacctactaatttgtcatgttttttctttttgcccattttgaagtttttcacacagtttttaatacagctcatattgatatatattctcatcagttggaattatgtttttatgtttcttcacatagagcaaatataattaaaaataaaagcataatgcatattccttcctattgacattgatactatctatagcgttacccaggagcattatgaaatgcacaacacttaaaaccaaataaaacaaaaataccctttccttgagctctttactcttggggggcaagaggggcactatattatcctttttaccttcttcctcccagtcaacctctctctttttcacgtactctaccaacatccccacccaatctccccttatgcctccaaaattagtcctatcctgattgtggagtttggggttttctttgattcaatggatgataccagtcacaccatttgaaaaaagcatatgacagtgttgttcagtgttggtgaacaggaattcttgatatttatttttaaggattccawttaattgctaattacagatctttgttaaattaagccgaccttcactcacatttaaaaaatttaactttgttttggttttcatgagacaaatatctctctttaagtgaacaagcttttaaaagaattagcttcttcagtatggaaagcaagatgcaattcgcagctggtgcaatggcttacaccagtatgtaatcccagcactatgggaggccgagggggaagaatcccttgaacccaggagttcaagcccgggctgagtgacacagtgagacatctttacaacaacaacaacaaaaacaaaataacaataacaacaaataattacctcagcctctcgagtatactgtaggtacaaagccaccacgtgtacctgtagtcccagctactcgagaggctgaatagagggattgcttgagcctgggaggttgaggctgccgtgagctgtaattgcaccactatactgcagtctgggcaagagtgagtccctgtctccaaaaaaaaaaaaaaaagagaaaaagaagcagttcccctaatgattctggatcattatgccagaagtatccaggttcaaagcgatattttatattttagtaagtagttttcactaataattcttcagcaatcaacgaataattcttctggaatacatcaattgtttgagaatcataaaagagatttccaaataccgtactccaaaatcagtaacacactctgaatctgaattgggctatgtaaatgtcttcagtttacagttaagtatagatttttacttgcagttattttctcttagtcatttctttccttcattaaggacttcgtattttattttcatttgcgtgcatggacaagagaatggatgcattcattttgttgtttctagagatgaatacagaaaatgcctagtgaagactgagtctggctgtgatttacaaagttggagcgttatagccagtaagcctgtcaggcagcccctgacagcagaagcaagtcttgaggtgggcatgagaaatgacagccttctttatgccagagtcttattaccattttgatttaaaaaacattgttttgggtctcagtaaactattgtagccatgaaaatgagataaaataactatttggtttgtcctatgtatattctatatatgaaaggaagaaaaatcagtacatggctatcagtctctacagaggaggggaaataatttgtgcttagatatattaatgcctaactgatgttttatatatgtgatcataagatatgtcatttacttaaaatttatagttaatccccttttttgcctcacctacagacaaaatggctttattccagcaaaattaagtcagaaaataatgttcactgatttagatgttgatgacagatgggtcttaggtcaggataacagctatggctgggagacattgattgttaacatttatgccccaataatgaatgacctgaatttttcccacatgtttgctcaggaaacacagggctgtggaggtcttgacgtcatagaggcagaaggatttggggccagagtatattcactgctggcagtcattcattagtaaatccttggtaagagagttggatttgagtgacatctggaggctttctatacctagagatgggggagttctgggtttgtatttttttctggtaagctagattcatcttttaggaaataccatatatataattgatgggtttaacatttcacattgagaggaggtgaaagattgaaagaattgaagaagaaagattgagtttgtatgattttttcccctgaatgaatttggttaatttagtgttaggtgctaatataaaacattgcttgagccatgtagtgtcaggaaaacatatctgttattagttcttggttgccatttaaaaatggagattgaaatttcctttacctagcaggaaaattacaacagtgatccttgaatatttggaaaggacacatacattccaaagtgtctagtgatgaggcaaaattgttcatattgaattcctttttcttgctcaaggccatttctggaggaaacttgtaatattggagaagttacatgagcacattgtgtttgctgcatggaaaggagaatataaggcttctcagcacagtggctaagcagatcaagagttgaggttaggttagcaatcatgaggctgaggtgcaacttagactccagtcccctataaaatataccttatagagtttagagatttgatgcaattcaaagcaaatttactatrttgaacatcagcaatgtcccaaagaagaccataaaattctgtggtggttaaaatctgttgtttaaacattagaagtataatattaaacatttctttctgttggttctcgtcccattagaagagctagatcctaatagctctttggtaccttatcaaaacaggagaaacaataatttaatgatcctttaatccaggggtggtggctcatacctgtgatttcagttatttgggaggcccaggatcacttgaggccggggagtttgagaccagtctgggcaacatagtgagaccccgtctgtaccaaataaaaattagccagatatgacggtatgtgcctgtagtcctagctactcaggaggctgaggcaggaggattacttgagcccaggagtttgaggcccactgtaatctagcctgggaaacagagtgagcctgactcaaaaaaatcctttaatacttttctattcaagaatttttcttttcagtccaagaagatcaatatgttaccaacaaagcaatttcccatcaaaatggcatctttgccgattcagtgccacaaaaccaatacccaaaccgaaagtgaacatctagcagtgcaggctttattgatggcatgggattgagaagctcaagagagctgggaagtcacagaaacaggcatctctaatgaaagggttgggtattaaaaataaggggacgaacattcgtgttttcttctgggaacgggcagagaactcctcaaaaccagagtgctgccttccctcccccaccttttgtttcaatgggttgttgtcatggtgattgtaaactgtcatggtgctgtgaggtgtatcatttagcatgaaaattagattataatgaagttagagtttcttcagaggtcaagaaagctgccatcttggatcccgctagtcttggccagtttggtcactagggggacttttgacctcaggtgtcccatttttaaagataaacagagttaaggaaggatagaaattcacctatgtcatgtaggcatcatactgggtaacaaacctgcaacacattgtctagacctctgtgttagagaatgattattcatactttatggaaagaccttgtagttaagattgtcaagtaatatttaactacaaagtggattgtctgccttagctaggttactctaccggtataatcgaatctctttacagtagtagttagtagtagtaagtagtgtccaatgttactgcgtttttgtttgagaaataataaaattcaaatgttgtagaactataaaatatacagatttaaattccctgttgtaatcttacttcccagagaaaattcctgacgataatttagtacagagagtttttttttgaggcagagtctcgccgtgttgcccaggctggagtgtagtggtgcgatctcagctcactgcaacctccatctcccacgttgaagctattcttatgcctcagccttctgagtagctgggattacacgtgtgcatcaccacgtccagccaattcttgtgtttttagtagagatggggtttcaccacgttgtccaagctggtctcaaactccttacctcaagtgatcctcctcccacctcgccctcacaaagtgctgggattacaagtgtgagccactgcagcagtcctagtagtctttcaatactaaaatgacacatagaccagcatagtgggggaggcaggaagtattgcagggtgagtagaagcacagcacagcctctggagccacagtgtctgggttcgaatcctgtctgctattgtatgagtcacagtctgggcaggaaatagatgactcaggggtcattgaagactttgaggaagtacctagttatagaagtattaagaaaagcaacaaggaatgatgaggcaacctgggtgcccaaaaagtgaaagtggttatcactaggaccaaaggcacgaggagagggaggtgtaactgagacccagtgagagcagtrcctgtgggaaaggggctactgaacaggagctgtggctatgggtagagaaatgcagccactattggattacgctgctgcactgagcaggtgggggcagggcagcgaggggtgattataaatactcacctcaacctcctttcttttattccacactcactgatggttactgtcatgggctgaatcctaacaagatccatggactccagaatccaggtgttgtaatttgtaaaatcagcctctttagggcagaggaaaaggaaggagatgagtaagggtggggtggtggtggcgggaataaagacttacaagcaaaaagcaaaaacacttactagctgtgtttgctagcaaggcactgtgtttcctagtaactctgtgctttattttccttattgatttaaagaggagaataatagaaccaataatatagggttattatgagagttaaataagttaatatgtatgaaatgtgtaggtgagtaccacctgtatagaaattagtcagcaaatattgtcaatagtatcattaacactttatagattaattcatttatgaattatgaattaattttacatgcaccttttagctgtttctgatttttacttagcagtgtatcttgatcacctccttctctgtctgtatatgtacatatacatatatggacagtcagccctctgtatctgtgtgttctgcctttgtggattcaaccaattgtgaatagaaaatattagaaaaaataacagtacaacaataaaataatataaataaaaatagaacttacatagcatttacattatattatgtattttaagtaatccagagatgatttaaagcatatgaaaggatgtgtataggttatgtgcacatactatgctatttatctatgagggtcctagagcaaattcccctgagataccaagggttgactatatgtacatatacagacacacaaacacacacagatgtgcctcacttctctctctctccacacattcacactcacacccattcacaaactacttttcttttttttttgaggtggagttttgctcttgttgccaaggctgcagtacaatggcgcaacctaagctcaccgcagcctccgactcccaggttcaagcaattctactgcctcagcctaccaagtagctgggactacaggcatgcgccaccaagcccagctaattttgtatttttagtagagacagggtttctccatgttggtcaggctggtctcgaactcctgacctcaggtgatccgcctgcctcgacctcccaaagtgttgggattacaggcgtgagccagcacgcctggccgcaaactacttttcaatggcttcagagtattccaatgtatggatataccagaatacacttaaacctttctgtttacaaggggattcagactattttcagtattttaccattatgcacaatgctgtagtaacatttgaacttctaacctctaattttggattcaagtgaagcaagtgagttttgtgtattttgagtcatctagattaagttgtcttcaggccgctctctgatgagaaggaatgtaaatgagtgacattagtacaaatattcaagtggctgaagccttttatttttcttggtcctaacccaattcaattttatagagaaaaagtttatagagtttttacatgacctttaactttattgaagaagagcttttaaaatattttcttgataccaccatatgccctgcacttaggtttcatattgtttatgaaaatattgatagctgtgtaatcaaattcagggccaaatattttcagtgtttgattttattgtaatgtggtcagagaaacataattataggtgagtgacttgaaactcatgctgtgtgtaggtacatttcttaacagaataatgtatctcgtgagtgttatgtatgtgtgtctctgtgtgtgtttgtgtgtctctgtgttgtgtgtgtgtatagttttgtcctcaaacttatttctccttacatgataaattatgactttcctttcctatggaataaatgttaccagttcaagttgaccaagtgtgaaaacaagtgacatttatttcctgctttcctacttctgggcagaattggagtggaaagtaatacatgtcgttctgcactgaaatatttaggactattttgccctgtagtagacaatttaggcttaataaaaaggtttccatccagtgtttgctaaaggtaattgaagagaattggagaaaataatattttaaacaattccgcaaaaaaaaaaaaaatacataaatagaagccstatgttttgatggcattgatggcagtctgttctaaattcagtacaactgtgtttcatcagataagttacttagcacaaatgtgattcatgtaaagaaaccgattctgaatcattatttatttatttaaacatagtgtctgtctaaaatcattcaatttgagaattcttccatatggacagtggacaagagaatgttccatgaatttttatatactctcctttgccctaagtctgcctgtttgaaatgtgttcaatcaatgcctgcttggagttctgctatcctcttctttcctctcctgttttcttgaccattcttcttgtggtcaccaatacaagttctgttcatctagttgtctgggctctggcttgaacctttattgctggcacttagcataacagctaaatacttaaaatgctttcattataccagattttggatttctttaatttgtgaccacaagctcagtgttttgaaaggtagaatcatacaaagaaacaactataatctaattaacctaagataagtagttaatgttttatgtgtcttcatcattttatatattttacatagaacaatatacttaattttgaatattccttttaaacttgtctgtttcacaggcatttttttctgtattaagttttcaaaaacatttttaatggtcatgtgccaatttttttctatggctattacataacattctctcttgttagacatttttgttgttttcgacttttccctactrcaattaataatgacatgaaaagttttgtataaaacacttcaagttgcagaacatctctttacagaatattcctagaagtggaattattaggccaaatggtaggaatacttttaagctttctgtatatgttgccagattgctttttaagaaggttgtaccaatttacactcccactagcaatgtaggagagtgcctggtaactttttaattggatttctttgataagaaactaaatggacaacatttaactgttcatcaaaaagagagaggagtttgttgaatttctgttattgcactaaaggaattctacatgttaaaataaatcatttaatttttattctcattgtcatcagactataataatactgaatttgattcacatttccccctctttcgtactcttaatgtcagtacaaataagcaaaggttacagaatactgtgagaaatggtgagaaatgggagctgattctgtgctacttactcaagaaatcatgtgctgttctgtgcacactatctgtctcatcagtaaggaggaaagagatagatgagtgcctgataccaattaagtattccatatgtttgatgtgtggatgcataaatgaagtgatgaagtgataagctcaaaaacctgctattattgaaaggccagagccatcctttgccattgtggtataagtggacaagcccccttacacagatgaaaacatggttggctagttaccattatgctccttagaacttgttcaagaggacttcaggtcactgtagtagaaccacctccacaaacaaaccaacacaattctcagagatctgacgtgacagctctgattcctgatgttctcatggacctgggtactccacatcccaccccccaccgccaccccgcaacaccccgaattctctctctgctacctcatgggccaaattcttttgggatccatactaagaatttattttggctcttatcaatgagctgtccacgttccgttgttggaattcatccaaaattaagtgcctgacttcagggtttaagaagtatacttttttagattttgctttgctttgctatgttggatagaaaagatattggtactgaactttagcttctatctttcacgaatatgggctttgtgctcaaagagaaaagtcttcaaccatggctgcaggattttttaaaatataggacaaataaatatatactatatgaaagtgacagagaaagttgaacagattccagaagagtgtaatttatcttactaatgatgctcttagcagggagatgaactcaggaaacataagagaagttccatgaggacgccttgtacttgaattccacttgctgtagtatctcaaagtttcagcgttatcttgggtgtttatgttacgtgttgaagtgggcgcttattctataatggaagctatattattagatccttcttctcaaaaagccagtcaaatcgctttaatgaaaactgtaagtagttgtgctctaaagaggatgcaattatttaggaaacattctcataagatttaaaccaaaagcaacttaatgtgattctgatacaactgattaagtactttatagttgtcaatcccagaaacataacttatctcaattgaaaaatgtatataacagatagtaatttttataatttattacaattgttatatgaagtcatatttaaattataataaattatatataaactgattatttgaaatgtaatgagttcttcataatctcttaactgaatggagggctgtattctaagagtctcctctattttaatgttaacaagataaagtcttgggcaggtgtttctgctataacgtgattttaaagtttttaaaaaacataggttctacaaattgtgccctaaaaaaaaaaacaggatcatgagaaaacataataattctaaccaaaataatagtggcattagaaagatatgttagtacaaataaataaataaataactgatatagtcaatataaacctaatcatagaaaaagaaaagatgaaggtggattattcaaaagagatggaaagaagagttcagagggtggcaaatgcaaaatgcatcaaaatcaggaaaacaaacattgggtatttccaattagagactcattgatcaaatagaacaaagaagaatactgtgcaggtaaggtttatggattactctatatattactctttgccctgttctgttcarttgtgttagtatactttatgttctgctgctgtgatgactttgtgattaaacattaaccagctctcagggagtggggaggaaatcatgtaagtcaatatatcttttgctatcccactgtttaccaattgcgtatgagctaattaactatgcagaaatgtgttatagcagaaaagatttagtagtgttatacggtaggctaaaaggagtactggttagaaaaattatcaaactatatcctatcatttttccatttatccatatcaagcattttccactataatctctgttatgtaaactggtaactatacctatgttgttaaaggaaaatttaccctaatgttaaataatataaaatcccaagtctcatagattggtgggcattgtggarcttgcagattaaaatataccgcccacccccccaactgaaggaaatgtaggaactctgtatagtcagccttctgtatccctggattctacatccatggattcaaccaacctcagatggaaaatatattcaagaaaaaaagtgagtgagtgtgtctgaactgaacatgtgcagactttaaatcattattccctagacagcagactataccaactatttacatagcatttacattgaattaggtattataagttatctagagatgatttaaagtgaacgggagaatgtgcataggttatatgcaaatactataccattttatatcagggacttgagcatccctggattttggtgtctacagggtcctggaaccaatctgccatggatatcaagagatgactgtattctgtaactcttttctgtatctcagattatttcaacataagtttttttaaaaaggcgtttacttcttcaagctttgtcttacaggtagaacctatctcttactggtagaacctataaaattgaacattttttcacagataaagagtataatgatggaaatgtttcttttcctgtttttctttttctctttccttgctttctttccttccttcttcctctgcccctctgcctcagtatggatgcaaaaaggaacagcagtaaaggcaagaatgtaaagtcattgatgcctcaaattgtcatgaaagagaaggaccaatgatcatctgtatgttatactttttggtagaaaattggcatatgcatgtgtttttgcacttttggggccatggaaagtaaggattaaaaaattatatcctgtggagtctgagatgggtcctgttgtgtgctctgacatcagcaaccctgtgaccttggacaatttacttagtctaacggttctacagtttcacatttatatggtagattgaagaccatactcctgtagaattgttgggaagattataagaggaaatacttgtaaaatgcttaacgttgtgcctaaggtgcaatagtgtctcattggctactgtggacttgtttgaaattattaatctttagtcatctttgtatatcatttccatggacccttacaaaatggttagagatatgcagtgaatagagagactttcataaggatgccgattacaatttgactgtggattgtgcccgaggttgttccttgtatctgttttagaatttataataacaaaaatgaaattaacaaattgatttttatgatataacatatatttaagggtcaactgttagtattcatataattagactaatgatgcaaaaacaaacattttaaacaaacctttcttattaaccttgttcaagttaataagatccagtaataatgtcatccaagtagtgtacattttttctttctctccaccccgattctgctacctttacatatattcaattttcttgttattttattgaagtacaatttgtatgcactaatgcacaagtcttaaatgtacggttcaattagtttggccaatgtatataacctgcatatattttctcagctcatattactagttcctttattataattaacagcatgcaacacattctgagtggtaacgaaggtcaaatgtatgtggggcattttagctgtacgcttgttaatcctcacaaccccacctgtttcctactattattctaattttactgataagagctgagtttaacaagattaaatgacttgctgagggcaccagcaaagcctaccttaaaacacaagcttgggcccttaaccagcatactacactgtatctccttcactgccgaagaagcaagagtctctgccacctgtctaggtttccagagtttctttttcactctgwtgaaattcacaaaaattctcttactcaaacttattagttattgtgtattatgagaatatttaaatcaaaattggatccaagtcaatgtatagggagacatttaagagttttcctgtaagtcaagggtgttcttgaaaagagaactcagataccgtattagatatgataaagtagaatacatcaagagcaaaatattctaattcgaatttagtgcattttatcttacttggaatattattgtctattatttttaactgatggcaatacattttgatgctcaaatagcattttgtgtacattgttaaaaagaaaaagatgattatctttatactctgaagagaatacttacctatattactgaaaaacagttcataaatctaaacttagttctctaatcattttttatttagacttcaaatattttcttccatgtgatatcctttaaaatgttttcttttctttcttcaggattttttttctatgtttgttatttgggtcattcttcagccaagttgctaagcagaaatctgtaaagtagtagtttaatcaaatatgttcctcaagttgttttaaaaatatgtatatttgtatcttgctgcaggacttctctaattttttaaaaaattgatcgatgtgtaagaggctttcattctttctttctttttttttttttttttgagacaaggtcttgctctgttgcccaggctggagtacagtggcgccatctcagctcactgcagcctcgacctcctgggttcaagcaatcctcctgactcagtccctgaagtagctggaactacaagtgtgcgctactatgcccagctaatttttgtatttttagtaaagatggggtgtcatcatgttgcccaggctggccctgaactcctgagctcaagcaatctgcccacctcggtctcccaaagtgctagaattataggcatgagccccggcagctggccaaggcttttattctttcmctgtagagaatttataagtattacagctaaacaagaaaataacgtactaatgtggattcatggttcaggcatacaagttttttctcttaatactaggttctctcaattctgtgaacaaggagttgtactacttttctctttgggcttatgaaacatctagaataattaaatcagaaaagggaaaatatttgttaagtcaaaggaagtattttcttcatctttgtaaacataagtctctacagcacygtaatccatataacctcagcgtcaagtcagattttttttattgcctgaaaactgctaagtgaacacattatatgtaaaattaaagtagtggaagtatacatgattgagcatttaaactggttatatgcaatattactactctaaatagaaataaaattattctgacaaccttgtttgtgccaagtttttggttatttaaaaggagtaaaactttctatttacttcaatagacgtgatgtgaaattattcgtagagcgaggtagttaaattttgtttgcttgtttgcttaccaaatcataccaaaagagttactttttgttcatttaatgagtacttataaaaaatgaagctattttttagtgattgtaaatatttaagtgatcattccagactattttgcaaaattcaagttagtttgatgctgtagtaatacaatcaaaaaaggattctagattttgagaacaaagataatagaaatgattgcatcatgcttttgatgtatcaatttagcacattaagctgtcattattccagtcttatgctaaataacaccccacttcatgcagtgcatcctgatatgatattaaatatatacagactcattctgatttttataaactgtatttgttaagctttccaatttgtatgaatgaactttgaagcactggggaatacggataattgttcactaatttacaaatgatacttcacagagtaatattaatccaaaagataataatcacatatattttgtgaggctatagaggaggctaataccttagatgtattttgtatgaattactgtatcagttaggtacttcctattaaatcacgtgactgactccattcccagatggtagattttcagttttatagattagcaggtctaggaaagagtaaggttcagctgaatgctactgatcacttccaacttctttttattatctaaaatgtatcacttaaggtatgagtctcacaatcatacagaaaagtatatttagtcaaaaggatggctagtatggttagactttaaaggaaccattggaatgaatccccgctacctagaaaactcttctactaggatatatgcctatgacttaatctgtcatcttatttgctcataattcaaatgttccttgccagaaatacctttcctgaagtagttcccccaaaaaatgtttgtctgtagtctgtcttccttactagagtgtgatcaggtcagggactttccctacttggttcacctagagcaggtctagcaaatagaatgcatgtgtatttgtctatggaatacatgactgaaaaagtgagtgactatagaggtaaaaagaagttttaacatcatccaatctaacctttccagtttatatcaaggaaactaagactatgtataaaggaaactaatggttaactgaattcctcaattatttccatggattgaggaaataaataccagaatcacagttcagtgcttagggacacttcgggacattcactcctgccaatagaagatggttaagaagtggtgtttgggagctggacagacataactttggccagagtttgaatcctagctataccacttactagctatgtccctttgtgaaagatatttaatctttctaagtcattttcttcgactataaatggagatgatgcatatctcgttggattattgtgaagcctaaatgagatcatgtatcacagagcctggcacaaggaaaactgttatagctgtcattgtcattatcatcatgaccgtttagtccttatataaattatataggcatttaatccatgattttctatagtaccacggtagtattttttcccaaacttaatgtatttagaacttagttcaccacagatgatatatgaagtttatgaggttgatatgctagtttagaatactagataatactaatatgaaatttggtttctatactagtttataataccagttactattaaatactcatcaatctagtgtttctgatgcctggactttaacaggtattccatagaaagactacacttttatctgtaatagatttttgatataagaaggatgcaaattcagctacagaggttgaaactctgtggaaaaaaataattcaagataaaatgcttttttctcctcctcatcgatttttctatccacaatagaaaaattccatcagtcagaaaccattcaggagaagatatgggtaatgtcctagacatataaattatatagatgcatattgatcattccctattatatagagtgatctaatttgaatttctattttttgagactagagtcagacgtaataatattattttaaaaaagttgtccagatgcatgttattatgtcataactaccttatttcaatacatttctgtgtttgatagttttgcttattttaggttctaattttaaaatatacatcatttttcatattctttagaatttataaaccaccctagaatttataaaccacctttaatgtgtcatcattaaattgtagctttcaaatgtaacagaatctgtaatttactgttacaattagaagatatgaatcaattccttagcttaaaattttttgttgaaaaagaaaataccatgacaactgactgtcttcagaatcatctagggctgattgattcataatctaaatttagggattgttcatatcagaatctaaggaggacttcacrttgcattcattttgttaattcagcaaaagtagtactagttagatctgggaaagtggatgttaaactttatgaatgccagactggattatagttttctcatttgtacagttagcttaatgatttctaaaaccttttttcctttattttccttttccttctcctgttactctgttggtattctgcatgcagataaacatgtgtatctacatgtaacatgtacacagaagccaattcatatatgtgaaaaagctattcactcctgaccacagagagcatgtcttagttttctttaatcctgaatgctggagtctgatacattttagactttcagtgaatatttcttgaataaattttaaaatatctctacatctattaaagagaccatattcttctaagatgactgtattagttatctattgctgctattacaaattactgtaaactttaatggcattaaaaaccacaaatttattaattttataattctatataactatacagaactgtaggtcagaagtctgacatggaccatacggagctaaaatcaaggtgctggcaaggtctcattcctttctcaagtatctgagagggatctgtttccttgccttttccagcttctagaggctgcccaagttccttggcttgcgaccctctttctccagtttcaaagctggcaaaggtgagttgattccttctcacatcacatcactataatttctaccatcttcacgtctctcactattaactctggccctcctgcctcttcttataagtaccttgtgataacattgggcccacccagaaaatcaggatcatygctctaactcaacatccttaatcgcatctgcaaagtaacttttgccatgtacgataacttattcacaaattctagggtttagaacatggacatctttgggggctgtttttctgccaggcactctgagtgtatgccagtagctgaaagcaccagaggtcttttccttgtaattatacagggaagttgcttttttgcttagcaaatacaagtgcttaggccaaacctgtctgaggttttagctcaaagagaagtgctccattcttttaagtttagatttcattccaaatgtgtaaccagcaattactttctatagtcctatatttatggcctattacttgagatcctggtacagtaaattcataatgcattaggtcattagacaatgacagggttctgtgtggtacatggccaattttttggaacttgacctaggagtctccttttctcctactgttaactttgcaatctcttatgaatcattgtttttgtcactgtacctcatttgctcatctatagattgcaaatgatcactcaatctaattcaactgctagactagtaagatcacaatgaaaaatgttctataaagtgtagagctctctttccatatgtggtacatttttaggtcctctcaagggggctcttttgtactgaagtgttttatttactttaatgtaagcatgtgccatggtgaatctttgcacattactgaaaagaactcagtgtttaataaaatcatacctagcactgcctcaaatgttaagctttctggtaaattagacaaagcagatttatcatgccatttcttttttgaatggcagtgttagtccaagttcctgttgatggtctcackattctttccatagttctgttacataaatgtgaaactttaatacctaaataattctaaatatatttttaatgaggaagtcttcaggacagtggttttccaagttattttgtagcagaaggctttttgcaagaaaatatttttgtatatggcagcatggagctgccatatacaaaacaaatatatgtggagctactctggttgtataaggtgataaggcrccaagtccattggttagtgcccccaaaacacatattccagtgtctgctaacttcactggtttctagggaccatagtgggtttcagtggatagggctatttatttggaaaatatttaataagtattgaaatatgccaaataatatatattagggtcaaggagctatgggaactctaaaggaaggtgtgtgtgtgtgtgtgtgtgtgtatgtgtgtgtagcaggttaaacaaatgagttctccaaaaatttattttgtaaatgttaatgctaagtcagtgtttattctctgagctaacctcacctataaaactgtaacccatgtgaaaattaacacttcagattgtttccttggaagttatactatacatttaaaaaacaggtgttttatatgttgtttctataataatatgcactatacacacagtatttcattccagtataacagtctgtataattttgaaatttttttctgcatctgtcccccacaaacagagaatagaggctgtggtgttgggcatttaatgtatgaatgagtacatgaaacatttttattaatcatcttatgaaaggattattttgcaagaattttttgtcataacatgtagattagtttgtaataagaatcttataattgtattttttctcaaacttgatatattttgtagtcatttataattttatagacgaatttataatttggctcatacatatcttcagaaatgatatttgatacgttaacctggttaattgtctaagatgtgcatcttgtgtaactatgaatatacataaaatggataagagaagtaacatgaaacttctaaggaaagtatttggtaagagagagaattctatttgtttttgaaaaattatggcatcaagttaattcattatttttatgtaatgttttagagaaattgatcacttaatgtttcatatatgtacaaaatttagctcacatttgtcatcaaaataaagtattttgtgagaaacaggtcatttttcaagaagactacttatttagtaaataaaaccataaaatattttaaagattttggttggaattttaaaagactgtgtatatttttattctttataaaaggttattaaatttagttttaaacttaattcacataaagggtatttattatgatccggggggtaattgtgcacagttccgcattcactttttggatttatttttttcccctcatcccagaagccagaatgtaagctacatttctgtttgtattggacctttgagagactatgctacatrgctaatggaaaaacctgcatacgagtccaagttctgcctcttctaaaattcattaccataaaggaagttggttagccacagggagtttcttaggctttctcagtttgatttcttagtccctagaaagttcaagtctgtaaaaactagaagtttttataaggaagttatgagaagtaaatgacarggtatttgaaagtacatgacattgtgtatggcatatgttaattgaccagtgaatgctttacatcccttgatctcttaactagaaattaagtggcagactgataactcctargttcatatcgacagcttcccctcttctgaattccacactcatatatccaattgcaataattggcttcttgacttaratacctaacagacgcctcatactccaaatgtgccaaatggaacttccaattattgcctccaaatctgctccatcctttctaacagctgatggcaactccaaccttccgcttactctgtcagaaatcctgaaggcatctctgactcccctttctctgttacacctcacatccaatctaccattagttcaacttgctaaataatccagaatctggtaacttctcaccatctctgctgctacaactctagccaggctggcatcatgcctagctctgattactacagaaacctcgtagctgttctctcggcttccacctctccttcctcactgtgtattcacaacataaattagcccgagtgatcctttcagaacctgagtcagttaatgtcactcctctgctcaaaaccctccaatggctcccgtgttagaccttacagttgcctacatggcctgtgcaattaggctcttttgtctttgtcattacctcatctctcattacctttctcctcacttactccaatgcagctatacttatccttaccattctttgtgtatgccaggcacattctcattgcactggctgttttctttgcctggaccactttgtccccagttatccccatagctcacttcctctctgcctgtgtcttcaagtttttgattaaatgcaacttctatgtacctgatccctcccgcaggactcccatttcaaatggaaaccccaccccccataataccagccctctttatgatactctaaagcactcatcttctaacacatgctaaaatttactcatatataatttttttcacttgaatttgagctctacaatgttacctggtttgttttttttttttagttttgtcctctgatatttcccaatcatctagaacagtgtctggtacataatagttgctcaatgaatatttgtggaatgatttgagtaaacagcaatttgatcagaaaaaaatgcattcttagagttctttcatttcaagcagtattgcttatttaaaaggaatccatttagacgtcataccctttaaagtcggcagtttgaaatttggcaaacaacttgaaagcagcctagatgaagcggttagaatatggtggtagctttgcaattgtactacctgggatcgattcctatttttgccacataaaaagctcattgtgatgatcaattttctgattctttttgtgagctcaaatacttgaaataattaaccaagtagttgataccaaaaaaaaaaaatctgggtttctgggtttttgattgttttcttcagtacttttttttttaagcattaaaaatccatacatatgattattagttttattcttggagatgccattcttacaggttaaggaattatatctttaaatgagcaaaatttcattataatttgttgatgcatgtatttttcgtatatagccagcatttttccctcaccaacatgtgtattctgttaccgtatctcaaactgcccttcttatgctggatttgtgacattgtgcgtcatcaagagctgttctcagaaacgcagattcaattacgtctaacaaacaggccaaatatctaatctgccaccattacagctatattaatctgcttctatccagtagggccttggcttggattacagtaggaaacaccacatctgtgtccacagctgctgccttttaaacaggacccatagcatgatattctggacaagggccttttaaggtgtctagttttaggtgttgggcaaagcctttcctttagtgttctgggcttctagagcaccacccatttttccccttacagaatgttcactttctgtcttctgggtacccctacattagtttctgttgccctaattaagacctcttttccagaagcaatctattatttttgtccagtgagatctatttaccctagaagtgtttgttcttataccttaatttttaaagtttttkttcagtaaaaaacagatatgaataagttggtaggaaaactattttaaaagggtatttttggccctataaaaatcccagcaggtatctctgcctacttttttgttttataatgtctagctctgaaattattgtagcctctgttttctgtttgttaccagatgatattttaatgttttccttccggatgttaaatgtcttttcttctctttagtgccacttagaaaacttggaaataaacaaaaaatgaagctcatatatttttttaccactgtctagaaaccattacwataatgctggtcttaattcatacttactagaattgggagatgtatttgacttactcataaatttgataggtggaaaaagtagcttatttattacgaagctgaaaatgtaatgttttttagccatttgtattttttctcatgaattgtcttctcatttacattttaaatattaatgatatttatatgataaaacatttcaaatgtgcttgacatacattaatatagttttcaaatggaaatttttaatcattttatggtagacattatttcatttaaaaaattctaaaatgggctttatttagatagcaacacattttatcagtattttcttctaaattttttcatttagckgatttttaacatagttctttaatacttttggaattcagttatacaaatggtagttgcatataataagcaaactgtgagtttttttctaaattgctatacaaatttgtcagccagtttaattgaataatgtatattcttttctgttggtatgtaatatattagatcaactaaaataatccactagaattagcaaactaggtagaaattgactatatttaattagagctagaagccagatagtacagtagagaaatggatggcagttcaaaattctggaatatgaagaaaaatagaaaaagagagaaatagcggaaagtagttttagagataaaaatctatatttgaaaaaagagagggacttgagtgtgtatgctgtggacaaattgagggctgagatggagaagttgaagacacaggatggattaggcaaaggattgatgaaactatatattggaaagggcaagaaaagggagtgtaactcccagatggatctgtcaacatggggtagagatgaatgctgtttccattgtagaaatagaagatacagagagttatggtgcaggtagatttgtaggtaggagggcctgaagttgaggaagattccataatatgtcctctgtttcttctataaattaagaagggaagcattctctgagagtgaagaggaaggaaggtcatacatgttatktatatgtcttctccttcattcatttgctcaaaaaaacacytattgaatgtttccatgtgccatgttctgtgttaagactagaagaagcaaccaaaaatgaagtgcacagtggagtctatcaaacaacttcagtcacgagtcagccaggcagccacatgatgaaaaggactctgtcacttctccactgcaacaactaagtcaccactgagtcaaaaataggatctgcttgactaggtgttgccagtttggggaaaacattttcagtttggttgatggcatcaaaatttaaaaaaaggcttcatgttgatacaagtgggtagatatgaaaccaggtgttaaaatatacacatatatttccttgctccgcatactgcagtgttcattgytacactccagcagcaaggatcatacccagcactgagatcgtgatttctaatacctttgcaaattgaaggaaccagagatctgtgaaaaagtggcttaatctagggctggttcaggaatatacgagaaaagcttggagtatcttttagtgcccataaattaggaagtgctcaaatacacacacacacacacacacacacacatacacacacacgatggtgatatgtcagttggacacaggagccaactgaaagagttcccaatggctaaacaacctaagaaacaaaatgaataatgtattagattataacccaaagtataaaataaatattcatgatcctgtactaatagaaatgattaaatagatgggctaaatagctgtctcttatgtaataaaattccaaatagcttatgtggatattgtcctccttaaggatgtatagtgtaactcgccattccttaagtgtgggctactcacagtggttccttccaaagagagacttgggcaaagtcttctcaggagagaaatgggcaaagagaaagagagactgcattggagaaaccttacagacactgcctcagccagatgatcaaggtgaccatcacaataagtggtgttgatagtatagacccataatatgatgtaattagaataccagtttgcctatgtggttgtctcctcaaaaatccataactccatcttatgaaaaaagttcagacaaacccatttgagggatattatagaatatacacgactagcattaaaaatgtaaaagtcatcaaaaacaaagtcagaaaaaattgtcagtcaggaggaacctgaggagacataaagacccaaatgtattataacatcctagataggaccctggaacaaataaaagacaatagataaaaactatatctgagtaaaatattggttgtgtgtaataatacgtcgctattggtccattagttataacaattgtactatgctaatataaaatgttaataacagaaaagtgaagggggctagtggagggggcacagtataagagactatgctatcttcaaaagtcttctgtaaaaagccatcctaaaataggaattttgtttaaaaaacaaaaaatccgctctgcaaattatacactctttaattattttgaagctgctcttataccaagagatgaagacaaatccaataagtactattttgatttgtcaaatgcccctttgtagaggccacggaagctgatggagtaatatctactgttgctttcatatctttcagcagaggaatcaggtaaaatagtcaacattttacaatgttattgcttggggtttaggaaatttcacctcccagaaaggttctatgtgcttatttttaattacacaatggaatatctggcagaacataagacattttaagctgtaagtagaatgattttccaggaatttctgagcatcttagagcctacatttaccattatcagaggcacctgagtactgcttcgtaaattgcaacttcgttacgttagatagtgtcctatttccatgagagtgatgacagattcagaagtgccaggctccaaggaagttgttcactgggagaaaaagactcaatgtaaagcatattatttattattattgtggtaacacctatcattatataaatataaccattcaataatgccgtattattcataatagaagtcacaagattcttatccattcttcgtactctgggcttcctatgagtaaatgtattttgttctttttgcagaattaagtaaacagaattatttctgctttgccaaaggatgttgtcaaaggcctgctcctcttctgcctatatatttttcttttaacataatgtatgcccttgagcagtgattctcagtctttcgtgttttacattttgtcacatgctatactgaaaaatttgggtcccactgtcatagaatcaaaccatgtttatagtcattcgatgcatatatgtttttatatttctaatataaatttatacgattttagcagtaaactatgttaatacagtacgttagaaatatttgtgggtgttgagtaaaaccagagaaaataggggatttggtaaaatattgtctatttcataatatctgctgactgacattgcaacatctctaaagagaatttgtttttgaaaggcagaaaataaactatttcatgagtaatagcagcttagcattgtctaacagctacaaaatccatcaatgacatatactttctctggagaaaggtgttagcccttgggatggttgtaagacaggttttgtctcattttccttaatctacaaactgttggatgtagttttcccagttgtattaatttctcatggaatttgtggaaatatacactaaaattactttagcattttcaagattttcagatttttttatgaccttttcatcagtgtcctatgttaggagattgtgttgatatgttatattaaactgtaaggaccacacaagcagttttgacacatctgatagagattccactgaagttttactgagatgattgaaacaatttagacagatttcagtcaatttatcagtcagtaggactttaaatgatgccattaaatgagattaaaatatttctgaatttaatactgccaacttaaagtactgttaactttttttggcttgtttcaattggaagaaaagaagaggtagtgaatataacacacatctggaactaagaaaactaatttgtaagtcccacctcctccgctaaccatctgtagtctgttacacttgcagtggcttccaaccttggctgcacattaaaataacatgggaataggtaaaaatcccagtgcccaggtttcaccctaaaataattaaatccacatctctggggtgagacacaggcattttatttttgtttgaaattttcaaagaagatatcaaaatttgcaaggcataatcaaataaggcaattaacatactttagcctatacctaatattttgcttgtttttagtttcaaatcatcctaggatattattgattactcaactgattgacatggtttgggaaataaggtattttgaaaggaawaatgtcttctttttataaactgtacaggaaccttctattaaattctgtaaatgtcattgatctcaaatccatgcatcacatgtgtaaattatattatttgtgttgtgtttgaagtaaagcatgattgataacatttgatgtgaaaatatatgcaatggcagtaacgttatcatttctaaaagaacagaacccttgaagacaaagggtagaagtaatgtcagtcctgtttctacaatatttgagctatgtgaccttgagaaagtcatttaaactttctgattcttaattcccaggtctataattgttatactttagctttgcagttatagatttgttcagtgttaacatcacttgtatgaattataaacttattgttagttaaacatgctagaaaaagttgagagacagtgaagcataatagaaagcacatggtttttggaattgaatttggcttcccacattagttgtatcttactagctgtgtgactttggcatgtgacctaacccaagtttatgtaaaatggtttcaataacatgttcctgtcttagcccattttgtgctgctgtaacagaatacctgacactgggtaacttataaagaacagaaatttatttcaagaacagttctaaaagctagaaagttcaagattatgatatcagtatctgacaaggaccttcttgctgcatcatcacatggcagaagggcaaagaaagggcaagagggggccraactcatcctttcataatggtatcartcccagccatgagggtagagccctcagggcccgttcaactcttcaaattactacatcttaatactgttacaatggcatttaaatttcaacgtaagtttgaaggggacagatactcaaaccatagcactttattagaagttgttttaagaatttaatgagacaatatatgttaagggcctactgcctggcatatagtagatactgaagaaatggttgttgatagtgatgataatgtaatataccactaacatgttaaatgtgtttctgaatgcatgacctcagaatatatgtcaaatatatacactggttcctttttacaaaagcaagtgttaatgaatgagtgtaaaactccttagcttaaaaagtccactttacacatctataggtagtgatttgagaagttcctagaggacagttgatatggtgtgttagataaccacagattggaaatgctagccctctggacactcaaactttaactctggaaactgggttacactggaaagaatctacaataaactgaccttccackggacacgtggagtattctaactaatgcagaaatccgaagcagactagagtatccctgatctccttagtggtgtagaatctcacactgtattatwtatttatttatttatttatttatttatttatttatttatttattttgagacggagtctcgctctgtcgcccaggctggagtgcagtggcgggatctcggctcactgcaagctccgcctcccrggttcacgccattctcctgcctcagcctcccargtagctgggactacaggcgcccgccactacgcccggctaattttttgtatttttagtagagacggggtttcaccgttttagccgggatggtctcgatctcctgacctcgtgatccgcccgcctcggcctcccaaagtgctgggattacaggcgtgagccaccgcgcccggcctatttttttttttttcagaacatgttggcttagtattctctgggcaggaggccatgccaaggaaagtttttgacctttcaaaacctcccaaaggtaatgggagaagtgataattattacggaaatgtgaagacaagcatacttttttttcatagattcttactcagactcattcaaaaagggatggattttgagtattcattttggtgaagtctctgaccttattagatagtgatacctccaggtcttgctttatgtggggtcaattactgagccgttgatgaatttcatttatttcttgtttaatagagtggcacttaaaataagtggacatgtaaaagaaaaatagatttgcttgatttgtatctttcaaaatggtagtgaaacaatcctgtaatttacacgaccagttctacttcacatatattttaaatgtactatgatcaacatagtcattacctggcatgtagaatacctatacatttacacatgtaaaaaatgaagcctcaatgtctttggtttgtgctggatcatttctttcagggtatggcattctcaagttattttctaatgaggtttctttaaatttttcaagttgctttcactgcgattaatttaatagtgaatatgtttataaaagtctgattctagagacaggctctgaaccattatgctatggcctctttgactacaaaaatcaaacgtttttattttctaatttgttaagttaaatatttttctatgtagtgaagcttaactaattagagagaccagcaggaattgtaatgtcaccaatgtaatttacattgagataagttttattcaaaagaatgagctaaaatattttattctgtgaggctaaaaactataactaggatgaggaactcttttctcccaatacaaattatagaatttcaaagcagraagagcatcttgttttacccctctttgtacagatgggaaaaagagccccaggagagcacaagatttgctcgtgtctcacaggcatttactgaatggcaaagttgccagtaaagccctgtagtttgactctgtcgacagcagaaatgtgttcttctatttcatactttccaatgcggttctagaaaatgataagtaattttgaaagttggtttatttctttcagagtagctagtgccattnnnnnnnnnnnnnnnnnnnnnnnnnnnnnnnnnnnnnnnnnnnnnnnnnnnnnnnnnnnnnnnnnnnnnnnnnnnnnnnnnnnnnnnnnnnnnnnnnnnnnnnnnnnnnnnnnnnnnnnnnnnnnnnnnnnnnnnnnnnnnnnnnnnnnnnnnnnnnnnnnnnnnnnnnnnnnnnnnnnnnnnnnnnacactttgaacaacggggagaaaagaggatactttccctctgagtatatttggattgcttggttataaaaatgttgtgtgattattgtaaactcttattcagaatgttttttctccgttgtataatgggcaccatgatgacataaataagcttctttataaaatttctgctgtgtttcctacagctccctcctatgacaaactgagtatttgtgatttaattctactggatgatttacttctactggatatccttaagattatatttatttacaaataagtaaaaatcactgaagtgggatccctgggtttgttgttataaaacttattaattatcttaaatatcaggttttcctctcttcaggctcagtcagtaggtcagggaaatgtcatgtggggccattttctcttatccctgccactttgacaatggttgtcaaattagaatgtgcacaccaatctctcgctaacttgacaaatgcacattcctaggtcccaaccttaggattatgacttaataagcctgggatcctgaatgtagcccacagaaatccacttagtaacacccgtttacaaagagactcctaatctgcgtggtccaaggcacattttgagaaacactgactgtgctatgttcttttctggagacagacagggactcatgtctccctccttggcaacagctattctttcatgggtaattcctatgtactatttgaatatcaaaatatttwtatctccctaagaatggggagacacaacgtatttgccccataagggtaaattgcaaacaaattgctccagtgcttcagaaaggactggttattcattcctgggactgctttataaagagagatcttctcaatattcaaatgtattacaggcatagaaaattttttgcatgaatatataaagactaagaatcagttctgttttttacagcctgagaggacatattttgaaagctttctaatccttgctatgacaatgactgaacttttagagggctcagagttagagcttcaaagatatttaataatggagaaaaaaaaaagattcatttgggagaagatctccaagtataaccaaatttatccctttacctgtggctaataaaataactgaattcaaaaagaaagcaaaagcaatatatattttgaatagaagactgctttttaaaattatgtaaactattctgtcattaaaaaaaagccttcctagtgttggattggagtatttccatatttggaaaccaagattaatagatgtttcagatccgaagtgtttgttcttccatctttttttcccccttttgcatgtaaaagagaatggtgaccaatttttttggtaaaagagttaataaatcacttaataatggatttaaatgaacagaggcataatcagatttttttaaaaaagacttttatttaattctccagacgcaacacttagatagaactttctgtactgatggatttttttatagctatgttgttgaatctggtagccacagtcacatgtggttattgcatccatgaagtgtaactagtgtaactgaggaattgaattttttaaaatttgatttcatttcatttaattgaaattgctacatgtggcagatagtcattgtattgatctgtgttgctaaagaagattgtgtaaaatggttttcataactttggggtagcagttggcatttttatgagactaggaagtatatgattatgtagtgttgtagtttatgtgactaaatgtggctccttatggaggagttctttaactttgccatacttataaagatagttattatttattctctctacttatattttgaaagtccctctcttaaagcaagtagatatcatggagtgagtctggaaactcctgttacagaacaccaggagtggccaaattatgactggtgccccctggagttgtgcacacagagtctgtggctacccctataagctgagtcacatctcaaggcaatgtcatattcacttttatgtctacaatgcttggtatggaattgattactgacaaatctttgttaagtaaggaatatatatctcaattttgatatccgcaataataaaggatagtgaataaaaaatattttactatgtgctcatagaacacattgtatgaatttgccctttgatgtatatattcattaagttctacatttatgaagtacgctttgtggaaagtattaatttaagtatttaatacgaatataattcagacacagtatgtctactgctgattaatgaagaagggaatgtaaaaatatgtgctgcatcataaagtaactgcactaatgaacatatgtgcaagatgtagttcccaatagcaaaggaagagaaagggatttttgtttggttgattgattttctcagtcctgtggcagaacaaaaaaggcacatcagagaaggaaggctgccatcagggaaatgacttttgaggcgggttttggaagatgagctggagctagcagaggggtggtgaggaaagtaaggcctgtgctgctccaggtactttgctaagggacatcatctcacatcggttttctccatactcctccaacgtagatgtccttaatcctcatttcaatgatgatgcagctgattcggatttaaagaagtttgcctaaggtgacatcgctattcagtgagggtactaagctttgaacctaggtatgtttaacgctaaagcctgtgaattgcaccatagtcattggtatcagtaatgaaaaatccaacgtgtttggtgaaattcaagtagtgtagtatcgccaagcacatgatacaaagagaagcaactgaagtgctggaatggaggcatgtgataataaaaaaccatctatgccatgacaaatacactggacttttttctgtaagtaatgtggagccctgggtgggttagttttaggctggcaatgacatcatgattcctaaagaaattcaggagctaaaatcaacagcatatttagctaattatttgacttgaatttccattcaaattggctttattttttcctgaatacgcagttgcttagaagtggttgagttccatcctggtgcgtgctggctatcaaccaacataggagtaaaaattcaccatgagtagtcagccaaaagacacatgcagatgcttaggaaaataaattataaatatttcttatgtctgccagtagcaatgagaagattttgctatattgtgttttttgatagttggcttgttttactgtatgcttatgaaaacataaagtagcaggacaacagatcacattgccaaatgatttctaggatttggcccaaggtttgatgatccctctgccgcttcttggctttgtatgctcagaagcacccaccatcagctgtcagccctgtggcaaaaggaggaatggggtcagagtcaggcaaacagaagccagagccaagtgttgttctgagaaatactagcatctgtttagtgcagtgagttctctgctttgtacttggcaacccacttgggactcatgctgcaaagggggctgatgatttaaaactgagggaggagatccagaggggagaccttggctcatgaaacatcctcttcacctctgtgatgggccgttcttcatgtcctacagtttgaactaaagaatggcctcggcttctcctgtggatgtaaacatattttgttgcaagtgccattcgttttatttgttgtataccttttccttcaaatatattcctggctaaactcctggctgtctctcctggagtgtttttttttttttgtattcttggggttgtaagaatcaggttcatgtggaggtgtctagaaacaggctggctggacaggaaggaaataggtggatatagttttaaatttatacacatcttttggagccaggaacttctacacaatctagcttctatgagataaaatttgtggtacgaaagaggagtggtaacatgaataataagagattttttttaagtctagaaaaccttagatgttgggagtgtaatcaagcattttagccagtcattttgaaaggtaagtgagtttaaatgaattgaatactcagttgtgaattagtgatactgaacatgtacactgtcttatcagtgtgtttcatagtgattggtaatgcccagatttccaatttgatacacagtccattttaaaaagatatatgtgtgtattttatacgatgctttgtagttttgaagttttgagataaattatttagaatcaaatgctcatggaaatgtctgtaatattaaaataggtttatttcaagattattaattcatttgttcaacgagtgttattgagcgtctgttgtgccgaaccctcattaacctcaatagggaaggtactaggttcaagaggctgaagaagagaccccgagccaacaaaggagacatggagtttcattaggagcttacatacagtggagagagtcagtggcagtgggctggacaggagaaccaacttacctacagaaatgatccagtggtggcaggctgggcaggaaaaccgcaaccacttgcaaacagcatgcagtttatgtagcattttcacttaacactctctcctttatgacctccacctggcaaccctcattaaccccaaactcagggcctcattcctctgtatggcccatgttccatgggatgggatggggtttcagatgttcctcacagacaaagaacaaatcttcgggctgtccactagattccctagcttgggacacactttcaggtgtgtctactgtacagggtcattctaagggtttgcttaagtttaccctacagcatcattcacgtctgctctctcatgtgcttgcgatacagtgaccatcaacacaagggccctggtctccaggaacttacactctgtagagcagtgtttttcaaagtgtggttcccagatcattagtatcagtgtgctgggaattgctagaaatgcaaattctcaagtccccggcctagacctattgaatctgaaactctgagagtggggttcagcaatttgtcttttaacaggtgattgtgaaagtttgagaactactgcaaaagacagataaattaactgatgattattaagtatgccagaaaaggctgagttttacaaagaaaataaaacagggaaagaagatggacagtgtaaaagtgtgtagcttttggggtgttgtctttgtctttgagcacttgactgatgtgagaatatctgggaggaaagctttgtggttatctcggttagagattttagtgagttgaggcacggttgggaattgtgatgtctttagaagggctgaacctccagaatttgctgttgaataaattggaaatggtgatgtgagagggcagaatgatcctaaaggttgttgatggtacctactgatctctgatgttacctcatagtaagatgggaaaaaatgaaatggggtggggcagggaaaagcagactttgggggaagaataacacattttattttagaaaagttgtttcaaaagctcattagccatgtgtgaagctatatttgtgagtatgccattcatggggaaggttggcactgggaatattaactggggagtcatggtcatataaatggtattttaaaaaactagttagcctgagatcaccaagggaatgaatgcacatggaggaggtctaaataccaagtcctggggtatacctggggggtggggtgggtggcattaggctaaagatagtgaaaattctaatgaatgataagtaatattttgctatgttgatcttgagattgatatgttgaaatggcagcatcctagaccaatcccaagtttaatgccttccttgaagttgccatgtttctgtttcggagtccttggtgccacaggtcccycttgactttcacaggccagggcttcttgccatacaggtaagtgttctcccttcccagcttatgggatccagactcatcagctgcccgctgtaggttgtccttaaaacttagagaatatgcagagagcatacacaattctgcttagaggaggagcactctccttttcctcttgtctcagttgtgatcttgtcttctttctctaatttccttttcctctattgaactttcaacaggcaaattctttggtctgcagagccaaaagaataattgtctttctttttaagttaatagtacttagatcattttgacagttgtcttatttattaccacttacacagaggcatttcttaatgttgaattcaaatgttgatttttagtgtcctagaccttgatattttctgatttgaataccctgagctgttgaccaaagcaacaatgaaatttataatttcttaacgggtgtgtgattcttgggatttctttcagaaaacaatacttccctgatgtaggaatgtatcacttaaagtaaaaaatgtttttaaaatttgaattatagaagagaataatcagtggatgattcacttcgtagaaaagttctttgctttaaaatgactcatcaagtgctattgggaacatttaaaatgttatttcaattgcacatactctttaggaagatacaagtttattrctttatatgtgtgtatcactgataaaaggtattttcatatatttaacaaaaatttaaagggaggaatggttaaatgactgtctaaggactcatacctctttagtgggcaaccaagtcttgaaccctagttaccagttgtcatgtttacttgtagaactaccatcacggccccaggggaacagcttaagaaagggataggaggaataaaatggaagcactctatagaataagtcttcatctgtactcctgatttaacaaattctgatattacccactgtgtttaggtttcagtgacaagttttcgtagcagttgcggctgcatttagctcttcacatcctcccaattctaaaactgcaaggtattgtaacgataatctgtcccatttcctcgtttttgaatgagaaaaccacagcctagagtagccattacttgccaaagctttttttcttagaagagaggggggatcttcagttatcttctagaatgtgacaaaattttgccaagatcatggtgcgtgctcactaaaagatgatgaagtttattgcctaaatctcaaattcagtcaagatgctacttaggccagcttttaaaatttgtataatagctagttttttatttaaatttttaaattgtgaaacagatcacaaattaaagagcacatataacatatatagtattacatatgcatatcatttaaaaatattttatatatagctatatatcttatgtatgttatttttactataagaataataataaaatataaaatgaacacacaggcatcaaccattgagtctaagaagtaaccattccacaatcttggaaagcccctgtgggtccctaatctgtctcaccccattccttgccctcagaggtaacctctgtgcactaccctcttgtggttagaagatggagctaggccgggctcggtggctcacgcctgtaatcccagcaytttgggagactgaggcgggtggatcacctgaggttggtagttcaagaccagcctgaccaacacggagaaaccccgtctctgctaaaaatacaaaaagccagacatggtggtgcatgcctgtaatctcagctacttgggaggctgaggcaggagaatcgcttgaacccaggaggcggaggttgtggtgagccgagatccaccattgcactccagcctgggcaacaagagtgaaactctgtctccaacaaaaaagaagatggagctacattactgctccggagccttgggcaagttattattctccctgtgcgtcagtttcctcatctgtataaaaggaatagyaatatatgtgttgtgaggactgaatgaggtcacccaggaagtgtgcttacaaaaatatgttgtgtagtcatcatcgtttactattcttgttactatcatcatgttcagttttacatttgaaggacttgtaatgttgccaacaagatggagtttgagggactaaaattgattttaagaataataatgttgttgttcctttttcaaatcttttaacatggaaacattctgatttgrttgggggggggrgcttttgacatcatctgtttcaccttatcactgtgtactttcaaaatatcttcaagatgctttcattgargcaacaagaaaattgttttgaacaaagaccctttagygtcagtcactatttcagaatataacaccagtcattgtttatatgatttactcttaataggattttgatattctgctgtgtaacgttgctgctgactgaatgtctttgaagacagtaaaatttgaccgactacaaaatattacttcatttttggggggtttagtctgtttggtaaggttactaaagagtacttctaaaagtatgagaggataaaggattgagatataagagaaaagttgacaaaatcagaaaactgtgcaatgaggtaatgagtaaccaaaacttgctatcttatcagtactgagaactgcagaaaaatttcttacttggagatttgtgcttttctttgagtattcataaataagagtgaaaaacaataatcacttttctcagtaaaagaaaacaaccttatacttgaggacttttgtttcaaagttggtaaggctttggatactaatataaaattcaccagtaaagtattttgaaactcttaatgccacctgtgcttctgaattcatatgaagattattgtttgagacctctgtggtgacatggacatcacacttgaggggtgagacatatcttcaccttctttacacactggctcatcttctatttagttgatactattgttcctcaataaaattatttttctctctattgatattattttcaagttgacttctagtcagcaactctgtaagtatctttttattggcttttagattctgtattttaaatgagccagcaatatttcaatttcattgagattgcattatatcattttgaaaacttatttgcctgtgattaaatttttgaacaatgtctgggatctaaaaactcacttgaaaatcattttttaaatcaaatttttttaaaaaagtgttacaattatagcaagtcatcatggaaaaataaagtaatatgggtatgtataatatgccttctaaacctctaagcatctggaagcagagatccatgttctgtgaatgacctactaatcttcttaatgagttcatagcaaggcatgtggtatttgcgatagaaaagactcagtaaaagctgtcttccattcagtttttgaaaagtgaatggatrccagtttatgttatttcctatagtgcctatcttaaactgatttttttttttttacttgctgaatctcatttcatgtcaatatgagttttgtattggtaatatagtgtttgtaattgatgatgtagccaactcctttattgaagtaaactgtgaagctaataaaacatcttcatgttttaaggccattaggagacatttttttctgtgtgtgtgtgtgtgtgtgtgtgtgtgtgtgtgtgtgtgtgtttgagaccaagtctcactcttgtcccccaggctggagtgcaatggcgcgatctcggctcactgcaacctccgcctcccaggttcaagcaattctccggcctcagcctcccgagtagctaggattacaggcgcctgctgccatgcccggctgatttttgtatttttagtaaagagggggtttcaccatgttggccaggctggtctccaactcctgagctcaggtgatctgcctgcctcggattacaggggtgagccactgtgcccggccgtgtttttttgttttgtttttgtttgtttgttttttaacataatgaatactacaacagaaacataattaaatagcttctaaacatttgagaagatgaatggatcactcgtttctaaatggatagccaggagagttagttaagtatttctgatcttatagtgaatgataatgtttgtacaacctaatagttgccccttttcctttctttttcttctctaatartaatagcaaaaacattgtttctggcattcagtgagtgccagataaatagaaaggctatgagcttgatgcacagtttcttttctttttcctgggtcctctctcctcccaacctacatttcttggcatctttccgctgtctgtttgttagagttctgactctgacgtcaaggactcacagtgagtgacccccgtggcaaacctgtaaaacattatacaacatgaataagaactttcttattagatctgcagctggctgagtacagacatatggcagcaaggatgttttggaagaaaggcattgcttgacaaagaacccagtctcttgaataaaggtttatactggcactctttgatgtttataatacccgatgccaggggcaaaacttttttccccccattatattgttattttactgtttaaaccccatcattttatatgttgcggtggctaaaatgtagaagcagacattttatgtgtgtctgtataactttaaaaggaaaaaaaaaaaaaagcaaaactcaaaaaactttctcaggctctgtctacccggctgtaagtgttcgattttctgaggctgagactcagattgaaagtgagggagtttgtaagaatgggcccagtccttttgagcaggttttaaaaggatgattaaagggtacataggctttgtaatgccctgacaactttaattgtttcttttggtggttgtcctttttatcgtgagtagttgttctcagttgctaaaaatttaggctgggaataatttccaacctaggaggttgtcacactgatttgcatttggtttgttatttcttagtcttttcaatgcagccctgctttcatcttactccctttctcaaaccccagctactgacattatgtacatggttgtgttttgtgatctgtgctagcacactggtgttgaataatatattgtgaaatattctgatggtgacaattcggtagttgccccaggaggaatgatgacactttgaatcagaggcacaaggacagagaagttcaacctagtggagagccaaggtaaatgaatgaaagcttctgcctccacaaggaatatctaagtccttttagcatggttctttgcaaccttgattatgtttataatgttcaaaatctttgatgaggccattgtcttcctagtacttactgcatctacaataatttagtcataagatattgataaataaggtatgcccattggacatgcctgatgggattttaattaacatctgcctttgacaactgaaacaactgaagggagggagaggtacatgacttttgcagagcacatattatgacagacgctaggggtataacatctagcaaataggtacttgatgacatttttatgaatactatgatttatcaaaataagtatatcctgagaagtatatatttatagatgaaacrgtatttacagagaatagactctagtttagagaaactgaagagcattagtaaaagtgttaataagaataatattttaagtactatgagggacttttttcctggtttttaggttttcatgttaaaaattcatgagcaggacagatatgtttgtcttgttgattttatctctataacgggaattcaaattttaaatatgttctagaatcatgaaagtcatggctagaaaggtcttggagattatctaattgaggagtcccaaatctctaaataaaatctaccagaagaatcataggtcaattactacatgtataattgttccaaataggtttttccagaaagtgcagaaggtagcacagtcctcaccaagttctttcattcagcaagtgctatcaataccacttaccaagcatatattttacttggagaaaatgaaaattgctccatccataattggttgagagcccctttaggtataataataatcttccctattatgtagttgagaaaactgagacccatatactaagagttgaattgtgttttccccaaaagatatgttgatatcctaagccctaacacctcagaatgttaccttatttggaaatagggtctttgcagaggtaaccaagttaaaatgaagtcattatggtgggtcctaattcaacatgactggtatcattataaaaaagagaaatttggacacagacacccctggagggcagatggccatctgaagacagagaattctaatgatgcatctacaagccaaggaaccccaagaattgccagcaaaccaaacagaagccagggagaggcaaggattcttctcttacagatgtgagagagcataggcctgttgacatctagatttcagacttccagcctctagaactgtgagataataaattactgttgttctaaaccactgaatttgtttacctagttatgacagctctagcaaactaatacatcatagatattagtagtcatggtctcctggagaagtaattagcaaggtagtcaagtctggaacccagtttaattcccaggttcagtgctcaatgcctgtctctagaaataaaactttttaatttcttttgctgtaaagataaatgcaccgtaattcacaaattgttatgaggactatttttctgttgtccatttttttggttatctttttactgacttatttcatttataacacaatcttgaagtctgataatttcaggtacagacttcatttattaaaataaaaactcaaacttgaggagacgaaagttattcgatcatttctttcacttcccacagttggttaatgaaatctggagaataatataattgttatatctttttctttgcttagcgtaaacactcaaactataagttatagctgataacactcaaattataacttataagctgtaccataattcatagtagtcaatgaattagtcagctaaacttgaacatattactacaacttatgggcatacccaactccagatagtagaaataagactcagagtatacatttcatgagataaatctaatgtgagtatccaataatagattcaaatatttttcaagaattgactatgagtctgtgaatatatattaatgactatacaatacttttttttttttttttaagagatggggtctcactgtgtaactcaggctggactctagctcctgagctcaaatgattttcccactcttagctcagccacactctgcgtagctggaactataggtgtatgccatcacgcctagcttaaaatatattttattaagaattggtgctatggaaaagtattgcttcaaccatttcccccttttcaagctaaaattaattagtaatttaaaaagagacatgaacatcaacaaattaaacaatggaacaaggatcattcaagtcctcctataggcctcttgatctgtacattaattggaataatggtctgttctttttgtagaaattaatcatgttcttaaacacctccatkcagtgtaagttctgactgtttaattaaaactttatagtaagctcaaactgggatcctgaaaatgaaaagatattttttgttatctggttcaggtttttgttaggatgagcactctcccttatgataatccagaggtctgctcctttgaaatgtcaccccaaagtaggttgcttgaagttcccagaggctaagagggttccccctatcaggacatagttatgacacctacacagctcccctcttagcttcatccctcttagaagagtttctatttatcttcatattctgagacgaaattgttccatttattctactaacctcagcaaaagctggttatgttaaaaacaaacaaaccaaaaaacctaactgcatctaggtaaacattttcccatatttgttcttgcaagatggctgataaggcattataagtggtgatccctttattccatcattacaggaaaaaataatgtttatttgatgtgaaggggaaaaattaaaattaaagataattctatacttcggatacttgaccatattaaatttacaaaatgtatagttgagttttaaaatcacaatataagtagatttcttctactcacaatcattatattagataagaaggtactcctcttgatctctcctttgctccatcataaaatccttactagatgggtaagacggtagttgtgataagacagtagtagcctatcctgtcttatacgtttctgtgaagcccagagaggtgacatgaatttctgaaggttgcagaactgagacttaaaacttagtgtgaaatttattctgttggaaaaaaaaattgcactgtaactatttctttgaactttgggaagtatatccttattagagaattacagtgtcaagacattgcgctattattaaacaaatgataccactattttgacaagagtggtactttccaaaatacctaagaagttaattgaagacttggaattatcagaggatttattttatgttgaaaattctgacttatttttaaattgtttattccatctcataaacttctatttgttatttaattttaggaactttgaaataaaagtttttttttttaatatatcttatgtcctgtgtgcaagtctaatggatagatctgtaccttgaagttccaacttctgccctcagagatgaaagtgacaaacagcaaaatatggagcagatacattgaaaactttaagaaacttaatttttatttagtttgtgcttatttactaatatgttctctgaatgcaaagtaagtatacatgtagagtcatctttatgaaaagctatataaagagctataaataaaagggatagataggtaagacaaaaaaaggcacactgacaaaatctgcggtaagaaatataatgagttagattctaggcatttgtcttatttaacatggagtaatttgtggatatatatatattgtgtgggtatttgaaatttatgtagttattttaaatcatgtaatttatttatgcaattattttatatttatgttaacttatttatgtaatgattttacatttattaagctgacgattatggtatatggaacttaaaggtataaatatacccatttatggtatatggaactgaaaggaataaatctatccatttaccaatcagtctgagagattctctggtttcttacaaatacagattggcaacaccgatgtggttaaacatgacaggcaaataactaccattcaatgtgaatattagcaatactgacaagagaaataacatttgggttgaatagatacatttatgtcaggtttttgtgtattagtttctctctctttttttttttttttttgagacggagtctcgctctgtcacccaggctggagtgcagtggcgcgatctcggctcactgcaagctccgcctcccgggttcacgccattctcctgcctcagcctcccgagagctgggactacaggcgcccgnnnnnnnnnnnnnnnnnnnnnnnnnnnnnnnnnnnnnnnnnnnnnnnnnnnnnnnnnnnnnnnnnnnnnnatattaagcgtcccatgctatattgagataactttcaaacataatacaattatggtagtaataataatttggaacttcaactatactacttgacattttagcatttatgtaattaattagttaactaacttgtaggtgccaggcacagctaggcctaccattaaggagtttgcatttttttcaagatagttatttatagtacagtatgaaaagtacacaaattttgagcagtattttccttttttcatggcttcccttattcaacttctttaagtaagtaaaattccacctcagaaatggttatccatgttccctatctcctccattcctattgtctctgccttgactcaagacctccttatctcttgcctggattatagaactgtgtcataacaggtctttctgcttggagttacccaccttcacttgaccacaatctgtgatacccagtttctttttctttttttttttttttgttttgagacgtggtctcgtcctgtcacccaggctggagtgcagtggcgccatttcggctcactgcaagctccgcctcccgggttcccgccattctcctgcctcagcctcccgagtagctgggagtacaggcgccaccaccacacccagctaatttttcgtatttttagtagagatggggtttcaccgtgttagccaggatggtctcgatctcctgacctcatgatccgccccgcccccctttggactcccaaagtgctgggattacargcatgagccaccgcgcccggcccccactttcttacactgtatctttctaaagaataagtctgaacaaagtagtgactattttaaaccaatagtatacatttactaaattcttagcctgcctttcaaaattacattcagatttttccaccattttctttttagtgcatcttaagtacaggtcatccgtgcgcccgtcttttttctgagcaaatcacctgtgtactttcacattcttagcatctgccaggggtgttccatatacctggcatgatcctccagcccccactacccgacctactttatttcttcctggtaaaaccctcttcaaccttcaagccacacgttatgcagcctttcctcgcactgagaaacagatactttaagggttatgatatttattatattgtaattatttacatgttttgtttccctctagagaatgagagttcctccaaggtggagactcattcagcttttcgtctctcttacataacctktgcctggcaggttgtaggtacccagtgattattgaattagttaatatacgcaatatggatttgcttgtcagagcatgagtatccatggctttctgaagtccttcaacctttgcttgtgctacttcctctattttggtcctcttcaataggcgaggtgattatgatctacctctaatgggtcacagtgaccccaaaggcaaagcaatatattgatctcccttaaaaggatgtatgccacgaaataagtgtttttatcttctcatccatattcacatttatactttaagtgcaatgtcctgagtgagacaaaccttcacactaatctgtgtaattaaaaatattgaaatctcattgcttggcaaccactctagacctttggacacattttctggcgctgttaagggggctcaggctgcaattgagatatagattacctatttaaaggaatcatatttttcccctttgaaatgtctgtcctttatctccttttgatggattttctaatttattaggctttgcttttttgggaagtaaattatacctgttgacacagttgcatcctcatgcaaaaacaaagatgatatcattaatattttatggcttaatcattaaatgtgaaagggtgaaatgcttgtattgcaattgaaatgaatcttgaattgaccaggtctttctctgtgggaataaaaagagaataggtatgaactttaataaaaaatggtgtttaactctacatttagcagaggtcttctaagtaattttgccatcagttttcttcccacaaattctcccattacataaataatctgctattatgttgatagactcatctttctgaaatatagacatgttcatataattcatagtttgaagtgtctgatgtctcctcttgcctttaaagaataccctgaactcttaaacttcacgtataaggttccatctgtcttgaccccaatctacctaggatttctcctcatccctggtaatctatacataccttaaaacccaactcaagcattacatgctttctttagctcagttttcactgatgccccagcctcttagggaagaattcattgtttccgtatttgtgaattatagcacctacccattcatatgtggaggaataaaatgtagagagtaagagttagtgtttcaaaggcagaccttctggctgtttgcattctgtctgtgggaccttcagaggattccacggagtaaaagcactctatgtgtcccagttctatcatttatgagagaggggaaataatactgctccagaaggttattttgaggatttttaaaataatgcatgaacagtacttagtacatgcctggtacacagtaaggactcaaccactaataaaaaaaatgttttgtgtgcttacattttgttttgatatgcttacatatttttcttccctattaaaatgagatggccagaattctgtcttcgttgtacaggcagcatccaacagctctcagcatataatattggatatgtgattattaatatatgtaaagggtaacatattggtcaaaacattaattatttggagaattattcgattaataaaatatgttttatacatattaatgctgaaatctctgctcaagtgttttaagaggggatttactcacagaaaataaaggaaaatgaaagctactaggtgaactatagtttaaaataacaaatccaaaaatgttagatattgcatctcttcagtggagtattatgcctggagccaattttgaaataaaaacaatgtaagtacttacaaaatctccatttggttcagactctgcaggtggaactaatgtaagtggaaagattcctaaataattccaaagtcactatgaataggaataatgatcatcatacatatacttatcacttctattagaaataagccatgcttatacatattgtttaatatagccaaaatatcttacacataaagaagttagttataattccctactctattcctcaatatttttaacagtgcttctcaaatttaaatagggatgacaagactgatgtttatcaggttttcctcaaggagatcctttactgtgaggtgtgtgtgtgtgtgtgcatagaggtattattgaaatatgattcacataccatgtgatttatccacttaaagtatacaattcattgttttttagtatattcacaaagttatggagctatcgccactaatccagaacattttcatcatgtcccctaaaacacctatgcctgttaacagccacttctcatttcacctacctctctactacttccaggcttaatcaatgactaatctattttctatctttatagatttgcctattccagacttttcttataaaagtaatcaaaatatttgcagtcttttgtaattaccatctttcacttakcataatgttttgaaggtttatccatggtgaagtatgtatcagtactacttcatttctttttgttgccaaataatattccattgtatggatataccatttttgtttatccattgattagttagtagacattttagttgtttttgctttttggctattatgaataatgctgctatgaacatttgtgttcaaatttttgtgtggatatttgttttcatttctctggaatatacatctagaagtgaaattgctggatcatatggtaaatccttgtttataagtttgagaaactgtcaaatggttttccaaagtgaatgcatcactttgcatttccactagcaaattataaaggtcctcatttctccacatcctcaacaacacttgttattttctatgtgtgtgttttaaaaatggtttttatagccatactgatgggtataagatggtatctcactgtggtcttgatttgcatgtccacagtagctaatgttgagcatcttctcatgtacttgatgaccatttgtatgtcttctttggagaaatgtctatttaatcctgtgcccatttttcagttagattattttcttttcattattgaagtttaagagttctgtatttcatatacaagctttctggtataagtctcatatcagatttatgatttgacaatattttctctcagtccttgtattgtcttttcactttcttaatgccattgttgtgtgtgcttatttttaaaacaaaatctgatgacagattattctaaaggctagattttaaggttgatatttgttttcatgatgcatctactattatttattttcgtattttctgaaattattagttttttaattacagctataacattttgaacaataaaattcttaattttagtgttttccaaaccgtgctctgtggtacacaagatgctccatgactaaggtagattgagagatgttgtttgctttatttcttactctgagcacacaatattaaaggccatatgatattctattttaaaaataacatgtctagcccagcatttccaaaagccgttttaatctttttccctgaaacagctattaaacccaagttctgtaatatatacttcagaaatattgttttaatctattctctgaactagttttacctggcttgtaggactatctgcctttgttcttaaaaaaaaaaaaaaaaacttgtgagagtctttttaaaattctatagtcagatctatgacaacaaaagagactgagacawccacaagttatttctaccatgtttgtttaactcaggagattgaatttgatgtgttatatacatggtatgaaccaaacgcataatagaaattgggtcttctctaccaatcagatagttagaaagatatgcttttacttcagagaaaattcaaagtcagctaaagtgtgtaggtctgtttcttttcaatttccagggccttttccattatgtatttgctgcctaccattattgctactattccatgaaaaatcgcactctgtgtgtgtgtgtttagatttgtatatgtctgctcaaatagagcttaatggtgacatttttatggcttcaggatgttggggtggagggaattatcttcccctcatggtcgctttgtgtcagatgatcattgcttcatctctagaatcctatattgcttctggacagggaaaataggaaggcagaaaggcaaaagagacaagctagctgagttttcccctttttaaagactttccttagaagcttcacacagtgacttctgcccgtatctcattaaccaggactgtgttccatgatctcctgatctgtaagggagttaaggttgggggaaatagtttcctagctggacccattgccatctctatgagaaccagggttctgtgaataaggaagaagaatacgacgtattataggatggacaactagcatttttgtcacacaaggcatgggatgacagaaaattctgagagtgaagagctaaaaattctttactacttgtgtattcaacagtagaattttaaaaatcaactccttattgtagcctaaaccacctgggttcaagcaatcctcctgcctcagcctcccaaatagctgggactataggtgtgtgtcatcaggcctggctaatttctaaaattttttgtagacgtgagatcccactacattgtccgggctggtcttgaactcctggactcaagcgatcctctggctttggcttcccaaaatgttgagattacaagtgtgaaccaccacacctagccttattttttttttttcctggacaacaccaatcagttattctttttaaaaagcatgtattgaatcccttaacacgtgccaattatattccacatagcaaataagatccataaggtttctgctatcctgaaacttactttctaaaatggaagatagacaaaagcaagtaccggttgagaatcccttatctaaaagggaccaaaactgtttggagtttggaatttttcagatgttcaaatatttgcatatacataatgaaatgtcttggggatgggacccacgtctaaaacacaaaatttatttatgttttatgtctaccttatacacatagcctaaaggtaattttatacattttttaaattttctttataaaacaaagtttgtgtacattgaaccatcagaaagccaagatgccactatcttagccacccatatgggcatcctgtggcaaaaaaagtttcagatcttggagcattttggatttttggactaaggatgctcgaactgtaatgaaataattacacaaggttatttcagattgcagtaaatgcaggaaacacacttggtcatatgctgaagagtgacaagagaagatgagggtaagactggccacttttgttcacttaataaaacccagcacctaataccatgcttggtgcaggataggtgctcagtaaacgtttgtgttggatgaatggatagatggatggatggatgatcagtcacagaaagtgtcctgaggaagtgttayttgaagtgacacccgaagaatgaaaatgagctgacaatgctaagaaaatgggaaaatgtattctaggcaagatgaacggcatccaaacctttaggttatatcagtgaaatcaaatttaattctaaaacaaatgagaagccattgaaaggtgttacattgattatctcatctgggcttcacaaaaattacgtgaagtaggtagtcttattatttccattttgcaaatgaggaaacttaacctagaaattataaaatatccagattcacagagctggtaagaatgaaattgggatttgattataagaaattcagctcgagtccacccttaaccactgtgcaatgttgtaaactataaaagtaaactgtaacaggactagattgtttaaacagcaagtaaaagcctgaaaagaagatatctgccaatttaatggattcaatttttaaccacattgtctattagtgactcttatgaattgaatacatagcacagtttctcagagcctccactgaccatctttctctttcaaagtaaaaattgtctttgtatattacattatggactggattattataaaagatctagtttctggttctaatgaacgctgaaatatggaattgctaaaaagtaaatttagttagaataacaatagcttgatagaggaaaatcattacaaactcaagcggagaattccagtttagctatgcccttgaagttgttattatactttgcatataatttattgattctgaaaagttggatttgccatcttctgagaatattatcttgggcatatggggcacaccctgcaaccagaaacagcacaggaatagtcattccttcatgacaacttctacgaaagtgtaaattgaggctaacaggraaatcaccctattactcctgtaaagtgacgatagctttcagttttcaaatgcgactttctgatcatgtttgaatgtgtttctgttcatgtttatggagaaatttaagaattagaattgtgattcttaattctaattcttaaatttctccacaagtaataggaaactaaagaatttttctgtggtaatttcattaggaaaactttggctaggacatggtgataatgtgcagatattttgtttgccatgtcacattcttccccttcttttctggaatgcaatcaatggtgaaacatgttttacggtaaaacatttaatactccaaattgtgaataaagcaaagagaatgtgtttaatrtattttttaaatcatatactttctttaagaccctctcactcctaacataagctagagttttccgtttcaatatataatcaaaaaaccaagtatcctattaagtgtatattrttgactcaaattgacaaggacattggtaaccttccttttttttttttttttttttttttttttttttgagacagggtctccctctgttatccaggctggagtgcagtagtgcaatcgtagctcactatagcctcgaactcctgggctcaagcaatcctcttgcctcagcatctagaatagctaggactaccaggtgcacaacaccacacctggctaatttttaaaatattttttgtagagactgaggtctcactatgttgcccaggattgtctcaaactgctggcctcctcaactgatcctctcacctcagtctctcaaagtgctgggattacaggcacaagccaccatacctacccctctatttatttagtttttgccttcaatcaaggatacagtacatcgcatttgcttgaaatagaaaaaaagaatgagcaagtctctcggttcttgtacttgtggtaggaatagagacagagaagtacctggttaattatttctgcacctgcaattctaacgacctcagttaactacagttttaggtcatactttactcttcctttttttctatttcttcctttttccttgccacatcatctattccactttattttcttttattcctaaatagaggtctgcataatatatcactaagaggaatacatttgcaataaaacttttttctgcaaaaaaagcattggttttattgtaaacaaacctctgaaattactttcaacatatcaaatgggtcatggacccgtgaagaattgagggggaaggtcaaatttaggggcagagatgtactgtaaacttagtcaaaagaatatcttcaagtcttataataaattactttcttcagcatttaagaacttgaacacaaaatgcacatgtcttgttaaaatctaattgaaagtggaactaaagtaatttttggcacaaatcggctttagaggacaaataagaaagccaagggtcgcgtaatggggctagtatatattgtagtccgtctatgcttttctcaacaacctcccaaagtctagctgattggggagtaagaaataagtagcagggaaaatgtttggaattttgtcttttgctgaaggtttcttggcacttatgaaaacttcattgaatgaaataagactttaaaaattttgtaaaagactttttggaaaaacgtaactttcacattaaaattatataaaaaccaattcagtatttttctcatttataagacttaaaaatgaattcaatgttttaagtcacaccaattactgagatatattttttaaaattacctatttatcaattttaaagaccatttctaaaaaaggagtttaagtagagaatattcctttgagttagatagtttttggtatacgtaacagcatacacacacacacacacatacacttttaattttcttggacttatatattttaggcccataaatgtaaaccatttggatatcaaagcaatgtttatgtttttcagcacgtaattttaatgctacagtctgagaaattgtatgttgtttaaatgcaatacatcacaatgtttgataaataaaaataaaaaccgttaaacctatccaaatgcaagaactcmtaaatattgttgagttaaagcttttgatgcagctgaggctatgtctggattttattattttccctaggatttccaattttttctaagaaaggagatcaattttatagattagtctcctgaagttgtgccagtgggttcgtctgagttttaataattttctgtagaaaatagccttgaatgtgtcttttcacggggcatggtatgaatgaaacctaaatatatagggaaacagagatattagcatgatccagtcataaaacaacaggtgaagagctagaaataataaatgaggcctttattttattttttatttcctactcatttactcaaattgacataaataatgcaagaggtagtttgacaaactgtacaatacagatttatagtcacattaattggtgcttaggggtttgggtttcacctgaagttaagttcatatagttaataaagtcataatgccttgtttaaatatttcatgagaaaattgcattttgttttgtctactcagaacctaaaatctgttttattgtggttattttataaatatttgcatggaatttttggagtaagtttatttggtttgtttgttttttttttaaacaggcctaactatcaattgcattggaaatttgattgtgtttccaactaacaaataataatacacctggaagtgcaagtcctttccatattgaacagactctctctagcttttccttagctgatcttttcaaacgtttgctatttgggcctctctggccccaaagagtagccttttgctactctttacgcttgaggaagattaagctatcccaggcctctcataaccaaggggatccattaatattaaaatttagatttttccactgttaatgcagaaaaccattgattcagtagacttcatggtcatgcacatgcgttacatgttactctgagtaatgctgcatgaagttttaattacagattgatcaaattctataaattgtgttttggcgtggccaaggaatgggtttttcctattctagtttaatagaaagtcataatatatatcatgtgaattttacgtttctcaatgaattagattgcaacaatgcctaagtttgattatatacttattaatagtgataacaattatagctcacatttagtaagtccttactatgtaccaggtatataaggctttttaaacctaatgattcatttaatgcttacaaaaccatacaaattggatgctattattagctaagtcatggagacatgaaactgaggcacaaagacattatataacttgtcaagatcaagtatctggtaagactgaatatcaagtcagaattgggatttgaaccagtctggactctagagctaacatgcataacatatagcctacactttttaattattcagaaggtacttcaagactcctgtggtgcctttgggttggcagtttcagtattttttatgcttacatagagcataagatatataaatataaaacattatatataatatatattcaaatatatattttatatgtgtatatatatttccctaataaatattgaaagaatgcacacatgaatgagtggatgggtgaatacagaaatgaaaaatttgtattgagatgtgctaatagagaatttggtataactaaacatctgatatataatttatattttgaggtaactctttagccaacattttaaartatgattaatttatagtacttacgaaggattttcagagacattacatttttctgttatttcactgttttaaacaagatggagattagagggtggaaaatggattctggagaaataaacccatcatattaactataaccatgagttccttgaagacaaatcaaatctgatgtcttttctttytccttatgaatatacttcagtacgaaggacctgatacttagtttggacccagtaattatttattgttgtaagtagcacagtaagaataaaaacgtttatgatttgcaaccagccaacctatattttaatccatatttaaccactggctgggttatgttacatttctcctctcttaactcatttccatatccataaaatatggagcatatgcctctatggtttcttggtgatgaaattatgtattaaaaattataaaactgtaaaaaatatatctcaaaatgtgtttgtgttccatggaaaactgtaaatctctcttgaaacaaaaaagtttctataatcacatacttctagaaatatttcatctgagttcctttaaaacttcctcaagctttaacatgctaacaggtactgggactatccaaggagggatgatattttgcagaatttcacaagcttattttactttattaccatttttcataaaatacctcacaggaaaacttaagcatgagactgatgtgattacattattattaatagtctccaaaattcaaattagcaatagaagttgtaaaaatttcaagtaatcaggataaaccagatgtattaaatgaaaataatggaagctttgtaagattagtggcagcatataggtttagaggaattattatcattgtgataacagggacagatacagaattatggaaacattctaaagcagtatataggaagatcattatcagaaatagatagagaaattgtagtagagaggctagaatttcaaactccagaatatctgaatttgcctctatctgaagccttctcattcccagtgcttatgaaatttacactggctgctatattgaaatgctaagaatcagaatcagggatttagtatcaatcaagtggatggaatttagctagttatcaccaactgtgaaaggaaaaatatccgttaaattcagtcacaatgctatatatcaggctctcagtgattttttaaaggagggtcaattttaagaattctaaggaatctctttgttcctgctaatttgtcygaaggtttacgaggaatacaggagaaagctaaattgtttggggaacagtaagagatttagattctgagaaagatcctggaggaaaagctggggccagtatgctgaaaaagacacagtcctcttgccctaccccaagagtaaagggcaagaggtagtggctgccaaaaaaaaaaaaaacaaaacaaaacaaaacaaaaaaacctgaaaaaacaaaaaagttttgtggagagatatcgaatggatatttatatggctttttgctgtattttgtataatgtaatgatgtcctcttgtctccccatgaaatcgtcagtgaaatcaacatcacttgctaatacattgtagagtgggattgatttgaggagcggggagatgtgatgaagtagctgtaatagaggtattgtgtttatgagactgtggctgctagtcacatctgttttacccacacgaggctgatgtggtcttctagtttgtaaattatgatatgcaggcggttcctgccagcagagatttaaaaaaaattatgcaggtgggtaagtctttttcagcaccacctgtattaggtctttctagatcccaaatcccagtattgacgactggagggctgataaacagtatatggcaaccccaggaattctgttagcttctttggcctaagccccggaccaaatgcagacttccactcttacttttctgaagagtgcaaggtaattttgacattcttactccgttaataagaagagacccaggaaaggaccaccaaaaaaaaaaaagaacaatttcccaaaatgactagacaggtgctgagactggcctaaactatcagagatcttcccaatccagagcactgacctctgctagagcctgcagtcaggggagacatacagttcaggctcatcttctcacatggaatgctgcagagagcaaatataggtagcatagaaattaaggaaaaagagtatgccaaggaargaatccaatcaaacatgcccaggttaaagaagtgcttttagtttcttatcaaatcaaaaaccgtgtgctcatcagagtaaatgtggttctaaaaggcaacccctgctctcatgcattttgtgactcttgaaaaacaaaacccatatgtaaagggacaataaaattgtactatttagtatgactaatataagggtgtctttgtggcatgtggtgcatattctataaattcttgttgtattgaatggaattaartaagagtttggggacagaagaatccctggtgtattagtatttccctagataattttttcttgtaattttgaattaatgaagctaataattaacttgtagaccaattttatactaaaggaaaatagtaaataccaaatatatagctatgatcacaaagatccaatccctttttaaatttaacatagagatgctttgctgctcctaaggtaccattcctgctcccgcctcagagcctttacatcttctatttcctctgtctggcatgcatttcccccaggtttgtgtgtctggctctttatacaattatctgataaaatgtcacttttttcagaaaggactttttcgatctactgtacttatataaacttacctctgcttccagcccctaccatccattacccccacttgttctcccttcgtttattctattctaagcttctttatagctttatcatcacctggtatactatgtttctgtgtttrtcttcttccttcactaaaatataatagccaggaggcagagatacatcttgttttgttcaatggcatacagtttgtgcctagaacagtgctttgcacataatatgcatacaatacatatttacttaatgagtacatgatgaaatagaaagtggactgtgtggtaacctttacatccttatatgtatattagttttatatgtcttcagaaatatgttttagccatcttcagctgctgtaaaagaatagttttcttgagagtagtgcaaagataactgtggtgactattactttccatcgttatcctctttttttcatatctaaaacttctcacctctttaaggtacacacaaataataattttttatttcccatctagttacagtcctccttcagctttcatccctttagtaatagttgtggtgaattttttctcccgagaagcycctaaaaaggcgttcatttttacgtaaacaaacaacaggagaaaaacatataaacatgaaagcaaaatattttacctacagaaatatattttcagcaatctatttctcatgctattgttaaaaatatctctrcttggatagaacctttttgtttccatgctgacttcttctttgcttctcctgtgaactttttaaattctgtgtttggcagcagttttgttttccttggagctaagtactgtgtaacatactgttagctgaaggctgtgatgtagaaatttattattaaaaataaaagacggagagaagaatttattccataaggatcaaaatgacttagtgtcaaagcagttaggattttcaaaatgctttctataacagattgtgtttcttttcaaggaagtttactttgtttgccaggaataaatttaagggtcttcattgtgcctatcttggttaatgagaactgagaagagaagaaacattctcttttaaaaaaaattttttttagagaatttcttcatcagacggaragattttatttgccatttgcaggcataaccttggtgacctatatatccccagaccttctggtaagatgcttattaaaatgtcattacccagaggagtaatcataaactagccagagggtattttttatagatggtgagagacaaacattttttttctccctgaattaagtagttatgtactcttatcaactagaatatatttaaacttacttttatttatttttccagtctcaatctctccctctctgttttatgtttctagcaactttatgtaactaatcttaaaatcattagcattccttctccaaaaagagtatcatatcatcttaataaagtttctcttttcccagaattgcttaagtagcatgctgctattcatttctcttgaaaktttagtcaaaatgaattattttgcaaaaaggaaaattccacagtttctatttcttttcctcattgtctgtggcccattaacgtcttttatctgctactatgataatgtcaaatgattactttggtcatctgcaacttaacactaatcttatctgtttaattgaaaggatgttttgactttctctttgaaataatatcaacatcattttgcacttaattctgaaattcattgacctcaatgtgcaagctgtcttctttactatttattgtgaataaccatttttttttatttgttgtaatcacacatcargaaagggctagggagatgtctttgtgaaacatttatccctatggttctgtttaataggagtacttaccagtagctaaatgcctcattttattttaaataatctgtaatattaagtcagtttatcacactatgagtagttttttttaatggattctgacaatatgctgcttattgtagtctttcatcctttatctgagaacwatgtttttatgacagtaaaatattttttatacaaataggataaaaattcatatgctgtcatgcgctaatatgaagtttatccttacatctcccactctccaccccatgccccatctagtggccagaatgctgtaatcgtgggaaggaataaagctctgacactatgcagtccctacccccatcattgcctctttctttgcattaaaaaaaaaaaaaagaaaatacactgaaataataaatgctaaattttggctcagattattttaattagaaatggaagtttaatgataaacactttgtattcttcaaatccaaaaggagaaatatcctgtttacttcctttggtgctcttattgactgtagaacattacagtatctcatttgtcatatgcagagttcattctttttgaatatatttcacataggatgtagatttctgtaacattttttattactttgaaaaaagtagccatagtgtacattttaaaatactaccacattcttggtcagctcatacctttcaaatataatataaagatgatattaatatataaataagaatggaaaagaatttctttgccctgcatatttctcagtttgttatataatgctaggaaataactctctgatacataacacacttggcaaattttactgttttatgctttaaaagaaaaagtcaaatttagatagtgaattttttgaaatgcatcttacaagctctgatttgcaaattaccaaattgatcttatcttctggagtaaatgatgacccaaattagtctacattttgagtgtttttgttctttgactaaaatcgtcatcgttaagataattaatggcagaaggcagtgaattacatgctttcctcattttaattctggtcctacaaaaatgtttcctttttgacttactgtcatcatgaaatattctctcttaaatcaatatattgtggattataacttgtgtttgtaagatttatttacctcttttagttgtgataggagaatttaccaccttattttgatcctgttagtttaaactcattagcaaggaggataacagtgttaatagtcagcattttgtaaatcttccagaagattttgataaatcatttcactagaagcctattgctcaatttattgccactttaaagttgccaaaaataatgagctcatcttcctattttaatgtaaggtattgtcaatgtttgaaatgtgtcaagaattgtttttgatagttctagtgaacaactaatgtttctaaatcatactacttatttcattagttaattattgcttgtgaaccatattataatcatctttagtatcaataaatatttttgagatgatataatgccartaaatccataaattaaaaaattaaagcattaaagaaatayctactatgtaagcattcaattttatataatgattatctgggtcagtgtacccaaaattgtgtgctagccaaactacaattaaatcatcatgataattccaaggcttaaaacaattgactatgtctgttaaaaatgagtagcttaaaattcattaaattactttgttatgttttttacctattatactgtgaacatttcacatgttcttttttataaaggccttggaagccaaattttaattgctctatggtatcaytttgtataccgtaatctattgagtaatttcccttttgttggataaacaattagtagcacattatagttactggatttttagatcttagtttactggttcaaagggtatgaatttttaataatatatgtattatatatattttatatgtgtgtaaatatatatatacaatgtgtataaatatatatttgttatatagtagcaatatatatgcttagtttactccctgttttccaaatattcaacattattaatttgcaaatataataggcaatagtagtatcttgtcattgtttatattgaatttcttttacttccaataaagttaaatgtctttccatagatctatttattttgtaagttgttctcactcttccctcagttttttactagggttgggattctttcaaatttgtaagaacccttgatatcttgaagatattattctttacctaagtttactacagatattttaccaatgtgacatttgtgcaaatactctaaagttttatatagccagatcaatttgtcctcttttgtaataaaaaaaaaaagtctttaaaaaaagatttacggacaggattgacagattgatagctctttctcgattccgtgggtggtggtgcatggccgttcttagttggtggagcgatttgtctggttaattccgataacgaacgagactctggcatgctaactagttacgcgacccccgagcgggtctgcgcctgccacctgtgcgggggccggcaggaccccgacaagcagctcatgtgcgatgagtgcgacatggccttccacatctactgcctggacccgcccctcagcagtgttcccagcgaggacgagtggtactgccctgagtgccggaatgatgccagcgaggtggtactggcgggagagcggctgagagagagcaagaagaaggcgaagatggcctcggccacatcgtcctcacagcgggactgggacaagggcatggcctgtgtgggccgcaccaaggaatgtaccatcatcccgtccaaccactacggacccatcccggggatccccgtgggcaccatgtggcggttccgagtccaggtcagcgagtcgggtgtccatcggccccacgtggctggcatccatggccggagcaacgacggagcgtactccctagtcctggcggggggctacgaggatgacgtggaccatgggaattttttcacatacacgggtagtggtggtcgagagctttccggcaacaagaggaccgcggaacagtcttgtgatcagaaactcaccaacaccaacagggcgctggctctcaactgctttgctcccatcaatgaccaagaaggggccgaggccaaggactggcggtcggggaagccggtcagggtggtgcgcaatgtcaagggtggcaagaatagcaagtacgcccccgctgagggcaaccgctacgatggcatctacaaggttgtgaaatactggcccgagaaggggaagtccgggtttctcgtgtggcgctaccttctgcggagggacgatgatgagcccggcccttggacgaaggaggggaaggaccggatcaagaagctggggctgaccatgcagtatccagaaggctacctggaagccctggccaaccgagagcgagagaaggagaacagcaagagggaggaggaggagcagcaggaggggggcttcgcgtcccccaggacgggcaagggcaagtggaagcggaagtcggcaggaggtggcccgagcagggccgggtccccgcgccggacatccannnnnnnnnnnnnnnnnnnncgggtccccgcgccggacatccaagaaaaccaaggtggagccctacagtctcacggcccagcagagcagcctcatcagagaggacaagagcaacgccaagctgtggaatgaggtcctggcgtcactcaaggaccggccggcgagcggcagcccgttccagttgttcctgagtaaagtggaggagacgttccagtgtatctgctgtcacgagctggtgttccggcccatcacgaccgtgtgccagcacaacgtgtgcaaggactgcctggacagatcctttcgggcacaggtgttcagctgccctgcctgccgctacgacctgggccgcagctatgccatgcaggtgaaccagcctctgcagaccgtcctcaaccagctcttccccggctacggcaatggccggtgatctccaagcacttctcgacaggcgttttgctgaaaacgtgtcggagggctcgttcatcggcactgattttgttcttagtgggcttaacttaaacaggtagtgtttcctccgttccctaaaaaggtttgtcttcctttttttttttttatttttatttttcaaatctatacattttcaggaatttatgtattctggctaaaagttggacttctcagtattgtgtttagttctttgaaaacataaaagcctgcaatttctcgacaaaacaacacaagattttttaaagatggaatcagaaactacgtggtgtggaggctgttgannnnnnnnnnnnnnnnnnnnnnnnnnnnnnnnnnnnnnnnnnnnnnnnnnnnnnnnnnnnnnnnnnnnnnnnnnnnnnnnnnnnnnnnnnnnnnnnnnnnnnnnnnnnnnnnnnnnnnnnnnnnnnnnnnnnnnnnnnnnnnnnnnnnnnnnnnnnnnnnnnnnnnnnnnnnnnnnnnnnnnnnnnnnnnnnnnnnnnnnnnnnnnnnnnnnnnnnnnnnnnnnnnnnnnnnnnnnnnnnnnnnnnnnnnnnnnnnnnnnnnnnnnnnnnnnnnnnnnntgcaagtgcctttgattcgttccttctttctaaagacgacagtctttgttgttagcactgaattattgaaaatgtcaaccagattctagaaactgcggtcatccagttcttcctgacaccggatgggtgcttgggaaccgtttgagccttatagatcatttacattcaatttttttaactcagcaagtgagaacttacaagagggttttttttttaatttttttttctcttaatgaacacattttctaaatgaatttttttgtagttactgtatatgtaccaagaaagatataacgttagggtttggttgtttttgtttttgtattttttttttgaaagggtttgttaatttttctaattttaccaaagtttgcagcctatacctcaataaaacagggatattttaaatcacatacctgcagacaaactggagcaatgttatttttaaagggttttttttcacctccttattcttagattattaatgtattagggaagaatgagacaattttgtgtaggctttttctaaagtccagtactttgtccagattttagattctcagaataaatgtttttcacagataaaaataaaaaaataaaaaaaaataaaaaaagatttagatttatttaattttttttttatttcccaagataggttgagtatttacctggattttattctattttatatttacagttttgtctttttaaaaatttgtcttttaaatctataattaatattaccatttattataaggttaggctttaattattttttaccctcaaaagtctatttttctttttctttcttttttttttctttttttgtgagacagggtgtcactctgtcattcaggctggagtgcagcagcgcgatctcagctcactgcaatcttggcctttcaggttcaagcgattctcctgcctcaacctcccaagtagctgggattataggcgtgccccaccacgcccacctaatttttgtatttttagtagagaaggggtttcaccatgttggccaggctggtcatgaactcctttttttcattagttgaataattcatcaaatacaaaatatttttgatgttttcttgcttatattttgttagcacacatacgtatatttattccaaattatttcattcatttgcatttttaatgctaaaccattatccccaaatttggttaagttttataatatatcttaataaccagaaaggtattttcatcacttgtaacattttctaatggattcctttcttttgagatggagtctcactttgtctcccaggctggagtgcagtggcgtgcgatcttgggtcactgcaacctctgcctcccaggttcaagcaattcccccgcctcaacctcccaagtagctggggctacaggtgcacactaccacgcctggctaatttttgtacttttagtagagacagggttgacccgtctggtctcgaactcctcaccacaggaaatccgcccgccttggcttccctaaatactaggattacaggcataagccactgcgccccggcctctaatggattcttttttattgtatatacttgaggtgtacaacataatattttgatgyatatttacaatgtaaagtaattactaaggtcaagtaaattaacatcgatcgtctctcatagttttaactttgtgtttggtgaaatcacckaaaatctaccctcttagcaaacttcagcacactgtataacatcatgaggtatagttctcatattctgcrttgtatcgctacacttattcatctgacataactgattatatatgtttatactctccaatgaaatttatattctttcaaaattaaaaatactgttagcttttgattgaaatctagttaaacctgaaatctagttaaatttgtttgagtagaattgagcactcaatagtttatagaattaagtcttctttaccagtagcactgtatgtcttcagtaaacttttaccattttctgtatatggttatcaaacatttcttgataatattcaaaggcatattatttttgttgctattgtgaacagttgtttgttgttaagtctacttaggagtcattgctgctatacagaaaagctaataacgtacataaattcatttatagtccatcttattggtgtgctagcttattagttgtaaatacttcttcagctggtactgatgactaataagattactgacagatgaatggagtttcatttctctgagtcaatatcttttatttccttaatattcttaatgttaaatgttattttcaataagtaaatattcttctttgtaagcaaggtagctcagggctattaccaccataggaataacgtgatgatattttataggttattattaaaaatctacgttttgtgactatgtgggcatatttcatattaaatatttaataattttactctttagaactctcaagatttttatagttttgaaggaggattaaaaattattgaactgatttggccttctggttcttatcatttgcggcagtagatttaactgcagtagtcatttacccagaatattttcttaaaaagctaaaggcttaataatatgcaaataaagctttacatggtttaacatctatctaggatgttcctgacagagctacacagtagcttcttttatcacacagtgatattaaaatactctcaaaatgattagaagttgaaatattagctatcaaaccaggagtttgctaytaatttaggtatgttaatttattcatgatagctatttaatatattactaataaagattggaacaacctgattattctttaaaataaagaagaaaaatgtttgtcaggtaaaataatcatttaacttattataattttcatctttccagctcatggggcattcagaatgggaccacaaacgagggccaagaggatcacaggtaagtttcttttccttttctttttcacgtttcgtttcgtaacactttcagccacgggttttctaaaactcaagagataataaaatgtagagcgaggaagaggcaaaataaccatgccatttgtttttatttaagttaactataattaaagtctggatttcaaatcccaaaggcagatgccaggatattccttctaagagctttctggtatcccagattggttgtgtttatatgaatatagattttatattcatcttgtctcggcagaatacattttgatcagcaacccactctctttattcatttcctttgacaatttttccgtgtattttcttttttcttcagcttcctgtttttggttaaatattttgaaatataatcagactaaactctgaactaattacaagattttgtctctaaattaactctcttcatctgagggaaacagaaagatgaaaggacctattatttttgaaaagaaacaaattctaagtctttctrtattaccagagtgttttcattgtcttgctttatgtcttaggcaaagagaaaagcttccatgacgcatttatgctttttaatgacctaattagacaatgtggatttgttttgctttcataattactttccctgatggaataaaggctgagctttacactgagaaaattatttctcctcctagagcactttgtgaagaaatgtaaaaataatttctctcatggcaggctatggttacctgactgtaaacatgcaaaataaaaattaagtgggtggaaatttttgcttctattgcacacattttgcatttgctactaaaaaatatataaattacaaagggcagttgaatgtgcaatactgtaaatgaaagttcattggaaagtgggggcttctcccaagtgtttacaaagctgatttgttcttgtgttgtcattaaacttgtgtgaataactctatttaattcyggtcactaggaaaacaaaaccaagtcaatcaattgttttagttcacattttaatgactgattttatttctgtccagtatcaatttgattagtaaataatgtaaaccaattaaattaggatcatctaaaagaatttatgccttactttatttccctcattcttatctccccttcattttctctgaaaactcttcctctgtacacatctataaaattttaaatcaaaatttgctgcaaggtcagtaatgaagggattaaattaacatagagtaaattcttcatgattcgaaaccagtaaaaatgtaaagataagtgcaaataagaaggtccatggtttctgatgattgccaccaaaacattttgatattcaaaacatgccaagcaagttgttgaggacatgtctcttcaaagcaagggtagtgttatatatagaaaattattgtttaagatatacatcatttactctctattttgcttactttggtataatttatcttcaggtttagattggtcactatgtcaatataaattgacaaaannnnnnnnnnnnnnnnnnnnaaaaaaaaaaaacctcacaattgtacagtatggtttttgttaactttcagtataaaaaggacaaaatttttaaaattccaaatattgcatatagctagaaaatgtgagaattccacatataaacaaaagctattttcataaataaaatttgattatatttgaaagcctgaggtggttctaaaaagcaaaagcattaaaatcggcttgcatgaattaccattatcaacatcaagtcttttttggatctcttaaccagcaaaatagctattctaaatatagtatacctttgtcccattttgattcctcaactcagatgaaaactgtcaaagtaaaaaacaaacacaacacaccaaaagataagaacaataagaaccatagcaaaaaacattaaaaagaaagagaatttccaaagaatttggaaatttcaggtagataaattaagtcttaagtaataacctcttatctgatttcaattccctgctgacgaaataataataataataataataataataacaataatgttttcatgttttggataattgatcccttcttttattgctattatctccttggtcaatatgtctaaagccttccagcttttcaaggggaacttcagacaagttgcacttgaacacagacctcttaatagtttactccaaagccttgctcaagtcccatcttagttaatttagaactggtttctaagcacttcctatgtttacagcactgtggtgggtctaactgaagacaactgaaaagacaagtatactgctttccaagagctcacaaattatggttggaaatacagcaatatttgtatatataattcacatataaggcaatctgatagacgcaacattacatacagtatgtggtgcatgatgacatatctgtgaatgacagtatatatgatggtggtcacataaaattataataccatgttttcagtatgccttttctatgtttagatacacaaataccatttgttacaattgcctacatttttcagtacagtgacatgctgcacagatttgtagcctagtaacaataggctacagcatatagcctaggtgtataataggctataccatctggtttgtgtaagtatactctatgatgttcccacaacaaaatccccatcattaagtgacatatatacaaagtgtaataagactatatatatatattgggaggccgaggcaggcagatcaccagaggtcaggagtttgagaccagcctgtccaacatggtgaaaccccgtctccactaaaaatacaaataatgataataataataataataatagtaataataataagccaggcatgatggtgggttctgtaatcccagatactcgggaggttgagacaggagaatctcttgaaccctggaggcggaggttgcagtgagccaagatcatgccactgcactccagcctgggcaacagaacgagaccccatatcaaaaaaaaaaagactgcatatatacaaagtgagataggatttaggtggaagagtatttcttactccctagtagactaggaaatacctctgagaagtgatgatgtctgaggtgtggctttaaggatgggtaagctttcgaaagtacagaggaaaaggtggatgaaaaagctttggtaaaagtctgaactgagaagagtgtgggacacctttgaatatatgtgaatttttttataacttctgtataaatgcttttggatggcaactcttacagcaattactgtgaagggataatctggagaatgctatactttattgactagataggcagaggaagttaagagggtcaagagtttgaaactgagtactctaagaattaggaccattaacacagaacagtttagatgaaagatgatgacttcagggttggcaatattaagtgacaagtgaaggtgacaattccaaaatgaagtttcaggcacatactcgaggcctgattagaacaaagggtgtcagtttgggaatgctaatcatacaggagataattgagctcctccagtagataggcttccagaaaaatattaaaagaaaaaacagaataaaagtctgatttttggaaaatatgctataaagactagaaacaagctgaggagggagttaatatgagtgtgcatgatcttactagagaccaggtggaggagaaatgattcagaaccaaaagtagttacaccaaggagaggaatgaaatcacagaccaaggttcaagaaaattaaaaatgtagcagatgtctttgggtttagtgattaggaggacattagtgaactttcaaaaaacagttttgagaaagaagtggtggaaagaagaatatagaagagaatagtgtaagataccagaagagtctcttggaagagctttgttttaaaagaaagttgggattgcagaaagaggtggcagcaagagtgatttatttatttacttacttatttgtttatttttaatgctaaggtgagatgtgtgtcttaattactggcagatgaaaagaattagtgtggaaaagaaaacactgaaaattctcaatagtgagctgattcaggaccgaggaaatggtgcggttcagggaagggaatgtgctttcttccagagtggtccttttggcacttctttatgtgttttcctcgccggaaacccacccccacccctaccccataccagccatttacactatatcagagaaactggccctgtttgcaaatgaaatactggataaatccaccaaaaagtacagatgggtaagctttgaaaagaaagtagaggccaggggcagtggctcacgcttgtaatcccggcactttgggaggccgaggcaggtggcacctgaggtcaggagtttgagaccagcctgaccaagatggtgaaaccccacttctactaaagatgcaaaaattagccaggagtgatggcatgtgactgtagtctcagctactcgcaagactgagacagaatagcttgagccccggaggcagaggctgcagtgagccaagattgcgccgctgcactccagcctgggagaaagagcgaggctctgctaaaaaaaaaagatatttctaatagaaagagagaaaagaaaaaataagaacagatattataacattaaaaggtattatgaaccgattgacttcagttttcttggtaggattgaggatataatagtgaaaaatcttgaatgctagaaaacatatggaataaatattgttttagatatctaaaaaagggaacttgcttgattcctgcccagtacaaagcagagagctgtgtcagatgtgagtgtgctagcctgcaagatgaattttaacatattttactttgattcgcaaaacatggatatatgtcaggtacttttttttagcctttgaggaatcagaaatagacaaaacgttggcatctagcagcatctaattttttttttaaagtcaaccttaattattgctaggatagagttaagcttcccctggcttctcccgggatacttaataaataagtgattttctcaaatttccctttgtatttcaaaattgtatcatatatgcattatcacagaatttaagatgcaccattcatatcaaatacttgtcctatagaaaaatacctatctctcttctagcaaattccaacccttaattgcatatgactttttagacgcagcaagaatgtcattcaagctgacttatattactttattctcagtaattctctttcataatttgtcagctcactcatagctttctggctgatttttcttctttctttttttaaaagtatataactctcaaatagtagatcacccaaatgtaggaaagatgctaaatgataaataaacttccagcagcatgcagaactcctttgtctggcagtgttcccagtaataccaaatgaagtcaggggatgaaattctcagaaggcaattacttgttgttttttcttcatttttattttttattcttgaaggaaaagttttccagtgggaagtaaagagaggcaacagaaaatatgctttttttttttttttttggagacggagtccggctccgtgcccaggctggcgtgcagtggtgcgatctcagctcaccgcaacctctgcctccctggttcagcgattctcctgcttcagcctcccaaggagctgggaccacaggtgtgcaccaccacgcccagctaatttttgtgtttttaatagagacagggtttcaccattttggccagcatgatttcgatctcctgacctcgtgatccgcctgcctcggcctcccaaagtactgggattacaggtgtgagccaccgtgcccagctgcttttttttttgttttttaaatgcttaaaaacagtaggaggacattccaaggggccaataatttacttatcacttagtggaggctccttgtggaaaagattagttcaatttgtgaatttgtaaacatcctaacattttaatattcttggaaccctcaggcctttatttaccaatagtgaaaaactagcaagtttttagttatttagtatattattggtatttgactaccagccagactgtattagctggacttaaaagtacttacaagaaacaaatttttgtgttgtccatctggttttcaaatgattgaagtctttctttagataataaaattctggtttgtatgattctaaataattcaagtattgtgtgtaaaatactggaagatagctgagtattccgatggaaaaaaagtgattaaatgcacactagactatcatcagtatgcttacaaatgacccatggcctattttggagcaggtctttagtggtttaacaagtcctggaggcaacaaattgtaaaaattctagactaaaagcaactacctagatcagtgagcctttatagcataatgttaagtctcaaggatgaattttgatgaggagtcattgtgctttacttttttgtctgtaatttcaagggaatggatctgattgtaatacctactgaagttgattaacctaatcatttgcctactaatggcctgatgcagtgacaggtcacttcttttctaggttaaatcatttgtttttgataagagaatgtggagagaaatttaaatgccttttcatatttatctggagtaatgccatatatatttattgaagttaattccttttaatacattttggaaagatgaccagccgtatttcccaggaatttgttccaagggattaatgtgagcagattgggagctcattattacgtctctcaaatgtccgacatgttaccagggaataatttatgccctagagctagctgccagtgctactttttctacaaacatagtgtctttcacttgcatttcttcctcctttttcatttttccatatatcaacctaacaactattaatattcgttcagaaatttttccaataattgtttaacttttggcaactctccaaagacagtttggttttggggtttttcgtttgcttgttgttttgagaaatttgtttaaattttgcttatactaacggggaccacacaaaatatatttgcctagggcctcacttagtgtagggatggctttgtcattgcatgtaatagtgacaggaagggacctaaatatcatatctatcttctccattaggtcttcctatagatatttaaaattttatcctttagtcagttctgcactattggacaattattttttactcttcccccactctttgaaattgcttttatttagttactgtttagtattatgtctttaatttgcattgacaaactgcaagacacagtttttagcaaatctatcatagtagggatattgctgacaatcatagtagggatattgctgacaatgtccacagcacacacagtgtcaagaggatggggagacatttctctctgtcctcagagaagggaaaacagtgtttctctttaacaactgaacccactagtatattagttctctagcatccctggtctctacctagtagaggccagaaacaacaccctcagtccccaaactgtgataagaaaaatgtctctagacattgtcaaatgttccctgggaatcaaatttgcttctagatgaaaaccactgaaattacagcataatctcattgataggtgtatggaagatagtaaataaatatttagtgattaatcttgacactttatgtaggaaaatgagaacatgtttcttcaagcatttatgctttcaggttttcaggtttcatctttaagtctatcgaatagaaattttaaagaacatattcatttcattgtgaagtagttttctcagagtggaattatgtccaagaaatctaatggctaggttaggggggaatgtactcttcccacacttacacatttaagtgattcgcaggaggaaagagagtttggctctgtcctcacagtagtttcatggaacttctgtttcagggaaactgatggatgaccttcagtaagtgactctttattacaggccctggtctcttaaaagaacattgatgaacaggaatcaaatccacagaaataaaagggaaaattgccactggcatttatgcttttattgttttccccatgtttatagattagtagacatgttgtttaatacttattgaatgaccctcttatgttggggcctgtggacatcatttccatgacatgggcactaccttgtgtgtgtttagccaaatcacaacctgtggtactttatttgaaacgaaacaaagcaatcaaataaacaaccactgataatagatgtttctctgcagggactgcagatagtttaagcaatagttaattttactaagtgtacaaaagcatattttgagagagaaataaaaacaaaartaatacctattactttaagccacagtttctgaccactgttgcagttgtgacttttcttatattctttcccccagatagcttatagtacacattaagaaaattaatgcaagtattttgcacgtacgttcttgtaaagcaaatatacacgttctgaaaaatttccagctctcaagttttgccttccacttgagagaataacaggagaaaaatatgctaacttgataacagttaattttatctttgaattgcaatatctgacaaagggaaataatttttatctcacgctgggtgattttataccatcagcagcattgagtaagatcttgttttttattaatcctgacaacataccctaaaagggaagttctgtgggtggatttttgatttttacttcacttatagataaaactgataaaaaaagattgtgccaaaaataatcagcttctcatagaagattaaaatctaagactaggatgtattaactagaacaaataatcagatatagaggtaggtaaaggtgatatagggtggaggaggttatatggagtagtaaggacagttaactggagagggtgaattgaggcaaagaaaacgggaaatgttgatcttttaagatgaatattaacatccattttcatatactaccaaaaaaacacaggatacaggcttttagtacattcttggtacaatttttttttatttggggaaattgaatgttttaatttcttattaacacatatccaggctatatgtataaatatgtgtttctaatagcattaacatcttatttatggtacaggaatttttctttacagccactctagggaacaaactaaaataytgtttaatagcattcctcacaagattttatattctcatcaaaggtgctgattttcttacaaagttttaccttgggagaacaaaggtggtttagcagttatgttgtcaacattaagtgattgtcccacgttatgtaaaattcagccatcatgtaaacatcagtaaacccaaagttaccagggctgacaactacaaagaaaaagcctggaataatattagcgatattaactaaaattatcttaaaagtcacaaaaatgaaacttcttgtcagatttgattttctagatcacagaactttgtttttgctttttggcggagtttttttttctccttttttggtggtgatgcattgtgtaataagcgattcttggaaaactcttaagtgttacaagttaaagcttattcttattggaaatctgcaggttatcaaacttgcatcaaaatagtttgctcgctgagttctgtggtgttgtgtttaaatacttctgggtgacaatttccacttggatctctacaactatttccattttagaattttgtaatcatattctttgttttcaaatcattttaaccctgaatttagagaaagttgtttacatagtatcagcgatacacacttaaaagggtatttttttttttaagtttaggaggaaaaacctctcagaaaattgtgggtgagacaaacagatggagtagaaatcacaaaaataaactacatcatgatcagtcaggaagatgtagcgcaaacagatataaaagctctagttctcaaaggactgggagcagaggagaggaaagaagttgtctatcaaagatgatgattggaaaatatagaaaagaccatctcatgaagcaaaaagaacatggccattgaagccatgttgaagttagaaacgtgcagtgaatkttttttttgtttgtttgttagtgggaatgaatgatgatttgggtgaccgacaggtcttaactccacttttaccactcattgtccctattcaggtgtacggtgacttagtgccataactttggtgacatttctcttctggtgcctcaaaaatatggtagtatatgcacaattattgcattttcaggcctttgcatgagtttttaaagagtactccaattaactataagtttaggaaatgtaatcctaggacaatttagttttctttttcgtggagaaatacagcatgacttcaaacaagttttgctaaatagtgaatttgcagcagccagttttgttttatagtgattatggcaaccttgtgtatagtgaatttttaattaatatttctaaaataaatgaaaacattataatttatgaacttacttaagagtttcatttattcaagtaagctttgctgaaccagtgtgtcttgaggaaatctgttaatccataataaaatatagcagcccttgaggaattagtgaaattatatctaaagcatgaataataaagccaagaagccttttgttttatttatgctattcccctgctttcaggcttttctgttttgaaagcgtacagctaagttgagattcccaacttttaatgtccatgataccttattgtaggacagcatattattactttgactgtaaactgaaattactggatgaggaataatttgtcatgttgtcattacttaaggagaagatagtatttaaatattgactttttcatacaggaacatgtgttctcattctctaggcatgtgactactcccccccacttcctcccttttttcttttctttttttctcttatcacatggaacttttgggctcaggagtgattctgtctcatgcagcttagggatctgaaatttacataaggactttaatagaagcttatgacacatgatatgaccaggcttttcactatgttttgccatttatttggcttaaaatcaatggaacaaactgaacttggcattactatttctgttcaaaaagaagaaaaatatataattttactgttttttatgttttggtcttggcactgtggcttttgtttatggaaaaagacaagagaggaaaaaagcattattttaacttcacatgataaataatcataccaaactgatatttccttaaaaagtatttgttcgtttttcttattacaatgagtattgctagtaattcagtgcaagtttgaaatgatatactggtaatatcttctttaaatagcattataggtttaagtacatcaccaacatcataactttatagagatattgcattagaattcatctagtttctgtacttattcatgaataagagatgcttatgtagatgttatttcttsttgacaaattctattagcataaaataaaagcattaatatttacttttaataaaagtcataacatttagcgttaagttcctttataagtaagtgctttatggacattattaactaatttaaaacatcaactatttttatctggagtgaatttctgccaatattaattaggaaaaatagggatataaataacgtctatggcttctaaatatttaaaagacattctatgttcgtcattttatgcactggtggttgtggaacttttaatcagtggatacagcattggaagtaatatttttgggaatgaacagtgttatacatattatatgcatagctagaagcataggagaggctgtcatttgttatactagatatcaaattgttgaacccgtctctcttttcatgtgacacaacatttcaaacatgcagcacagtatagtgaataatgtacaaaagctaggtagatttaatgaatattaaaattttctgtatttgatgcagtatttttgttgatagctatacgactgcttagaaataatctcattaaactttttcataatgtatacattattcccattaatagatatatacttcattaaatttattttactatgtttgaccttttgggaatttagagaatatggataaagaagtagtttagagagcatggaaaagaattagaggaaatggaaaggattaattttcaaagagacaagcaaaattggttgattttaatttttaaaggctgagtacattgataaatgtggatacaagtaataactattttaataccacctggaaaaagctggcatatggccaccacattaataaatatgtgtgtataaatgggttattctaaatgaatgagtgttgtcataagcatgccttatattaaaaataaaatcattatctttatggagatataaaaaaagtaagatattttattaacattattcttttccaaatatgctaactttggtaaccacatttaaagtctttttgaaatcatgttttaaaaaatcatccctatgatggtcaccagattaacttcttaatatcagcttcatttagagaaactatgaaattggaaaactgatattatgtattgcttcactgtcttctacaaatactttctgtacattgtatataaatcatgtgcttaaaagataaagatgttctatatatttttattttaaaagtttatttatttatgagggaattagggttacaatagtatgtctctctcttctttcataaccttgtaaggagtgtcctgttcgcagcagaatagtttttgcagaacaaaatcacaggataagagaagaattgtaaaacccattaaggcattaccctatttaatatttttatcattaattaatatgcccctcataatgcacatttacattttgacatcaaaaagaagaatatgtagctaatgtatgaatgatagaatacagatttagaaagctttctcattaaccttcagttaaaatactaaactaagaagattcaagaggagaaaataaaattttgcacttaagtttttaataaaacttcagtgtgcaaagtacctgcgtatttgttcataagcaaatgaagaaacaaaaagtaagatttaagaatctggattgacgtcaagcccaatatcatatggcttttctaacagcaagtgccactttgggcttcactaacgtatttatggcatacagaacagaataattaattcartaaattctgcactggccagatgacctctgcagtgttgaattcagttctgagtacataatttcaagaaggatattgaaaagctgatgcactcacataaacaataaatatgtctagaaacagtgtcccagatgaagtggaagtttagcttatgaaagagaacttatgatgaaaagcaagagagggagaaaaattgtgctctcttaagttatcaacacggtggctcacgcctgtaatcccagtgctttgggaggccaggtgggtggatcacttgaggccagtgatttgagaccagcttggccaatatggtgaaatgccatctctactaaaaatacaaaaaattaactgaatgtgatggtgcatacctgtaatcccagctactcggaaggctgaggcaggagaatctcttgaacccaggaggtggaggttgcaatgaaccaagatcatgccactgcactccagcctgggcaacagaatgcgacgctgtctcaaaaaaaaaaaaaaaaaaaaaaaaaaaaaaaaaggtgtaaagggagtgaaatttttctctttgtcwttctgtaaggtgatatttggacaagtgaatagaacacagagcagtcagattttgcttaaatataaggaatacatttctagccattcaaattgatttaaaaataaaataaggcagtggttttcctaaatatgaaataggttaaatgattgtgcatagagaagtgtctgttagagtagatgagccaacttcgtaagcattcatttttttgtttctgagcagtcatgaacagaccaagatatgaaaatcttaatctcctaaattattgtgtgtctcagtgtacctcagagaagagtcctgtaactatgctcttcatttaatggaaatttccaaatctaggcaaaccatgagtcttaagctcagatctaggctgtcttctgtacagactagaattgtcagctccccttgaggagctgtttttaaagcagtcattcctatggactagcagtatccattcagtatcagctagtgaacttattagacgttctgatggacagtgttttagatgaaactagaaaagtcttccttttaagaagtttcccaggtgatgtgacaagtgttcatgttatgatagcatcagcttaaatgtgtcagtatggatgatgattggatttcggtacttaaagtaatctttgtattgcttctgcctaaaattctagagttagagctaaatttctttactacttcatgtttgttcatccatgaattgtgggagcttatattgtaaactgatctcagtcatatattcattagtatggatgaaagataatgagaataatgtttgatgaggaaatgagggaaaataaatgtgggtactgagtactgtgttgaaagacagggaaacagcattgaggattgatacaggtctctcttctcacagcctctggcaccacagcaataatattgtaaactctaaggagagccatttacattatagtgtacatgaatgctgacccccctggagttgtgcagcgcacaacactcacaactgcatacatgatccttttaagccctttacatctacttctgtacttagaattacttccaaagcctaaacttgaatcctacattctgattaactctcaggaaaacaaaacaaggcctgtttttttctgactcctagcttttctaccagtatcttacctctctgtctaaagtagatcaaatatcctgtactctgggtggcatcatgttatttcactcctctgggcctttacaagtacattgtttcaacttttaataaatcttaaatacaactgaaacattatttgagtcccagctctaagcactgttttcgtaacacattttacatccataatgcatttatcatagaacttagaacactatgcaaaatttcccactagactaaagcttctagtatccaagtactacttcatttgactctccaatagtgattgccacccataagttgttcaggaaatgttgaatcaatgaatgagagtggggcataaaatgggaaatttgagcacacagaactttcatttaacctacttcactatttgactatggtgtggccttgcttttaattggaggatagctggagttgcaatcagtattcatgaaagcatgtttttaaaaaaatgagaatcagtctaacagaatctgaactttaaagaacatctcattactgattatacatggtgacgatattttccaaatcgtggagcttctactgggaaaaggtatgaataacctttttgttctataatgattttcaacagaaattatattagagaaggacagttgaaagccttttaaaaataaattcataaagtaatccaaatcaagtttatgataaactggctcagtgtatttattaaatgtatttttagttaatttttaatgagttataaaaatatgacctgggaccaaaaaacttcccagtaaaagttctagaatgattttttaagatgttacaaaactatcttagaatgttaaacagaatattttattaacttagaactgttcactaaactcccaaatgaaaaccagatctttccatctcagtaaaatactaaagtatcatgaaactttataatccttatctagcaccaaatctacatttatctaaagattgacaatgtccatccttctgcattttttcctattttcctcgtggattagtagcatatttagaatttttgaggtttcatgctaaaatttatgaaggaaaatgaaatatataataccccgtcacagtagaagggaatactaaacatctgttcaaagaataactcgttgagcagacaagtcatttaaatataaaatatgcaaattatacaagtgattttagtgctttggacaagattattcactgccacggtccttccaattctgaagttcgtgcatgtattttatgttttacttagaataagttatttttgtaaatgtatgaaataccaaatcagaaatgccaatatataatatcttccccccatactgtactgattggtattcatcagtaactaccagtcaaatgactagtctacatttctaaacacactgaaatttccaaacttgggagttggttcatttgagagtgaagtgcttaactggtgatacttgtgtctttttaaaaactgactttgatggtaagtttttcgtattttataagtaatttttcattgcttcctgtaacaaaacataaaagatttaaaataaaatacttaaaatataccttgaattaattaaaggaaaaagaaagcaacattaattgaatatgtatttttgccatatattgtgctaagtacttttttcacagaatttattttaatctacaaaataatttctgagaatagataatttatttactcagttaaggttttggggcatctcctgtgtgtaggcacagtgctggtggtgaagcagttccatgggaaacaggacagatgaacttttggttctcatgaagctcgtattctagaattctagatattattattatacctttacctatgaagagacagacttgaatagttgttatgacttgctgaagtcactgagctagaaagaggtaagactgtgttcaaatgcaagactaagatgcaagactgttttcaaatgcaggacaaacgcaagaggtaagactgttctaatttgaaaaagccactttcgtctcttctgtgctatattcccttccccaacatatatttaagatgtgatttatcatgaagatatccaaacactttaccatataaggtcaaaattcagtttttttatactgatgctaattatgatcatttaaaataaattcatttttatttaattatttgctaaacctgaattttaattagaaacataatccctatattgtgatagagattataaattgagtctcagaaatttaaataactacaaggtcaatcttcgagtagtgggttttccaaacagtcttgtaaatgtgcaggaaaacaaaaacatttcagaattgcttttctgacaaaaagaaaaaatggagatttcagcccacggaaatatagccctgcattttctgcttctaagcctgccttatgtaaattagatttattatgtccagtacatgaagaaattccatgccaaacctatatagctctttaagctttctacttcaccacatttgcagcgggactgttaagtaagttagtttatttggagtagaaattacctctgaatatgaactttggaagacttctaaaagtgatataacctctcatttaaccagcacgaggtccatgggggtaaaatttactatacctggtcttcttaaagctgcacatctgtgaaagcaaaaggttataattaagtttttctggaatttcatgaaattacacattttaaagtatagtcctgcaggacttcacattaactgaaatcaaagacagcctggtacagtggtgaagagaatgatctttgaaataataaaaattccaagtccaccactgaatgtatacgtgaccttaatgagatatttaacctttggaagtaatgctttttcatctagaaagtgagtcagtatctactttgaaagtttgttctgtggatacaatacrttggaagacattaaattaaaaagtatgtggaataaacactcttatttagatgatagctttcatcattatcattatcatcaccatcaccatcaacatcatcatcttgctcccaccaccaccagctccacctgtatatcatgctatacaagtatgctcagcatgatgagcccaggccttcttttctctgatccttcagaaaatgacttacatgatgcccttggaccatagaggatcaacttacaaggtcacatttgtctcactgtccctaatatagcaatatgtagcatcttctaatctttttctcccacaaacggcaagatatctcaatatcatcctacagtaaagggagattatactgcctcataatctattctaccaaaatgattgttaggaggatcccaccattacacagattttttgttcatactttagagatggcatcgaaaccaagcccccaaatggaaatatcttccttccaagtttctataaatgccattggacatactatttattgagttaactttgactacatgagtaagacaaattatttgtcttaagttggaatgcctgtttttcaagtaatttatgaggaggaatataatattatccacaaagtattccttaggaattttcagtgggaatagtaattttgatgtcctgtatcttatttttatgaaagaaattaagacaaagttgttcttactaaaattggatttactttttaatcgacattcttattagttagcatcaaacaaaatgttacttaagtaaatttcagcttacctaatttatcttatttaactctttcattatggctaatatagtatttggaattaagctataaaattaattaagattaagctgtaagaaaaagttctgactaaaattaggagggaaaaataaagctctgattaaataaacaattacagaaaacyaaattttaactctaagataaatttgccttgcaacttggttttgatgtacaatttgtgtattagctgattaggtaacttcaaaagtcatcagctgtctactggttacaatacagggaacatttgggaatctaacctattaacacataatttaataggtaacacatattactctctaagattgtttgggatcatctacagactttcatccaagtgaaaaagagttctacttcattctgagttaggtcacaaggtcctgttaattttagctgtttataaattttcactgagaagctgttctttcatcctcctatttttttttaagctcaaagttcttgatttaatctgataaatgagctcaagttacagattctaatctgataatttttagtttcttatgcacctgattgaaataagggtcttttttaaaaaaatgtagcacaaaacccaatgcaaaacaactaagaaatttggtcaatatttgtatatgtacacaaagaacttacacctaaaacctattgctatatcttaatttgaactttttaaaaaattgattaatttttgtgggcgcatagtaagtgtatatgtttatagggtacatgaaatattttgatataggtatgcaattcgtaacaggcacattatggaaaatgaggtatccatcccctcaagcatttatcctttgagttaaaaataatccaattatactcttttagttatttttaaatgtagaattattaatttgcatttttattatactaatctataaaatgaatactattgagagaattgcttaaattttagcattaccagtctttaagttttctaaatatggttttggagtgaaatattatcttacctttccaaagcaaggaatttgcaaacaagattagtctcaagtattaattgaagtatgagtactatttcatatgttacaatttttatattatctattgaatgttagattggcaggaaatagcaaaattgactaaaatagagatgtgaacatcctgaaataaagacagtactatatacaactaattaaaaacagagggatgagtagtttggcagaagcattaagatatctggaaaatgaaataagaattgccttggtcttacatgatgtgaaaggactatatccactactagcaataaacagaaaagagaaactgactttcagcattaagcattcactggtggaaatgaagttagacagttttcattttaagtgtgctcaatttacggatattcacggaaatataatttgtcaagtagaacaatcttcttgtcagttacagaaaagatattgataatgagaatgttatttatcttcccttagccatgtgctattatgggctcagattggcttctcgttttttaaatggaatgtgtccagttgacagaatacaagattcagcaacctagagagtaacatggaattttacaaagaaataaaaggataagttggaaacatgaagttttttttttttaaactaaaccaggtgaggtcccccaaatacaatgaagagattgaggagttagcaccctccaatacatcacaggtgcagcaaatgcaataccactgtattagaagtactttagagggggaaaatattaaatcttcccatggtaacaagtagaaactggaataaagactactcagattatacatgaaccacccccacccccaaacaaggaattacagaagagttttctaattttaaagagctggctagagccaagttacatgaataggtgtgaaacagtggtgctttgggcacccagtgactaggtgagcatggccaagaacagcattctagagcacgcaatccatgtgggtcaagagtgttgaaatatgatgaaatggtgggttaggtaggaatcactgatacataccttgtttgccctgctaaggacctgggaattcacccagtagataataaagaacaatcaaaggattttaagtaaagaaggtttgctacatttaatgcccctctcctcacagtgttattgaactgtcaataatatsaacacacattaaactgaaccgcatattcagtttaatgtgtgtttttgtataatttgaacaaggctggaaaccaggagacctgaactcagattccagctggcttagccccaaatgagctgggtaatcttggaccagtcaaataatctctttatgttcattatgttgaactagtcaaataacatctttatgttccagttttgytaattttaaaaaagaatgaatctagcttggattacctctactatctcttcttcttttattttgtggttgtgttctgtggcacagaaatggaatttaacacatacaggaaatgtgcagtcattttatttaccaaacacgggacgggccaggggagaagcatttgttttcttgtataattaagagaaagctgttgaaaatataaagacaattgaagtagtagttttcaaaagatgggaaggaagtagaggtgtgaattcggaaacaagctagtaacaaacgtaggtttgaaaaatttaccagagtgggagaggggcagtcctgtgagaattccactcatttcgttacatgttccagggagaaactggataggttagggtcaatgaagtcggaagaaattcttaaagatcacttatgcattaggtttcactttgtctctaggagtttcacactattccaaaagagtacaaggcaggagttagtctaatatgctccccagagaaggcttcataaataagctatattctttatgatctttattttcaattcaaggaccgtgtcaggatagacaaggtggtactgcagtattaaacagaccccagttctcaaaacagggaggttgatttgttgctccatactttggctagggctctgttctgtatcgtcctcactctgagacagagatggtggggcagccaccgcctaagacattattaatcaccgtggcagaaggaaggagaattctattgggtatggctttggcagttaagtgtcacgttctggagtaatacaactaatacacacacacacacacacacacacacacatgtagtactcactaatgcgcaggtggaaaataggatcatcacaataagcactatcatttgaaagagaagaaaagaacccacacaccatcactaacctgaagcaattccaaaatcttactgggaggctatttgaaagtcccttatcctagggctagatacatttttaaattattattattagatctggttctgcttcctgggagaaagcctctgtctatcgttctctgatcccctggtcccactctccctggtctccctgatctgattatcttctatgatcacctataaagtgagcattggaaaggatgccgtcctgggggctttgcagtttcatttgatcacttcctatatgtaagtctttaggagtttaagagttgtgttaggtactgaatagtgttcttttcatagtataatactctcaaaaccatagctccttttaaaattaattcagtacagttttgtatgctaataactacaccatcagttttattttttttctcggatgtacttttaagatttgctgtatttctgtgtcctttaggtgttgtgcttctcactcccaatttaggtgatgataatttcagactgtcaggctttgttgggaaaccctagaagattttccatgagaaaagaatttttagtctcttttccttgagttattctatccaactgaaaagatatattgagtcctataaccttaatttgattttgctcttaaacactttaatccattcataggatttataacgggtgtggtgaccacatcttgattaacccttactgaggctgagttgaaatatgcatttttagctcagtgcccttcccagttcttctsctatttaagaagggaaagcagttgccttttccgtgttcttggacctttctrttccctttttttttatccttgcaaacaaatctagtcttttctgagctcatttgtctcttataccttgtcaaatacagatcacagtaaccaataaatgatacttacatcctgttgtccattctctctggtagagctacaagtccattaggtccttcatctaccttcgaaatattgcagacagcagtgttaccatatgctccttctctgtgttccatagaccacctctttccagccactaatgccaggttcctcagcaccagctctcaggcccctcccctattgcctcatgtagttgggatacttcacagcaacagcccactctgggtaccagttctgaataactttctactctgcaatcagcagtatgtacaatgattcagagttgcgcattaggtaatgctttggtaaaaatcaaaggttcttaggctcaatcaaagggattgagaaaaatctaagagactgcagagaaaacaattgaagagccatgtattatagaaattggagtgggaatgagctctcacagaaagaaaagtaccaactgaaaggctggtcaagatttcattaattcacaaagaaaattacaaaaactttaggaaaaaaacctagtatttgggatgtacaaatgagaccatgcacgttagatcaaaatttggtaaatataaaaacaaacataaacataaactataatcaattaaaattgtatagttagcatcagagaagtatttctttaattaaattaaatccaccttgcccatgatagattaatcatgtaacaagccacctcttaggggattctgtgccagtttaaataatttcatgacttgggggtagagaattgtgaggagggaagaaagatttgctgggtaattcctgcagggttcaaaagacatggctccttacctcaaaacttacaacttgtattaaaaaataataaggcacacaaaaattaggaagacattttaatggtctactgttgactacagtagatggaagttgaagaggagaaaaatctgtatagactgaagccttcagggataatttcatataaactggtggctttaaaggataaataaaagttgtttggggtggaagagaagaaaaggctatttcaaaattcaaaagtcataaccacactggtaatattaaaaatattctcaggtccaaaagcatttagtcaaattaggactgtgatcatagcaatcaatgaactagtgtgcattttgacaagcaaaggctttctgattcttttctgtttctctttctattgatcatggggctaggaaaattgctacaaattatattttgctatttattttttgtgacatcaagagcaataatgtgtgytaagtcagaggaataaatgtacagcctagtattaaagtaatgctcctttaccccctctgcacactcgcatgttgctttcctaacaaacacgcaaatatgcaagcgtttcctagaagtgacagctaatggtataaattaacctcttgaatctggcattttcaaaactactgtagcacataaaagatagtggtgaaatatgaatagtaaatggaagaatgacatgtcctccgcctgctttcagaagcaaatagagggtttcactatcaagaaaattataggctctaggtttgtttaattactgagattttcaaacaacctttcttacaatgaactaatttgggtttgaggaaaaaaatagcagaagacagttctttctaaattttcttttaaaattatgaaaagcactcagaacattggacttaatcattaacagaataaaggcaaaccagaaatggtttatatagtttaatatgacgaatgcattaaattagaatagcgggtaaaaacttaatgccaaacagaaggcttattgccccaaattctcagactttcatgactttgtggcaaaataatagattttggttttggttttgttttgttttgctaaagggtcatcaagcagcacatgactaagtaatattgatacaggtagtggtatgagaaagttgtaaggaactaagacagagaacatgcttcacagcttagaaccaaatgtctactaccacctcaccatttactttttttctcatgttacaatttgttgtaaaccagttgaatacatccatagatgtattttcaacattatagacgttacgactttttctttgtttgaaattgagcatgtagtatgtacatgtacatagatttcttttcttttttttttttttttttgagacggagtctcgctctgtcgcccaggctggagtacagtggcacgatctcggctcactgcaagctccgcctcccgggttcacgccattctcctgcctcagcctcccaagtagctgggactacaggcgcccgccactacgcccggctaattttttgtatttttagtagagacggggtttcaccgttttagccgggatgrtctcgatctcctgacctcgtgatccgcccgcctcggcctcccaaagtggtacatagatttctaaatgtaaaatctatagagaaactgtggaacaccagaattataaaattgggcatagcttcattgactaccagtataatgaaaagaagctcctttcaaagatttaattctacgttctaaaatatgtattgtgttatttaggttgggatttttttttaattttccaaactcttagcaagtttttgttttctgattcagattcctctaaaaagaacttttaataaaaagacatttgtctccaaattaagaactaaggaaatatccttttgtggttaatcactttaaaaatgaatatgaaattattattatcgttattattgagactgggtctcactctgtcaccctggctagagtgcagtggcatgatcttggctcactgcaacctctgcctccagggttcaagtattctcccacctcagacccaagtagctgggaatacaggcatgcaccaccatgcctgactatgttttttgtatttttttgtagagatggagtttcaccatcttggtcaggctggcctcgaactcctgacctcaagtggcctgcccgcctcagccttccaagatgctgggaggatacaaaattattttgatggaaataacacatgctgcatgattaataattatattttaaaatattacagaatattgtaataaaattatagtgataaatatatatacgcttatatagtagataattaaatttagaatggtttgtcatcattgatccatgttgcaagctagactctgaaaccatatttattgcaactacagatattgatatttataggaatatgttttgagaccatagacttttttcatttttgtgtttggttttgtctatttgtaaatggaaacatttatttttaatgtgattcttgattgcactcaaaaacaagtgcactggtggagtcaatttatgatggagtatagaggtgaaagaataaagggaaatacatatagaaatagcattctcccacaatcttaatatgcagagggaaaaatagttaattttagaaataactgaaacttagctgttcttgaaaaactacccctcaaatgaactcttgaattccaaggaacaatttaaaaattacagactgattcccttatccttcactttttcccttcccccaattgtctgatgtctggctttctactcaaattctactcagttcagtcaagcccctgcccagaaacctggttagctggtttgttttccctcagaactcagattctgaaatactcccctctactttgyctcattcatagagtaagtttttgaatataaataaaaaactacacactgggtacagtatacactgctctggtgatgggtgcaccaaaatctaataaaaattcaattttattttaaaaactttattttttaaatcattttaaatctctcacaatgtctgtagtttcagtgaataaagagtttggaattaggaggtcatgaaatttaactatataatcttcccagtgatttctatactgacctcaagtagttgtttcatttgccctatcttaattcctactggtgatttcattaggaataagggttttgataagaatagckttaaactggatttcagtaatgagatggtactttgtagaagctaatggttaagagcacaacaggctgtagagttgcagactgcctgggatcacttactagatgggagaccttgggcaacttacttaaactctatgagctaatctgtaaaatacacataatattagtacctacttttctggatcataagaggactaatgaaataatctatataaagtgcatagactgggccctggtataagataaaccttcaacaaatattcatttttatttaatttactgttactaattggctttttttcattgatcaatgaaaattgttttaagtaactaatgtacctactttgatttttatagcctggaaatagtaggaaaaaaatcacaagtgatgtgaaatatgtgttaattctattatagaacaggaaagctgttccatttctatgaaaactgggaagtacaaagagtttgactgatgagggcagaactaatgctgattggtgaaggtaggtcttggctcaggttcagagagagccatctaatgaccacaaccttcaagttctagacgcacctactgtgtgaaaggtgaattcctttttgctttcaataaaggagaatccagagaaagactggttgtgctcttgagcagggtgggacacctaggaagtgtctcttgtcaaagacataatccttgattttgcaggtccagaaattcattttgtgaggtaacctagaaaattaaagtctgaaatattagttcattagaaagttacaaatgagtgagatgaaactttgtcaactcaaaaatacataataggtttgtcagaaaattacagattgtgatcaatagcccagggcattccaacaagcagtacatgacacctctcagaatctcaaactgtgattcagagagatgtagaacattaaatgaatgttatgctgtataagtctcctacctccagaatgtttctatttataaagtttagtagcattttccccaaatatcagaacctcctttttaccaggacaggatttatacgcattgatttttccttgggggttggcaacctgtacttttaatttaatgcagaacgccagattcttgattaaaatattttattttaaaaaaattgactataagactgctgaataacttctattgtccctttattacattacaatccttaggaataactcagaagaatatggctatgaatttgagatgttttattttgacccaagctcagacttgttcttaggcaagataaggcctgttctgtaaaaagtatccatctcaagtgtgccgttaatattctgaatgtcttccttttctggcaattttcattttttttatgtccttgctttccttccccttaaagcaagctacctgttttccgggcagttttactctctgttctcttgattcctctgttattaaaagaaaaataagtttcacttaaaggtagttatgattaggcaaggcactcagaacatttttcacttctttgtttcactatagaaaatacgttagaactttttgctcattgataaaagcttaaaagtacaaatctactaatagtacctcaatcttgttctttctctagttgctaatttgacattttcctctgcctgattatgtyggaggatttctcattttctatccctaagccgtgcacagctcataaaaaacagtagttgccaagtgacaggtgtttttggaaaacttgcttagtttatamgttcagagaagacattgcctctaaatcagcagctactaatgaccttttgttccagggagttgttagagatccagatgaagtcctgtaattgaagcatagtttaggcttagcccagagttggtattttccaaatgtactttgttgagtttttgtctctgccctaagcatttattcttggaattttcaagattcacacagtttcaacaataggttattcattttcttgccttctcttcccattctcatgttctgctttaaccaaaacaacgtaagttattgaatatcatgtaatgctagagtgtcaacagacctgtgtttcattctgtcctcaccatttgccaactgagagacctttagtaagtaacaaaacttctgtgagtctgaatctccaaatgtaaatggtaataacagtctcacttatcaagcttttgttcattattaaataatttgtgaaaatgtctagcatgctactagacagatagtatatgttcaataaattctcattgttctccttcagccttaagttatcttttgagtgctttattttttatttttcactcttttgctttctttagtaatgatatttcagttttgactttggttcataccttttcctttctgtgtcttcactgtgcttgccttgccttttcttctttcctttcttccacagacatatactgaacactcaatactatgctagacactgcggatacaaaggtgaatgatactgtttgatggagttcacggttttatgggagcatggatatgcacaatcaaatgtagaatttaaaatgaggacaagtgtactgggcatttgcaaagcaaaacaggttagcaaaggcctcctggaggagggtaatagctggagtaaaccttcaagggtgggactaaaccagtgcacaagggggtgtgtcttctgtgtaaagggaacatgttccaaaagcaaaaaggcaagaaacaatctgttaagaagaaaccacaaagatttcctargaagagagaatggcatgagttgagatggaaatgattgggaaaggagagttaagtcatagagggtctgggtttagatatgacaccctcccctttaaagttagtctgagcaaactttcaaattatacagcactcttattatttcttctgacctccgccaaacctctcacgtgccctttactaccttagctatttctcctagtgggactgcgtcatattcctcatgtaagttggagtaggattaaaagtttattagataaaagggagctcttaaaaaagatttagtcttaaagtgacatagtcatatatgtactttaaaatcacttctctaacttataggatgaatgaattttcacgaaaaacttagattctgtatgaagatggctccgatctactaaaactttgtttaacttgaggaactcagagctatgtgaaatttgtgaggaattataattggaaaataatggttttaaaggttattgttaatattagaatgtttaactttttttaaacaaaaagtgaaaaagcaaaacttaggaaagacgaaggcttaggtctacagcaatgtaactaagcaattccaagattgcttagtacttactacttagcctaatctttaatttgatacataatattgtttctcaaaaatcttttgcactgatagtggactaagtagcaaggatcagtaatatatagaatctcattcagatatgtatttttttaccttcaggagtggtccacttggttggcttttaatgaggccattttactctttgctgttaatggtatttgctcatttgcaggaacaggctaggtattgtatttatcttttcccttataaagaaaaaagtgacagtaggcaataaataacttaaaattagtaggctctgctgggcgcagtggctcaaacctgtaatcccaacactttaggaggtcgaggtgggtggatcatgaggtcaggagttcgagaccagcctgactaacatggtgaaaccccatctttactaaaaatacaaaaattagccaggcgaggtggttgcgtgcctgtaatcccagctactcaggaggctgaggcagaagaatcgcttgaacgcgggaggcagaggttgcagtgagctgacatcacaccactgcactccagcctgggcgacagagcaagactccacctcaaaaattaaataataagtaaataaataaaattactaggctcttctataccatgtacaaatattgggatgaattttttttttaattaggacttctggaaaagatttgtgtttcatagtgtttcttctagaattttactatttctttgacagagagtacaaacattcagttgacctgtttgtcttttgttcagtaattcagaaaaatatattttttatggaacatatctaaagcaaaatagcttaataggtatatcatctgatttcaacttcggaaaatatataaatgtacatctaagcttctagtgaatggttgaaagaagtatatatggtgtgtaagttcttaagccratggattcagcctagagcagcagacctgttcccagcattttaacactaggtgtttatttacagtgatcaaagtgagaatgtgttacatcagaagttagattaatagttttctttaacacctctactttcacaataaatgtgctttaagtcctgacatacagatagaaaaaggctttaaagttgctttttaatgtgatgatctatacaacctctaactggaatttgaaagctggggccaaataccactgcagctcagatgctaaagctgtttcttaaaatgargcagataaaaaatagagaaaatcttttttaaaggctactttgctcctttccttctccataactaaatgttggagctttctgctggggaggggagagcaaaattggaggtggaagagaaccatgaagaaggcggtaggggcagttgtttttctgtgcctgctgacgtcaacgaaattgccagatggcatttgaatgctttgcaaaaagacaggagccttttattacagctgtcacatggggtttcattcatttgcattcccagaagtggtctaaagctttccctaatgtaggagtaatgagggctctgtaccttcagagacccagagggccttttgtaggatgttgttactttaagtggctctgataagggacacaggctcagagaatgccatgtttcactgtcagcttcagaggaccataaactactcagcttcaattaggactataatgtgatcattcaaaaaatattctctccagaaggacttttcatggatcgtgacagctgcggaaacacattcagggggacctgaagggtctagcatggcagtggtgggctacagaacaaaaatgcagattccgtgaattgaccccaagactgaaaaataaccagtgcacaacagacctgagcatactacaaacagctttgctcttaccattttgccccatgctgccttgtcagcccctsctcaatatgggggaaaagtggacctttccgataatctggggccctatatgtaggagaaaaagaagttgaagtgccaggagctgctctcagaagctgaccctggggacacattctcargccaggctggcctgtcctgtctatacctcaacccttcccactgccagaagttttcatgttttacttattttttgcctggaatttgtcaagcttttaattcatggggttatcctttttgtttgtttgtttgtttttgagacggggtctcgnnnnnnnnnnnnnnnnnnnnnnnnnnnnnnnnnnnnnnnnnnnnnnnnnnnnnnnnnnnnnnnnnnnnnnnnnnnnnnnnnnnnnnnnnnnnnnnnnnnnnnnnnnnnnnnnnnnnnnnnnnnnnnnnnnnnnnnnnnnnnnnnnnnnnnnnnnnnnnnnnnnnnnnnnnnnnnnnnnnnnnnnnnnnnnnnnnnnnnnnnnnnnnnnnnnnnnnnnnnnnnnnnnnnnnnnnnnnnnnnnnnnnnnnnnnnnnnnnnnnnnnnnnnnnnnnnnnnnnnnnnnnnnnnnnnnnnnnnnnnnnnnnnnnnnnnnnnnnnnnnnnnnnnnnnnnnnnnaacaatatttttgccatggttgctgtaaattatattgttcatggtaagtaaattgacatattaagggtgacctaagctatgttacccagcttgttttcttcctaaccttcatctgaaatcaatgacctgataactaacagaagtagaaggtttgctggcaataggtctgtgcattatgctgagataaaaagcagcaagtataccaagagctttggagtctggagaccagggagacttaaaaattagttcacatggccgggcgctgtggctcacacctgtaatcccagcattttgggaggccgaggcgggcagatcacgaggtcaggagatcgagaccatcctggctaacacggtgaaaccccatctccactaaaaacacaaaaaaattagccaggcatgctggcaggcacctgtggccccagctactcgggaggctgaggcaggagaacggcatgaacccaggaggtggagcttgcagtaagctgagatcgtgccactgcactccagcctgggcgacagagcaagactgcatcttaaaaaaaaaaaaaaaaaaaggaaaaaaaattagttcacattagttcatatgaaacattacctagtttcaatcttatgcctacactcacggtcataataggttacctacagtgcaacagatctagtgaaaaatcttatgccaccttgtgagttggcaacgtattacatggatgtgaaggccactggcttgagtgatggacaaacctagaatagttttccaagtgctctattacgcagcatataaaacaaaggtactcttactatcccgtgctccaaatgcataatgcataagctcagccatggaatattttccaaatgtaaatagtggaactgctgctgagtgtattcatttcattctgatttctctttctgattcggcttcagggtttggggagatttaggagatgatggtgaagattataaaatttcaagaagcaccttccaacttcctctgaccccttttcttctctcaactgcaggggaaaggggcacaatcagtatctcgtatgtatgagcaagttccagacctgagtgagaggtggcatgtggtcagtttcaaggaacgagagaccaacatccaagaatagtctggaggagaaaggacatatcaagaaacacaactcaagctgggtgtagtggctcacrcttctaatcgcagcactttgagaggctaagttgggaggatcacttgagcccaggagtttgagaccagcctaggcaatataaagagccctcatcttaaccagaagaaaggaaagaggaaaggaaaggagaggaaaaggaaaaggaaagaaagaaaacaatctaaatggtcagagtgatgggaattttaaaaggcagcaggcacacatttaaattatacattcccaccctagacagtacaaagatatgcagatagaatggaaattagaaatgaattcatgaataaatgtttcacctcgggtatacttgggcctaaatcccaagagcatgtaggttatggtgggtctgtgatgtgtgtttcatgtttctccaagaataaaccttaggaaagctgtaatgataatagcattgtcccactttgcacgtcctagctccctgtccacttcgaaagtgcagagcacttgtaccaggcataagtattgccattgttgatagtataatggttgttattatcatcactactctgatatgttaaggtttgcctgaatatgaattaaaacaatgtgtttctgaatgtaactgcaggtgatagtcctttctggcatattatgcctttccccctaaagtcctaaaacagtaaacctaggtctcttttgtgtctcagctacagaaaaataatgttttgttaattcatctcctttagccacaaaataagtttttgattgtacagtaatatactatatttcatatgttgggcagtgctacagttcaaggacagtatacagccaatgtacatacttaactctgttttgaatgacatgaaatgacaaagaagtgaataatcaattgtcaggctaccttagggtcaaactgtcatctgatctgactttaataatactatttttcaattagaagaaattagcataaaatattttaggacctagcatctcaatgctcatggcttgttccagaatacaattacattttacaagaaagtagccacgggagtggcttcatgataacacacagatacaaccttctaatgccgaaggcaaattgccaaaatatgtgcattgttagggatcagaggaagaaagaatgatacactgttctgttctctcattttgagccccgtaagtccagtctaggggctggtagagaggtgttattcttttttctcagactcaaaaactgtaagcctacccagagaattcaggtttcacagaacttaggcattttaacttatctcatgagaggctgattaataaaccagaatgtcagtgtactcatttttcttgagaactgtcatagccaaacagattgtaataatcgtggtggctgtccagtattttgttttcaaagtaagaaagtctacctgggcaaacacatcagtgaataagtaaatgtatttataatttggcaaacatttttatgcacttcattatgataagcactggtgatataataaagggttaagtaaaatacatggtctaactttaaagaaagatctgcaaacaaataattcaagggcaacgattaacatataattttcaatatggcacagatagcagtatgtcttccaagcagaaagacaataattcatagtcttaggtaggttacattactgaaagctgataaattgcatctgtttaaagatgttagtttggatttaaggggaattttttttaacccttcaaacctaaggaagaaagaatattgtgtcttaaaagcatatggaatgccagtgtactaattacagtggaaaggtcaaaaggttgtatttgttttgagggaacagagagattgactctagattttcagaattacctttctttaaaggtataaattgtcatcctgcagtaaataaaaggaattcgaacaccatatccaatcattatgtttttaaaaactataatatcaaacgactatgctagcaataagtcaaaatttgttcactctatttttttccttcagtgttctagtgttttccaatgatgtatgtgtgctgttattataacgaaagccactttctgtgaagtgtccacctatgcttgagtactaatcatagaaaggagctctgaaaataagcagygggcctgtagtcagggactgctgaaaatgagggagagcatcagggaaattagtgcactgtgcctcttctttcttcagtactcctttaygttcattgctcatggggatctgtgtttgcctgttaattgagtgtgtttattgcaggcagttgccttaagtgacatgatactcagtaggaggttgtgaggactagaaggaggtcttgtttgaatacaaggggtgggggagtcacacttttcagaccgattagaataatgagattctctaaacagttgagaaccatttgtaagaatagcacrttgtgttagaaggcaattagagctcattcttttaataattaggttttttgagttcttacagtatgctgagtactaagattataaaaatgaacaaaaattgttctcaaatgcataatctggcaaggaatttagtcataattagcaatacaacaatatcataatagatgttgaacaaagtactatggagacttcgaggctgaagcgattaatttggtgtcagtttgagaatgaagctggaatgtttttatatattaaagttgaatcttgataatcaatactaaataaaagaaatgaagtggtaggcagaagtaacaccataaaccaaagcatagggttgtggcatcatatctgtaaagagaatccaggttagctggagggatgaggcattagtagagcacgtggagatgtaactggaaaagggcggcgggttaaaggttaaatgttaacacacttaaagacaaccaagaagttgaatgttgttccctaacttcgcggagccctgaagtggcagagcagcataataatatctctgcattgggaaaagccaagtttgtggcaggaagaaactagaagaaaaaaatattgtagccatcctcgtgtgatataatgagagatggattaaagcagggatgagaggctttttaaggaaaaaaaaaaaatgtcagtcttgcatgtaaatttccagatccactgaccaatttgatgttgaaggtaagaaagcaaagaataaatacaaataaaacctaagagtcaacgtgtccagttttggttagtgattttggttttagccaagtaggaaatacatgaggaaaagatttccaaagataaaatattttcttttggaaagttgagtgtgaaattgctttggaatatctgagtggagctgtccagaagctcgaaggagtggtcagtgttggaacaacagattagcgggtactgtattcattataacatagggtgagggctgggagggaagggcacagattaatgtggataaaaataataaaaaggaaagcagacagtgagtttgttctcaggctggaaaaaagctaggccagaagaagaggagatggctgtgcctgaggtgctaggcttcagtaatgtctggtggtgaagcaagaaaaagccaggaatgttgtcattagatattttgattaagatatttattaatattgatagagaattagtgagagcagaactctctttaagggctttcaaaatgttaatagattataattttttaaaaaatggttagctccttagagatggggtcaaagaccctaattttgttagtagaggaaatgctaacaatgtttttaagttgcgaggaaaaagcgaggaggaaaaagagaatgaataagaaatgcactaattaaaacaaatatgctgtctattagaaggatgaaattaaaagtacagtggtaggagactggtattaaccaaaagaaaaaatattatttgctcattgaaacaatagggaggaagtcaagaattaagaagtcctttctatatttagaaattcatatgaagccgaattaaagtcctcaataaagattggatagcttatttttgtatattttctgccaagaagaactggagaaaagagaattcatttaaactaattaggggctttttttttttttgctgagcctggtacctgagcaaaatgctgtggggttagaaaatgagtatgaaatgacgctcatctttaagaagcttacagaatccaaacatgtctgaagtgcctttctataagaatattaaatgagtagcattttgattattaatttgcctctaggattcagatatggatagtatgttgggggctcgcttgcagaaatgagtcacttggctaagagaactagctggtgctcatcactcagccctcagtaggttaccgtgtttggctgaacctaaggtaatcatatttttttattgccttatagcattctgaatataataagattataactaaaactgttctcctaaactgaagttattaacccagacttgtagatcgatacattataaaattttattattaccacctatttatctatacagttggtatattatatatatacagttggtaaaaaaaaattatgctgtattagaatattttcaactgtaaataaaagaaaactttacttcaactagttgtagcaataaagagatgttattatttctcatgaatagaaggccaaaggagggaagccttcaggattagtgcatttagtgaattcagcaatgttataacgcacctaggttttttattctctctactctgctactgtctatagtattggtctcatcctaatgccgattctacttgtgatccaaaaatggctgctggcagcaacaaactttcttctgaagaaaaaggatttccttttctagaagcatgaagctaagttcccctcatatctcattgactcacattgacttggcctacccattcttgatcaaatccctrgctttggagttgaaattatcatgattggcacagagagtcaatcatgatagccactgcatatgctttgaagacagtttagaattagacatttccaaatgtctttggacctatttgtcttaatatcagaatgttatcatagtccataggaaatttaatgaggctgtcaattggtccagcagccacaagacatgcttgatggatattcaagaagctcttataatcttttgagccagagtagaatgtagctgatgatagagataatatagcaagtttaaagtatttgtttgaagtattgaaactagtagggagacattttgaagctctttttagttagaccttattctgtcttaattatatattcttcagtttgccagcagggccagcacttgaaaggggccattgcatctgctctgtgtccatttttaagataaagctttgcttatttgtttttatggcatatttcaattaaagcattgccaccctactttagtccttatctccctattttaagatgaaatgaaattaaaattgactgaaatgatggttaaagacaaatttaatatcaatgtttttcctacatcctcctccttattttcagaaaaaaacatatttttaatcagtgcttgtattaatcttatgattataattttaaaagattatttttgaattcattttgtccttttttgcatagatctttgtcttaaagaacatgtgctgaatttctgtagaaattgactcttcatattccataaatctgttggtattaccatacaaacactctgtggaagcattgactgaactagcaattatgtctacaagaagaaaacaaatctatgacagaaatcctgagtgactcactattatgaccaaatgacttatttacttacttaatttcctcctttattcagcaacacattgttgctaaatgtggagtggggtatcattttgaaatacttcccatacaaaaccttgatgatcctgcctgacatctgcccrctaaatgtcttggtgagccaccatgtctgctgatcctaggataatcatattttttaattgtctcataacattctgaatataataagattacaactgaaaccagtttcttaaactgaagtgattaacccagacttgtagacagatacatcatacaattttatattcattaccacctaagaggaaaatgaagacggatgccttccttttagcaatagaagtctccacaagaatccacaagtttttccttccggggcaaaccatatgaacgatctggcttaagtatcagaaatagagagaataagtggcatttttcttgatggaaaaatattaatagtgggacctttcctaatacttagttctgggaagagtctaatttgacattttcaaagaagatgtgaaagaagggagtcaaccatgaaatcttggagtttactgatgatgttaacaagttccccttaataatctttatctacttaggctctcattaattggaggaagtgtttatttaaaaaaaataccgtatagcaaattggcaaggatattttcatatcattgaaggtaaatgactgtacataggaacggtacccagtatttagcattgtgaatagcgtagggcttcggatccagacyacctgggttggaatgtcatctctgcagcttaagatctttgtaaccttgggcaaattacataaccttttgtgtgcactgctttcaaatgttgaaagtcactccctttacaatgtcattgtttagatctcttgagttgcatcttagaaaatcaagaaattatattacaaactgtagtgtattacacctacctgccctatatgtaaaatgacttacagataagcttactccattctcaaaaaccagtaagcaagaaggaaccctcaggtattctgagagggaagggagtttcaagttcccaactcattgctgggtggatcagaagctagaaagccttgaagtccatgtttcaaagataagacttaggtgttggatctatgagacttataggggctcaagattttgagggaaatgctatattatagtgataagtatgtttgctatctgtctttcacccttctcacaattctcttttctggataataggcttttttgttggtttttttctttttttgatcctactttgaagagaggtatgaatgataatggtgactctgttcagagtgaccattttcaaagtttggaaaagaaccacatggacagattcaggtgttttaggatctgcactttgagaaacaactgttttcactttcaaccaacttctttcactcttcttataaccaggggtactggatacacccacagggttttctcctttatcctctaacccctttcagttccctgaatgccttccactagactgcaagctacctaaaggtagcagccctgattcattcatctctgtagccctaaggtgtagatagtaccaggtacccaatagatttcagttaatatttgtcaaatgaatgaagaagaaatggatattttttcagtacctctgtattccctttgtgacattattgaaatagggtaaatttgcagtggaaaacaaacaaacaaaattctatcatacttatgttttttttgtgctcataagcttcaaaatcacttctaacagtgtttctttagagaaaacacactctgttttccaaaaatatttttacaagtgttttgaagtttgatctatttttaagtttgaaaactttattattcgattgatggaatccttgattagttgtagcaaatgaaatttactgacttttatttctttttttaattattattattattattattattttgagatggagtcttgctctgtctcccaggctggagtgcaatggcgcgatctcagctcactgcaacctccgcctccttggtccaagcaattctcctgcctcagcctcctgagtagctgggattacaggctcccaccaccacgcccggctaattttttgtatttttagtagagatggggtttcaccatgtttgccaggctagttttgaacacctgacctcaagtaatctgcctggtctcccaaagtactgggattacaggcgtgagctaccacaccaggccctactgacttttaaaatacatttatgaggtgtttaatgttgtgttaaaaaattgggggctattgaaatcacccgccccctcaaatgtttacactgtggaaggcaatagagattrtcaaaggggaacattttcttagttggtcagacacaatatagattttattaactcacaagtgaattattcacaaattattttgtgaagcctggggtacttagagatttctgaaagaagaaattgaaagaatactgtagacagagtaaagaagactattataggaataaatctatttcatttcttatgtcgccatatctcacctatttccaagtgcaaatgattctccttaatgtaactttcactcttttcttcctgggacattcatgctgtgaatggccttgtttcccatgtttattgttgtggcagccttggtcaaatcagccttcttctatgccacaccttaatcttcctcaagcactgcatactgtttgattatatcattttccttgtcagccatctttcgtcattcagttaccaactgatagaattagaaatctttgtctttcattattgggcatctgaaatctagcctcatacttccctttcaaccttcatttctgctaataaaaagcagtaacttcccctgcctgagagtctagtctgctaatggacttctttacccattcatccttcttatgcagtccccacgtgctgccttcatgcttcttccagcttttctgctctgccccccacttactctctctagacctgttctttcacctcaccaggatctccagtccagttggccaatctttctttcctgtctgtcatacttctcctgttttctctttgttgccttttcaagtcaaattttatgctgagtaacactgggaagtactcaaccgggcctttgtattgcttgagaatctagccagctcttttttatccctctttcaaaacttttcattctcgtttgtacttctaacctcaacattgcccacatcacgttttcagcaagggactcagtgcccaattcacggtgtaattcacagtgtaaataaaagtcaacgtataaaaatttgtttaacttctcacctataaatctgtattcttctttcttactgttatcatggaaaaggtatctcccattgtgaaaggttactcctgtaccccttannnnnnnnnnnnnnnnnnnnattttacagccagttttcatgagacttgtctctatgatcttcatttttctatcttcctttcattgctcaatttattgcaatgtggcttgctacctcagtgtttcactgaaactgtagtctgtagagttgccagtgaccttccaaatactaaactcataaacatttttcaagatttactaatctctcaaacactgatccactgctgaccactccttgcttcttaacatttccttggtgccatggacactacactcccagttcttacttgtcccttcttatttccttttgtggatttcacttctgcctggcttttaaaagttgatattgattatggctctagcctcagtatactcctttctcttcacacactttcatggcaacatgctgttgaaatgaccatatatatgtcttcaatgcccaaatgtatatttccagttcagaagtctctcctaatatgccactggaatcatccaataaatacctcagtaccctcgtccaaactgattccttctcttttgattcctcattctatgaaagactcttagctacgtatcttcccaaaccttcatcctgaaagctagcctgactcctctctccacacatactgatgatgccagtattctacaggactttcttattgcccttactagttaatcaaagctcttgaatatggctcatattcctgccatgatctgtttcctcagacctctccagtgtcaacctttcaaactgaagcactgtgtacttcacctgagctttgtcttcaaaaggccattctttacctccaggcctgttaagatcttttccttttccagaaaacacaccctaatcctttgcttactcttttcatgtatgtacccaattgtggaaaaatttgtaggattgctttttgtgtcagtactattacttctccttggcattttcactgttttctggacagtgcttattccagaatcaggttgttaaataatagtttttaatcatgactccagtatttcagtgtaacaattctcagtatactttaagtgtgagattagaacatgcaattgtgctaggaggttgaatgttttaagatggcttccagaaaagcagtgatttgtttcaaagaactgtctcaaacactttaatttacttgtcttttaaggtacagaattggagagagggcatttacttatctttgaaggtttggagtatgttacttatgcagtcatcatttctcatattattgagtgcccacaaagtaccagataccacactgggggaatgaaacctagcattgcccttgtccttgcacaactttgagcctgaaggaggaagacagaccatcacatatagacataccaaaagctgaatcgagaattgtggcaggtgctattgcaacgaggatctatgtatatatgtaagatctggtcagagatgcaaggtttctcaaaaggtatagctccaaggctttttgtttgtttgtttgtttgtttgtttgtttgttttttggcttgctttcgtttctgctgttttcagagtatgaatggaatatcccaataggcattaacgtggaaatgtttgtatggtcctgaagcagtcagggaagatgtcctggattaagtgtagaagaggcaagtcagtagcctagataaacacccattgcatatggggcaggaaaaagtctagtgttgatatggataaaacaaatggcagtaaagttccacaaaacagtgtgttcaaaggcatttgatgttttgtgttaatattttaatcacagtagaaaattacatgtgggaaaatgttaatcaaattgtgcatgggaagaagtcacgtttctaatatgtcttataaaaattgagaaacgtaacaactaaaatgtttgcaacttagacaaatcattaattatgtaattgtaatttcactttaacaatgatcctgagggataagacacattttaaattttttatttctaccagtagacttatgtaagttattcttttttagcttttttttttgttttctgtgaaaaaaaactaaattctgcctgttaatgaggcagtagcacttgttttaaaagagatggtcagataattcttttaaaaggcagaatactgccatctgttgttcactgaagtttttagcctaagcaaacagaagccttaagttcaaatttaatagcaattcttgatatttaacagacaaagaccagcccacatttatcagctttctgagttcgtacttatttcagagattcttagttattcctatcattttttaaaactctttctcatatcagagaagtgctcacatccagttaagttctctttgcttcctgtttcttccaacaacagaaataataatgttttttatttacaaagtaatttgtacttaaccaagccttcccacatttgtgtgagcagtcacatgagtagctcattgcctgaatttattatatctttgccagctacatcatcttttctaattaagagaaagagagaaaaccagcgtgcaacttaaagacagctaaggttatcttctgaaagatgcgggttcttactagagtaagtgatgaataagtatgttccatttcctaaataataaaacactattgtaaaattgttaactttgagttgttacgtgagttcgctagtgtctggaaagtagttagaaaatataaacaagacagaatttttcaccaatttttgacttgtttgctgatagcttgcagggacttgtataaggacagaggccatgtattccatctcatttggtgacttgcagtgctctttgaacatcaaaagagaaggatgttaagaattctggtaactaatgaagtttgttatgtttcacatctcacatggaacctgcccacagacatgttgggaagcagtttgatgaagggccctataggttttcctcctactgtacatayatattatcttaaggaaaaaatccaaatgtaaactcatattccctgccagaaaattaaaatacgcaaacatctgcttccttaggatggcctttagccaaggttcagcctacaatgagttactgcaaaattttcacatgatttcattttttaaaaatttcccaaccaacttcaagtctaaaattataaatgggtcctatgaaagtataaacacatatgcaattttgctgtctctgaggtcagaaccagtaatgcaccaaagatcattgtatcaaatccagctcatcttctaaattaatgtagtacattaaagaccaagataccatttcctagtatcacrgacagcctcccagagaaagagttggagggatggagtggcacgtagtgctacagagatgtaggaggagacagcttccaaaaactcatcacacatcttttcccagcattgaggaccaaagttggatgagaaaagccccagtgactatttcctttttatgtgtcatctcttacactgtttattcgtctcttatcccaactccctttccaccctaagaatattcctcccatgctgtgtttgcctcccagggtgcctcccaggatgactaaatagaaagaaaaaaatacttccaacaatggagctatgatgcctgcttttagaattcttttcacatcctgtgttataaatcattccaatgcaatcaaccatattaactgaaaccaggacttctgtacaatcactttttaagaacttaaaattaaaatcaggactattatgagtattttgcagtagggagtacaatatatctgactgcatttacctagagtaagaagtggaaataggtttttgtttttattgttttatttatttatttaatttatttatttattttggtagagaaatcatatctctgtgctatcttcatttataaargaactactggcccagttcatgtaggggacaaacacccacgtgcacaacatacatttctttgcacacacaatctttctcaacaacaatgtttcaccaacaataatgataatgttggtgatgtataatacttatcaaacatatattttggaccacgcactctcacaagtctttatgtttatgatctcatttaatcatcaattacactatacagtcgatattactattaatccctttttagagaggagacaagagctaaagaaataaaatgagccaggcatggtggctcacgcctgtaatcccagcactttgggaggctgaggcaggcggatcacaaagtcaggagttcgagaccagcctggccaacatggggaaaccctgtctctaccaaaaatacaaaaattagctgggcatggtggcgcatgcctggggtcctagctattcgggaggctgaggcaggagaattgcttgaaaccaggaggcggaggtggcagtgagctgagatcgtgccactgcactccagcctgggccatagagcgagactccatctcaagaaagaagaaaataaaaaaggaaaggagaggagagaagaggggaggggaggagaggggaggggaaagggaaaattaaatgaatttactttttaaataaaataaaaatcttagcagatctgaaatttgaacagaagcagtctaacttcggttcttgcctccttaaagaccccatgtattacctcatataataaatatttgatattgatgaatgaaaaaaactttctcttatatcccaacgttttaaaactctgctttccaacttcccacatacacaaccttacaaattatatatatgacaaaaatatgtttttctacctttttgcttcccaaatgctaattcataaaccaggcttagctttctagctcttgttccaggaatgttaatgaatagctttaacaccgcaattacattatgtctcattttaagggaaagaaaatattgagtttaaaatactatggagctctcttaacagacataattaggacaaatagctggtctgggaattttaaaaagtttttaaagtagagaatcataaaaatatgatataaattttctataattctagtaatatattttaacttaatacatagagtatgcaggtttttgcacatctttgatgaagagccaagaatgtttctctcaagtatgtgtccactgaagtgactggagtttcaggttgccgttcttacttacaccatacccatatttcctatttcattgtacatgcttgccagtttccgtttctttatagtggaaacaacttaggaacttggaagcattctgagttgaaaagcctttaggtgtgttgtgattttctttttgaatctttatagttgtatctcccctacttaaatcaagggaaatacattcttaggctctcacccttataaaatctatttatgaactctgtgtaaagctacctgacttcgttttcaagggaacaattccatttttctgcaggtgtcatttctttgtagatattttgttagtctatgtaatttacagtgacaaatataacaggcctaaagagatttgggaagaaaggaaactgacactaggcaaatgcgtaacttacctattgggagaagtatatggaaattccaccaaatagcctattccttgtgatctactcagtgtacactaggcaatttaccataagaaggaaacagcatcagtgactcaataacaatttataaggtagagcttgtgaaagattagcaattaatacaataaggacttttctaagtctacataataattttaaaatctttttttaaatgtaaaatgcttaaagatgccaagatgtaattttaaaayctttttcttttttcttatttgatgggggtgtgtatgtgtgtgtgtgtaaatgtagagaaatgaattacttgcccaattggaagggaccttcaaaagatcccgcccagttctctgatttcagaggaaaagagcctgattgctctgttggatacagtattgcctataaggaaacctgtaggtttggttttggaagtcatcataaaacttaagatatttttaagtggcctaatttgaagtatatagcatttctactaggttatctagataatttctcaattctaatgtttcagcatttgtaacctatcttcaagtttcatgtagacttacgaagagaggcttttggtgctgcttctaattcttttcctccagttagaataaattaatttccaaagcaagtgacacgccagaatgttcactgagtcagaagactggagaattattacattttctgcctgtcagcctatttaattaagttatcaatttaatctgtgatttaaaatatgtagaaagcagagtcataacttgactatattggtgctacctcaaagcaaatttatcaagaattggatgcattatcttcatctacaccccaggtgctagataatctccttaatcattttaaagaataaatttatgttgaccctaccatttctccagtctttttctgatttttcctttgggcacctttactttctttaaaaaaaatgatgtgtatctgcttttttttgtttgttttcatttactcttttcacataattatttcctaagcattcttagattttatcttttagaaattctccagttctcaatattttggcataaactcaaacacagcaccacagcaaataatctgatatgttacttaatgatacatgattttattttacattctgttcgtaacttggttacatagacttgttagaatttttcatagtttgcaacttacttagaaaattttagaaacttagatgccttttatagcacgcaaataccttttgacctccacacatattcgaagatttcccttttatcatatcagtactgcaatgtcaaagtttttgcccactagtaataaaaattaaaacaaattggccgggtgcggtggctcacgcttataatcccaggactttgggaggctcaggtgggcgggtcacctgaggttgggagtttgagaccagcctaaccaacatggagaaaccctgtctctactaaaaatacaaaattagttgggcatggtagcatatgcctgtaatcccagctacttgggaggctgagacaggagaatcacttgaacctgggaggtggaggttgcagtgagctgagatcacgccattgcactccagcctgggagacaagctccatctcaaaaaaaaaaaaaaaaaaattaaaacaaattttctgtaattgattgataggcacacgtctaaaagtatgtataatattgattatacttgttgtattttaaacttcttatctatagcatcagactttctgggcctttggtttatgatgagtgaaataacttagaaccactctagattgtaatataccaaggccattaacagttgtggtagtctaaagccaggattaggtaggacatcctggaaatgggaaagtagactggatgaagataaaagaggaaaaggaagttgtttaaaaactgagtactcagtcgggcgcggtggctaacacctttaatttcaacactttgggaggccaaggtgggaggattgcttgaacccaggagttcaagaccagcctgggcaaaatagcaaaaccccatctgtaccaaaaatacaaaaaaattaggcatggtggtgtgagtctctagtatcagctgctagggaggctgaggttggaggattacttgagcccaggaggctgaggttgcagtgagctgagatcgtgccagtgcacttcagcctgggtgacagagtgagactccgtctcaaaaaaaaaaaaaaagaaaaaagaaaaaaaaacacattgraaaatggtgaatttaccaaaagtatcagttatttttggcttgatatataaaaccgcactttcctccactgtttatcgtactgaaatgccacattttctatttaaaggtggcaatccaaatttggttgccatttaaatagtgtctagggaaatacacttgcattttctgaaatgttaaatataaatatttctattacaaggagagtctgtgaagtagaatgttttatattgcttggtaactttttttttttaaaggaaaagatttgtttgatcatctgcaccataagaagactcaactgcgattttgtgcttagtgtggctcgtactgcactgaaagatggtttcagattgttagttttaagacttttctttaaactggcttttatataaacttaacatttagtatttattatcactatctaagatttcaccagttaaataaaacatttctgagtaccattggtatacctcaatatttaattatattatttttttcaaagttaataggcatggaaaaaacttctgtgtgaatcacacaattttttctcactttgtacatgatttaaaaaacactaccaaaaaccaaaacccctctcccttaaaattccttaatagggacatcctagacatacccatcctttgtagcttacctgctatttattgaaacagcagccagtccatctttctgtttttcaccatttcatgtgtggttagccttggcaggtttgctgcaaacaaatctgattgttggttttaaattgcatgcctcattgaagcctttagttatttgagcaaaaaagtggtaataacttcttacgtgtgatgtgtctgttgactgtaacataattttattctagaatcatgaaaacaacaaagtgaggacctgacttaatgatactaaggatatttttttttccaatagtagaagtgttcacttcagtttcttagctaatttcaataaggataatttgtctctcggcttgaatgttgcttttgttttcacttaaagacctttgcttttgcaaaagctacagcataatagtagcatcaaaatacataatgtgcttattttctgaattcttatgtaactgtgacattgacttataaagatgagttttcagtttctattttaaaaagtactttttaaatgtttactattttttctatatatacaagaaatacatctattactttaaagaaaaaataaaatgtattataaaaagacacacaatttgataattataaaaaaacttgtcttcttcccaataatttatttaaaacttgtaattctcatgaacatgttctactttttcttcagatttgtagattttgtatactgagaacattttaagagaactttgtagttattactagagaataaacttaatttcattgtcaaaaacatttaaaattttgtcttgaaaacaaagtttgacttaaaatttcaaatttgtatggaaacagtccagttaattgttagtttattagaacaacatggctaaaaataaacattactatttcagaggatcacactggatgagattttcagaagcataatgattagagatgcactttaaaatacttatttctaaaagggaatgttagctaagtggcatttttacaaacattaaaaaattgaataatgatattatctctatttgcagatgacatgatctttatatgtagaaaaccacaacaattctacacgcacaaaaattgttagagctaacaaatgaattcagtaaagttacaggattgaaaatcaacagacaaaaatcaataacattttttatatacaaataagtccctagctgaaaaagaattaaaaaacactcccatttacaatagcataaaaaatacttagggataaatttaaccaaggaggtaaaagatttgtacatcgaaaattataaaacactgatgaaaagaattgaacacagaaatatatagaaaaatattccattactcaatcagaagtattgttaaaatatttatactacccaaagaaatatagaaatttaatgcaataactatcaacatcgcaatggtgtcttcacagaaatagaaaaatgcaatcctaaaatttgtatgaaaccacaaaaaaccccaaatagccaaagcagtactgaggggaaaacggttgaaggcattacactttctgatttacaactatattacaaatctatagtaatcaaaatagcatgctactggcataacaacagaaacctacaccaatagaacaggatagagagcccagaagtaaattcaagcatacatgttcaaataattttacacaagggtgctaggaggacacaggtggaaaggggagtctctttgataaaaggtgctgagaaagctggatttctacatgcaaaagaatgaaatcgtatgtttatcttataccacacacaaaaatcaactcaaaataggtaaagactgaaatgtaacacctgaaaccatgaaacttacttatagaagagaacatgggggaaagctctcggacattgaccttggcaatgaattcttggataacacaccaaaatctcaggccaaaagagaaaaaataagtaaatggggccacatcaaactaaatagcttctgcacaggaagggaaacaatcaacaaaatgaaaaggcaactgacagactgggaaaaaaatattggcaaagcatgtatctgataaggaattaatatccaaactttataaataactcttataacacaataggggaaaaataacctgattaaaaagtgggcaaaggacatgaacagacatttctccaaagaagacatgaaagtggccaacatatatgtatggaaaagtgtttaacatcactaagcatcaggaaatggaaattaaaaccactataagatatcacttcactcctgttaggatggctattattaaaaagacaagatataacaaatgttggcaagggtgtagagaaaagggaaccctagaacactgctgttagaaatgtagattggtacagccattatagaaaatagtataacggttcttaagaaaattgaaaatagaactatatgatccaaataagataaaatcaccacctcataaagatatctgcactctcatgttcattgcattattcacaatagccaagatatgtaaataccataagcatctgtccatgaatgaatggatgaagaaaacatggtatgtatatatgcacacacgtatatacatacaatggaatagcattcaccctttaaaaaggaaggagatcctgtcatttgccataacatagatggacctgaagaacattatgctgagtaaaataagccagacacagaaaaatattgcattatctcacttaagtgtagaatcttaatttttaaaaaaggtcgaatattcagagatagagaataaaacagtcgttaccctgggcagagtcaggggaagggtcaggaaatggggagatgtaggacaaaagatacaaagtagcagatatataggatgtataagtctagggtatctaatgtacatgaggattacagttaacgaaattgtattgtattacagatttttgttaaataaggagatttcagctgctcttgtcacaaaaatactatgcaagacgctagataatgttaayctgtctcactatagtaaccatttgactatctgtacatatacacataacatgttgtaagcctcaagtatacacaatrcaaattatttttaaaataagtaaataaaataaaattctacttttagctcagaaaaataaaattaaccctatagataacaaatatgacatatgcatgactatgtatcctaaaattattaatattacacttaaattttcatattggttcataagagatatttatgcctgtgatcagagaacatgggtactagtattaaattatgcattaagtaattacagatatatttaagcacataaaattaagattttctgtttttgtttttttgtttttcaccgtactggttcaacacttgagctatggaatgaagctatttttctttgcagcctgatatttccactttccacctgtctgattttggcaagttatttgtgtctaatgaaagtgaaagtaataatagtacttactaatactttgtagacttgtggttaatatatatcaactttaccattattattatagttattgtaattctagcagtaaaagacataacttttctgtatgataattttacagagtaatttattcattacttacaggtattgcaggactagatatctttatggatgttaggtgtcatgatatttttctaattacaagaataatatatattcactttttctataacatacttttccaacccactgaacaatattttctagacaataatttatgaatctacccacatcttttaaacaaggatagacaactttataatacagatataatgaaatttaaaaaaaaaaatttatctacttatatgtatctcggttgtcgttgccagaacactgctataccctttgtgttattgtttttatatgtttagatatttgtagaagtatttctttcgaccagatatgtatgttgttttgctggatcatagaatatatacatttaagctactaattgataggcttagcaaagtttcctgccaaacattttggattgtttttcctcactactcgtttacccaaaccattactaatgcttggtgttataaatcttttactgttttgccaattttgtaaatgaaagttgtttttattatgttgatttgcaatttaattatagtggacataagtggctttatatatatatatattggttatttacattttgtttgaattgtctattcacttcctttttcaattttgtcctttagtgattttttagaagctctctgtttggatatgttttatcttctctgtgtggcaaacattttctcacagaccatttcctcctttgcttatggtttattttcttatgtagaagtttttatcttcatttagtcagatacattaggaatatccttggcagtctatgaattcatattatttttaaaggttataatttcaagattataaaatagtccctcatattttcttttaatcgtacaactttatacttctgttttttctctctttggagtttatttacttacttatataagtaactatatataagtaatatagttacttatataagtaactatatataagtaatatataagtaactatatataagtaatatagttacttatataagtaactatatataagtaatatagttacttatataagtaactatatataagtaatatagttacttatataagtaactatatataagtaatatagttacttatataagtaactatgtataagtaatatagttactgatataagtaactatatataagtaatatagttacttatataagtaactatatataagtaatatagttacttatataagtaactatatataagtaatatagttacttatataagtaactatatataagtaatatagttacttatataagtaatatagttacttatataagtaatatagttacttatataagtaataaactatatgtaagtaatatagttacttatataagtaaatatatatggcctctgtgttttgtgctcttcgtttctgctgtgaggacagagtaatgactctgctctgataggcagtttggcagaatatgacagatgtgccacagaatcccagaactgaaatttctattccaaccaacaacaggaagagagacagattgtgaactagcacacaaatggagtttttttgtgtctatctcgaataacattcattgaataactaccattagcaaaaatattcattgaataaacaccaggttcaagtgtcacattaaaatattactaaaaataacattttatggtatattaatgttacttttggagtgaaattcctaaagaacatagatgtaaaatgttgagctcttcataaggagtgatatgaagtttttcttccccagatctctgaaactttttgccttttaaaaactagtgttcatctttttaatttcttcaaatatgcttgaccctccccaagttctagcattaaaaaatgggccacaaatgcaaaaaagggtggcagctagggcacattttagcagaatttgaaataggtggtgtgaattttactgtactgaaatcctaaagaatcagcccaattcatttcttagtgaaaaagtccaaattaatgctttgtgccttcagattcaggccttttcttgcctgatcttgtcttggtttgtgtctcagtcttcaggaaccagtattactgtggacatcgccgtcatgggcgaggcccacggcctcattaccgacctcctggcagacccttctcttccaccaaacgtgtgcacatccttgagagccgtgagcaacttgctcagcacacagctcaccttccaggccattcacaascccagagtgaatcccgtyacttcgctcagtgaaaactatacctgttctgactctgaagagagctctgaaaaagacaagcttgctattccaaaggtaggtagtaatgacataccccttaaagggttaaactattttttttaattctcttctaggtctccttcctgtcacctcaactccatctgcagattcatatcagtgactcaggcaaaatgtgttgatcgtggtgacagaagtaataaatatttaaacataaagacttctgtccttatacttgatagttttctatacatagaaaatttatctttttatgttacctcttttatttaatctttcatgttacttgcaaaacgttttctcttctatatgccaggcgcttttctaaggtgataaggatattgcaacaacaacaacaaaacaaagaaggcagaaatccttgctcctttctagtgcagattctgtttaaaattcattgactcctaaagctaaaggttctttactctttgattctcttgaatgatatacttcaaaataccctcctgactttccaatacacaatcagttttgaacccagaacagttttagtcaattatagattatttaaagtaaaatatatccttagtgatttctataaatatatattttatatgtaaaaggaagaaattacacaaacattctttttacatatatggcatgagttttatgaaagtaaattgtaggaggatcctcacccagtttagatctcaatattaattaaaaataagtcatattaaagacaaatcagtgtcagtggtctctggtatattcagcacagttatttatttagtaaacaatcagctatccctttgagctggtggtcagtcagtaacatctgtgcttctgctgttgtgagtctcttctctcaggaatgtgatcttcataactttgtcaataacatatttacatagtttccttccaatatgaaattccctgataaagatatacctaagtataatatgatagtaaggaaatggagagagagattaactggttccttcaggtctcaaattagacctgaggttagtgacagatttaaggcaagaaatctggtatttaagagtgtttgagttttctcttccaactgaattaccttctaagatgcacattcagatgtttaagagacactggaaactatttaatatcagagctattcttaaatcccaaggtgacatataattcacttctcaaaattttttaccttctttggaagagcagaatgtctttgtgaactatgcctatgtggttggtttattaggagtgattagccgcagataaaagtgggttgtggttctgtgtgttatgactgttgctgaagttataggaaaaagaccttcggtttaactttttcttttcttttttctttctctctttcttttttttttttttttttttttgagacggagtcttactctgttgctcaggctggagtgcagtggcgtgattttcgctcactgcatgttggccaggctggtctcaaactcctcgtgacctcaagtgatccacccgccttggcctcccaaagtgttggaattacaggcgtgagccactgcgcctggcccagtttaacttttaaggtcaagaaccactttagagtgttggtgctcatcctagtgatcccagactcttgtctcagtgcagatgatgctacatgtcctgtttaggatatggtgggagaagaaataagaaggggaacagcaggttggccagcagcgtctcctattaagaggagttgacactgatgacattacccatatctctgttgtctaagttacattaatcataagagaagtggtgcattttatgaaagacttgagctcctttcatttgtgaatgaagataataaagtcaataatacttgggggtatgactgtggtgcaaggtgatataaattaattcatgcccccaaacaagtgacttttgaggaagaacttctcataataactaatatgtgtgtataggtgtgtaaatcctgttgaataaatataactataaaattatcccagaggcaattgactctcactcctataatcacatatttgtataagcattgaaataaagaccctaaaaggttggttatgtatttatttatttatttattagacagacttctgctcttgtcacccaggctggagtgcagtggtgtgatctcagctcactgcaacctccgcctcccagtctcaagtgactctcctgcctcagcctcccgagcaactgagattacaggcacccaccaccacgcccagctaatttttgtatttttggtagacggggtttcaccatgttggccaggttggtctcaaactcctgacctcagatgatccacccgccttggcctcccaaagtgctggaattacaggcgtgagccactacgcctgactgcttatttttataatatgcattcattttggtcagagagtcttttattaaatttctgagcactcaaattttagataggtgatattaaaccaatgtaatttagtcaattcacttctaattaaaagcttgtttccttctattatattacataaaatttaagagatataaaatattctgggtaatgaagtcaagtctctttcctagcgcctgagaaggagtttgcctcctggcttgttgagacgagtttcttccacttggaccaccaccacctcggccacaggtctacccaccttggagcctgcaccagtacggagagaccgcagcaccagcatcaaactgcaggaagcaccttcatccaggtggcatacggctcctgctggtttaatgtctcttagagaagttacttgccaaaaatgagttataaattacaggagaaggaaggctaaccaattacatttggttggaggtcagctttgaagatggaaagggtacatggttcaaatgcagagcagtataggggttaacatcagataattaggcttaacatctgttgtgtggccttatatataagtggaaagagtgacttgatgtgatctctgccattgtgaccttagatgggaagggttaagcccaggataaaggtaggtaattttatctrcattgagattcataccgagacccttaaatcaaaagcatacaacttgacatttgcatttgatatgagatcccccagcccagtcattagcctcccacaagaccagctgtcttagcgttgtacaaaagacaaaagagcaaatcaaaagtagatcatcctaagaacacctagatatgttcaaacatttggtaatttaaacttttctgaggatattaattccaatttttgaaagcaacttaaaagccagaattatcaaaactaaagaaaaggttatattaacatctaaaaagaatcttgaagaaaatagctaaggaaagtgcatttagagggagatactgtgtccttttctatttagaataaaaatattatacttatcttactttattcaaattcrttaattgtgagaacatttaccgtatgatttcaggtttttgaaacacatgtataagttttatcaatgacctaatgaatgaaaaaatatccacatctatgtcgtattatatgacagcaatatcagaagtaattttctcctgatcgttagcctgggatataaataaaccaccatactgagactaatagaaatatttcagatgataagaatttaatgactgctgacctttcttttttgattaaaaatttttaattggtttcttccatattatttgtattctaagacatctatagaattggaaacaaactcaaatgtcattgtatattttatatgtcagtataatcccactccatcctattacctggacttttgtaaaacttgtaaatgagacaagaagagattatgtagtgtttcatgaaaatttcctgacggttgaaattaattagaagtcaatgatcaatatttttctctaaaaatattggtcattgacaattgctacagcagcaaatactgataaatgctaatagtattatagttaactattgcttaataaaatgaattatgttttcagcgtgtatcattagagtctgcccattttgccagtgcaacttgctaagtttcctgtcatagtataggtaatgcttcatgatttccttcccatagaatgactctatgaaaaatccactcatgccttctcaaatgccttttattctgttattctttgttacttgtagtcaaatcctatctcccctgcttttctcttctcttagtcaattaaatgaacttgagggtttaaattgaaatgatgacaaggaaggaagttccaaggacttttaagaacttaacgcccaaggatcttgtcattcttctttgtaaaatggatcatccaaatatttacaatagaaataaggaaaatacttacaatagamataaggaatagcatacaattccattcattctcattctctcattcctgaaaatactcgtagatgtcttgtctggacattcattttcctcactgcctaatatactatctcataatctcactgtcctatgaaaagtactgatgtaaaaatctgaaagcaatataattccttcatcattgtgaagaaaggaaattcattctgaatagaatttgatccctttaagggaaaactatttataagtaagtggcagtagtaccaccactaaatacagctagttttggcttgattataaatcacagtcaaaaccttcttttgagttttagccctgaaattgcttcccttttagcccttttatttatttattcctttccatatcttttcatttattgggtttgctttgaggaaggactacattgatcaaaagaaataagaatgagaaataataaaaattagaaacacaacttaactcatattcctttatatatacagctggataatttacccctgggtaattttaaatacagtctggtagaaagcacactggactgagaatctgaagggtcttggccctaccaaccactcagaaatgaaatgtactgtgttcttagaggcaagtcattagcctgccagaatctctgtacccaattacaaggagtcattaggaaaaaggggaactatgacataattggaggggtaaattagatggaagaatacaagtaggtgcttaaaaaataggctttagagaaataggaaaagctgaaataaatcagaccctaaatgattccaagttgaccttggaattgacccctgcctgtgtattcaggcaaaaagaaggcagtaaacttggcaaaagagactgttacctgatcagactttaaggacttagaatggagtcattacggggataataagagcataagaccacctttgggaagaagattgagatcttccatcacaggcacatagataattttcctctgctgtgccagcatgagaaaaccgtgtaaagcctttcctaagctgttctgctttacagaatccaaattatttcatattcatgaaatttaaacaggaatcaggaaataaaggacagcgatgaaaagctgaaaactgtgagggtctcacacagcaatatatgaaagcacctgtgaactataatgcatttatwtataatacattgatttattgtattaatagtaaaatacaattatttagtgtattaagaatgtgatatgactaggatgttatttatcttgagttcattaaatctgcatttattaaagatactctagtgtattttgcaaacttgaaaatgaacacattttaaatgtttttatttgaaaaaaatagtaaattgttgagatagccttcataatatatctttctgatatattaaaacattcagttactgtaaggcattgtctttaaaaaggctacttagaaaagtaaaagtaataacctattcactgtattatgtaatgagaactgcaaacatttgggccacatatacattacataatatttcttcacagtaatcagttagtcaatccagnnnnnnnnnnnnnnnnnnnnnnnnnnnnnnnnnnnnnnnnnggaccagcatcacgagaaaatagtcagtgttgttatctgtttcagatccaaagtttctttcagctcattatttcctaaatgccaagaacttgtgaaatacctaggatgtgctttctgaggaagatgtcaaagaaatatttttatgccttacttaattgcattttataattgctgaaggtcataccacatttcaaatgtcctcatatatggaaaactgctattagaagtaaggagaaaagatgaagttttaaaatacctgggtcagtagttgaagaaaaatctctctgaaatggaaaaaaaaaattgagataacaagtgtcagagtgtcaaattgacctcaacacaaattacacatcttacccattgccgaatttactagtaattaatggatacagacaatagtaagacccatgcttagcattctttcctttgagaggtctattagtacaattttctgaaagtccctttattccacattagcacatgttctggtttggatttagcatgcagtgttctaagcaatgcatgcataatattacttgcacagagggaaccattttagctctggaacctctccaaattatatcgtattaattataagcttatatggcaatctccatgcatccatgagcccataattctatcaattttaggtttatttacaataggctacccagacagaccaagcacatcctgcttacattgccaatctaagattggcaaaagatcaaattgtcaaatcatatttacgtaaattatagattgtacccagtaccaaatttactagtgcttgaaaggacacaggtgttagcaaaacacagaccaagcacttttcccttggagcagtccaagattgtcaacacaactttcgaaattcccttctctcccacattaggatggagtctatttcagattcaacatgtrtaagttttaagcaacacatgcagagaaattttgtcttggaatacctccaaaatttatatcacaatcattgcatgacttacataacattctctagttcagtcttccatgaatctattaattccacatttatttgcaataagcaacctaggcagaccaagtacatcttggtaaaagcatttgctagaggaagattctccattgcctttctcctagttcctatcatcagtgtgtttagcatcagctccattgttggcatgtccctttttacaaattcccttgtaaaaaggtaatttgactagatcatttccgtcacaaggaaataatgcaaaaaaacacaccattatttatgaatgatttcatggtcattcaatttttgaatacagatccaccaaaaataatagagtactgaagtaaacattatgacacttacagcttatgtaaattcacccgcatcttaaccagttaatctgtaagcctcttttagaaaatctgtgaggaacgtaattttagagtacagtgagaaggtgtttaatttttattaattggataataagaaagttatctttcctctttgttaacccagtatgcttgatgagtaactgctatatccctgcaacagagattgtttttacataatctgtttcatcatttggaagtacagtggttctgtcactgaacctgaaccaatactcagattggcaaatctattagagaaatgatggttgggttctggcaagactggcccaataactgatgaataatttgtttaattttcttttaattctgtctttctggtgcttttagtcctgattcttggaataatccagtgatgatgaccctcaccaaaagcagatcctttacttcatcctatgctatttctgcagctaaccatgtaaaggctaaaaagcaaagtcgaccaggtaagtaacttaactggagaagggttcatactgtgagtgtggagttctagagtaaaccagaccttaagcgttgaaatattctgagggtgccctatattcagatatgtttggtttgtctgttctaataaccaattagttattttttagaagtctcaataaccaattagttatttaaatttctaccttatgtgatgatacagattccttcaaagttgttgtatcagatttcctatcttgaactaattagatgcataggaaatcacttttaccatcaaggatcatctgtggtagcatcatctcataatagaaattccaattttttagtgtctgttaaaattatttttcaggagtatgatatatatgaattcaagaaagtgttttatttactacacatgagctatgataaggaatttagatatcaaaattaagaataataaagctttaaatgggaacatgaaatgatatcrgggaagactacctcatttgttcagggtccttgctcacccaaaactgtaaaaggagtttttgtcagattcygtctctgaattgcctttcccctagaagcccaaytaagaacctgggagatttcctctgacctttcctttttggaatctaacttcatggtttcacttctcagtattacagaaaatatcaatgagattttcagtaacttcctgcttagtttcttaatcttctgcctttagcagtttaagagttcatcaaatggttaaaaggaaaactgcccacttcccactgagatatgaaacattcaagttcwggcttccatggcaaccccaaactccaatttttatgtcaccagcctcatgacattgctagaagctctgctggcttgcctcccaaatagctgcacccctctgtctggatccttcacttcttactccatgccaatagtcagtaaatcatgctatgaaggsaagaacaatttgcaggattttggctcacctttctgaggttctcttctttatgggaacctagtccctcagaattgtgtgctttgcctcgatagcttttttgtaccattttattggaattacatcagtaaaatagaccattaaggtaatctacttttccaacaactaatctggtcctctctgctctttagaaatgttcattaaattttgtcacttagaagtcattattgacctgctaataaaattgagctttcatcagggccaggcaatgtaggctaatgtaggcaaatacttaaattgagatattcctgaaggcaaatacggatttgctcagtaataaggagaatcatctgggaccccagcaaggtagagaaactgcatttgagaattccacattaaacccaagactcttaaaggggtgctaaagtgrttttaggtatgtaggaccccttggctccctacaaaaatatatatggatacttttggaagggaagcatcaccagttaagggccatgagattttatcagatcagattcaaacatggagcttacaaccaggatcactaattgcacaaagaaacaccatgagtttgagttaacagaaacaaaaatayaactttctagatctgtaaaagggttaaaatatttaaaytaaaatttaatttaaaaatttacatatttaaggaaaaataatagcaatgagaaaagacataactgcagagcagctaaatgtaacttttggaaatgtagtcaaggaaatattaaatagcatagtagactactgaagaaagaattattaaactgggtagagaaagatcggaagaaattatccagaaagcaacacagatgaagaattgggaagtataatagattttaggagatatagaaaaatgagtctaatgtacatgatatatgtaatcatagttttagtagcagatagaagacaaaaatacttaggtgaagcctagtaaatggaaagaaactcacacgtagatacaaaatagtgaaactacacaacaccaaagatatacacaaacaaaaatcctaaggtctaccagagaaaagacaaatttccttttcagaaaaggcagtcaggctgagagcagagttgtcagaaatactggcagtcagaacacagcagaatattttcttcaaatttctgaaacaatatggtaacctaaaattttgtgcctggcagatgcatcttacaagaataggagtgaactaaagacaatttgaaagaagtcaaaactttaccacccgccaaatctttactaaaggaatttatgatggatatattctagaaagaatatatgatggatatattctagaaagaatatatgatggatatattctagaaagaatatatgatggatgtattctagaaagaatttatgatggatgtattctagaaagaatttatgatggatgtattctagaaagaatttatgatggatgtattctagaaagaagaagaagaagagaaagtttgagatctaatgaaaatgttaaacaaatctgaaaaccatgggtcaatccaaacaaacattaaattcataaataatagtatttccagatttgtgaatagtttttataagattttttaaggacagaactaaaatttcagacagtaataatacgtaattcaagagatgaaatataaatttaagtgttctaaatccatgtgtagctcaaaaagggggttcagatgaggaaactgagggaaaagaaggttaagtaatttgctttctctgggtcatgcaattaatcctgaatactttcttttgtcctaatgacttcatactagaaaaaaatgaggatgacaaattgtcataatttaaaactaggatattttgggttctgtccttgggtgggtacaagataatggaagggtttggttttctcttcctgtttcttcggttaagtaataacataaaaaatattgaataaccaacatgataagatcaagaagctgaaaattatggttagggcagaccctggaaatatcagatcaagtgatggaacagcctcatattcctgtgtcctgatccccagtttgtatgactkcactctagaagaaagagcaaaggagcaaaatgtaaaagggaaggaatgtccacataagataccacatgggcaggtggtaggaatgagagccacaggcatagcaagagcccccttccattcttgccatcaagtgcataaggcatttctatcatgatcattttggagyggattttgcattgtggcatctttagacagctgtcacagcacagctaaaagtttataaaataacctatatcccaggcatgctgaatccaactaattaaattcctaaagttcagccaaaagagacaaacacatctatcaagaatcagagagcctaaagagattacaaccctccctaatcagatgggcccttctgctttaaaatccttgcttccctgtttgggttgatggagctaagtggttgtgacwtgtttgatgcagttgactgtgatgcatcctggttttccataaactccatggaaagaagctgggaagagccccctcgtggcaaagagtgtaagcaaatggaatcaaatgaaatgtgaagagagtctgaggaaacatgtagcagcaataggcaatgaggcggagrgaaagcgagtatgaagtaagaagaggcatacagaaagataaataccctgtttccagagagggctaatgaaatctgttctttgcgcaaatcaagtaaacagygtgtcctctagttcagtcaatcaatgttaattttaaatagctgaaacacaaattattatgcagttactaatataaaataaatgaacgaaatcacataggactcctttaataaaagcttaaaagcaggagattcaaatataatttgtattttcaattttgctcttctagtatgagtcactgacattgtggagctaccatgatattattctgctttaaaaattccttgaatttatcgttactgtatttgcagtagtcctttcccggattcttgtaagtttggctgccgactgcagtgataagagatatctctacacctataatctagactctgtttttcctatacaaaatttgaaaatatagagaactttaatcatggtattgtgattctttttctttggcattctctttagatgcaatttctgctttggaaaaaatattcgggctatccattttcacctgggcatggaaaaaaagagatgtctttatcagacaagctggttccttttttgttccattaaaattaaactgagagagttttatagcacaaaacagatggattcacttaaataattcccctgtagtattgtttattttctctctttgattgcccaaaattccttgtgtcttgacacacattttctcatgctctcaggaacaaggaattaaaggccgaattactcaaaggagttggcattttagactttatttttaaaattatatttttaattttttgtttttaaatgttttgattttaagtatttcacattaggacagtttgaatcattcaaaaatttatatttcatgagctatgtcttcttcctggaatctgctaaaattactcaaatatgaagtgaagataaacattaatatacttgagagaatgcatgtttatcggaatctcttcactcatgggtgagtgtgtaaatgtgtgagtgtgcgatgtaaaattagatgagattttcaaaggttttaacggtcatccctctaactttagacatgattacattgaaagcattttagaaaattttaaaaacttccaaaggttattcatccctattccttagactgtcctctttctgtatctgaaataatttatttatagtttatcctttctataaagaaaatttggttattatctgcatttatctccctatctttttgaagaccgatacggtcttcaaaatatgcatgcacatcctaattctttctgtttttaaactttaagtaaactaagataatgcacactaggaaaaatagtagtttggctttggaaaaaaaaaaaagagaacttatacttttataactttagcttctcacctgcagaatagaaatatccatgcttctcatgattgttgccaagagttacactttttttatatttatttatttatgtattttttgtgagatggattcttgctctgtcgcccaggctggggtgcagcagtggtgggatctcagctcactgcaacctctgcctcctgggttcaagcaattctcctgcctcagcctcctgagtagtgggattgcaggcatgcaccaccacatcaggctaatttttgtatttttagtagagatggggtttcaccatgttggccaggctggtctcgaactcctgacctcaagtgatctgccctcctcggcctcccaaagtgctaggattacaggcatgagccaccgcgcctagccgagttatgcttttaaaagtgttcaaaatatgtagacaaacactatagaagcagagcttctctcttacaggtttattttaaatttcatcccaggcagtaaatttgatgtcttaaaatctgcttgtttgtttaaatttagttaatccgtgagttccaagaactctaatggttgtgtgaattttaaaatgtgtgtttgagagtgaattgcatgtatctgaagcaatcagctggcagctactaaaacttagcaatgaaaaaatcactcttctcataaattgccttcagaaaaaacagggtgtcaagacagaaatggacaatgttctcatgggctttgaactattgttctgttaaaaaaaaaaaaaaaaaaaactgtgtagaaaactgtcccaaaactcacagtttactatgagaacagctaaggaattgcctaacacagtgtctatcaggaatctctttttcttatgacacagcaattacttttaattgctgtttttgcaattacttttcattgcaaaaaccacaattacttttgcaccaacctaataaaactttgccctggccctacccaaccctatccagacttgcccagcaacctctctgaccacgttccctgcccctctttttgctttttgctaagctgccagccactgacctcctgactgctcctctgacatcccccaggtatgtccctctttcctgaacatgctttccccagctacttctctaaatgtcttctgtatttcatgaggcctctattcaaattttacccacccccaccctttcccagccagagaggccttctcagtccatcttatctaaagagcatttctgttcttccctgccttctactctgtgcattgttttcttcctattacttgaatttaagttaattttcttttttattgactttagtttttagtttctgtctcccctaaaaaagtgggagctccrttagagcagggtttttattttataacctactccatccgtggagcaagactcacaataactacttgttggatgaagaaatcattgagatactcagtacagatacctcggtaaactttctaccacatcatactaggattcagctccttaacggctacagtgcctttctaagattatctggagtccctgtctaaatccaaaaagtggtcaaaactagaccaaccctttttaacctttacatcagagcacccatatatgtgtaatagtatttgtgaatatcgtagcattagagaaatgggaagggatttcaagtttgaaaactagacttcctttattttataaaattataataagaaaaactaattatgagctattagagataatattaaaaattgagttttttctagagtttccaaataaaatatttccttttttaaaaatattttcaaccattaaataattcacagcaaacttataacccacttgctgtgcagaatcatacattgactgggaaattctgagttaaaacctttgtgaacttaattttttgttttgtttttggctcaggatactatgtaatgtgaaggtttgtcgttatctttggaaaaataaatgagtctttttaatagacgtagaaaccgaaataaaaaccatcaggcatgacgtaaggagcaatgcaaacgctgcctaatacgccatgggttttacttcccccttggatagtctctgatagaggtactggtttataagctgcattttactaagagtagctgggtttactctatattctcccatgtactagtactgtgaccttgggagggttttttaacctctctgggtctaagtggtttcgtttgcttagtataaaggctgggagggggttgagctgctgattaggaactaacaatagatatgttgagaaagaactagaaggggttgctgctcttcacactgaagcaaggggagagtgagatttctcatctttaacaacaacaacgacaaaaagaaataacagcgccaacaagaaattraaaagaaaattacacacgaacacacaaaatcgttcaacaaacttaatattcttttcagtggaccagaaaacctttggtatgacaactcaaacttttgaggaagctggatcctggaagcaaactttgctgtaagccagctgccagctaaccacacacataatttgatgatgtgaaggtggatggctgtaaatgttcctaagtggtgagaaatagacaacgacttttaataatttcatttcatttgccctacattacattgttcagccataaaatcatgaaaaccagtaagcaggttgttaggcagaagttatttctctccttttttccattttaactgcaggctgccttctctgtgtttgggagagagtaacttcaaaagacatcgtcctggtcttccaacagccacgttttgaaatctaagccagtatcctgtaaaattcttacaatctagagtaaatacagacagtttggcccaaatacccatacttgaaatggaaactttaggtctattgtttgctctgaaatggattatattacattttaaaatgttttcttcaaaaattattttgatcaaagcactctttcacaccgaaaggtcttatttcactgaaactgcgaatggttaagaaggttaatttcctctcagtaatgcatcttctgtatttacatattttaagcatctgatgcctgctgaactctgcccccagatactggttaacgtttaaaacaatagcagatcctgttcctgctaaaaccttcacaacctaagagaaagtaaacacatgagaaaattttaactattatttccatgtcagaatgacaagaagaaacaaaaatgggaggagaaaataatatccttctgtcctgaagttactccacgacaccagggctttggctgtatgtgccaacattgccactattttttttatgatgattcattcctcccatttaatgctgtggagacaccccaaccacactggcttcagatgttggtatgtggaggaggccagcccggtgacctgagcaggcacgtggttgttactgagtttgtaagagtccaggtgaagttcaacagttgcaattttgcattttaaagacatttgtttagttacttaactctcattctttctcaggtgccctcgctaaaatttcacctctttcatcgccctgctcctcacckctccaagggactcctgccagcagcctggtcagcaaaatttctgcagtgcagtttccagaatctgctgacacaactgccaaacaaagcctaggttctcacagggccttaacttacactcagagtgccccagacctatcccctcaaatcctgactccacctgttatatgtagcaggtaaggattttttatgaactgaagtttaataataaaamygatgatagttttcccctagaaatacctaccaccagcccacgcagcttggggtaggtttgccaaagtattagacaaccaagtataggataatgtgatttgtgttgaataggctacaataaaaacttatgttttagtagttttctattaatgaagtttagaatccatgcagttcatacagccaatctttagagaggatacaaaactgttagctgtatatgttgcctgtttgctgatggggaatatagaaaatatataactaaaaaatgatatcaagtattctgttgtaattcttcattttgttggaatgtttgtacttgttctccagggaatgggttacattgatattaggcatatttaattgtcagtttgcatttcccatttttgcaattttaaaatgtgwgaataatacattgcacaggatggctggactcaaatagttctctgaatgaaatttaagcaattgtatgtgctattctatcatgttgaaacaaaattacaaagtgttatctatcacagagkttaagaaaaaaatggcctagcatggctggagtaattattttgccaatgttgtcacgaagaaataattatctcttcttactggttaatgtatttttattgttcttcagtaacagcttgaataatttatcttaaagcattatgrtattttttaagtagaaaaacagttgagtgtttttaactatgagagtaccttgaataaaacagtatttcatttctgaggttgatgaggataactatttgaataaatgagtaacttgttggttttctagtatcaaatattacctcatagactcagattttttcattgtattcagctttaagaaatagcaacttatattaagcctcataattttcattttcatattttttactcataagttctgtaaattaaatgaatgttatttataatttttatttttacctcctttatctttaccggcatttttacatgagaaattattttcattcgtttgcccagagccaaagttattctactatgcaaaagttattctgctgccctctatgagttttttaataaaataatttctgcaggatattaatctcatctcttttccacaaaagagcaagttctgtagtaaaatattcagaagatatatcatacatccctgttagaaattcacaacacacatggctttattaaaacctctgagaagctctgttaaaagaatccctctttatttatttttgttgtttcatttagtgttttctgaatttattcgaccacagaaccaatttctttgggttaacacccaagaattgcccatggatcgaatgtttggcagaacacaattaagaagcattgttttattgtatgcaccctgagccaagatgaagcccagtggagtaatcttcatcaaggacatctgggttcagcatttttagggagagtctcccactgtgggttccggacttttgggaaataagtcccctaaagaaaggagagagatgttcagaaaagctctaccactcacgcagcttttttcatcatagtgtattttttttttttttttttttgtattcttagcaggaagaatgtaatgggatttgtataaaaggtttcagagaaaaacaagaggatttcactgtctacttgttcagtaatgtttataaatccagtagtgtgtgttttatttgtttgggctttataaatctgtaattcaaaccaggttttattattgccttaaaggcagccacccatgtaggcacagagagctccagaaacacacaactaattgttgtggtttcccctgctgaacttgaagagtttggcgttgaatcccagtctcttggctgctgtaatgtctatgcaacaagctatttttctggcatgagagctggcatatttgaagtactaatttaaatggtccttttaggtattattttgcaatgaaaaagtttaaggctaataaactcgacttctcctgagcttcgtctgagaatgtaagcctaccaattgcatctcctttcttttccctttttgtcctatcattttctttttattctctaacccaaactgacagatttaataattagaaatattttacaggtaacgtttttctatttacactcaagggttgaaaagtaaarttacttagtatgcagatacggtctacctacctcttctcttagtgcacacacgagcacaattcaggaaaaaaaatgatgagttatttaagatattaaacaataagctatcactacttttttcattttagagtgggtagtctgtggttaaataacaaacaaaaaaatcccctgagaccctttgtaatatcagtcagaaggaaagaacccagcagcaaatgcagaatcaaaatctaatcatgaagtttctaaacaagacagaagagggaagagccagtttatggcctgtgccaggccatttgtggggttactgtttaatatttaaaacagtcaaacttcattcctccaacaccctctgttagagggcattgctcacctctcttacctttgtttttcttggtggtttacggtacttctagggcctgtttctctcaaccagcatcctatgtagtcagtcatcaaaatgcacccctcttttgttcatttccttagggccttaacaagtaactgatcgatctgaaaaaaagaagtcaatttttattttttagcaaaacataaaattcatatactatcattctatttcaacctatgctgtcttaaagttctgtttagacataaaaatatcataacccaattaaataaaataaatctaataatgaggcttttttttttttttttgagatggagtcttgctctgttacccaggctggagtgcagtggtgcaatctccactcactgcagcctccatctcccaggttcaagcgattctcctgcctcagcctccccaagtagctggtattacaggcatccaccaccctgcctggcaatttttgtatttttagtagagatgggatttcaccatgttggccaggctggtcttgaactcctgacctgaggtggtccacctgccttggcctcgcaaagtgctgggattacaggcgtgagcccataatgagcttttaagcagcctggcccataatgaggcttttaagcagacagaaaggtatttattggggaagataacttttgtctaaatataggtcaacacctgcaaaatggctactataagtaggtagcagcctataccagtattctctaaataatctaacaaaattttaccatcactttcacctcaaatatgatctagataaaggaggaggagaatgagagtcaaatgaactttctaatcctttgtattgattactctctcacaaaaaagaaagtagtacactgcatatcagcatttatgtatcaaacaaaatgcatattttcacaaaacaaataagcagaaggtagaaatatttgactattgttgtttatcttaatgtatacatagatggtatgtgcctatgactttttgaaaagaggaggctacacctatagctcttccaatattttttagctgtggcagaccatattcccaagggaatcctgctgatgagcccctggagagaagtggggtagccactcggacaccaagtagaacaggtaattcattgttttggattctgttgcccaaaatggaaattgccttatttttgttttcctgatcaaaacagtgayctacatttctgatattttgkggggcgctgggagayggggtctcatgatgttggycaggtcggtctcaaactcctggcctcaagtgatcctccygcctcagcctcttgaagtactaggattacaggcatgagccactgtgcccagcctgattttttaaattatagatttaaaaggacaagggagaaaattaaaatcatctgtactcctactctctagagttaatcattggtaaagtttgggtgcaaagctttccaaaattttttaatacatttatacatgtgtatatttttaaaacacaagaggccattttatataatatatagaactatatagaaatattattttatcttgctacttctgacattggaagtactttaagtggttcccaaaacatagcaaatactcaataaacttccttcagkcaccttagtcagctatgagaaatgtcacagttgctcagagaggatagacttcagactctgggtgtttactgattggtcttttagttagcacagtttactgctgactgaaatggcgacagtgaagaaggacagatgaggaaggaagccacaggattccaagaaataggattggatacataggattgcccatgctcccaagcatatgccatcactctgtgctacacagagaactttattcctgggtgtgtcaactcagtttctcccacctcacgtgcccgttctagagtgttttagtcactcagtggtttaatgtatagggagagaaatagagaaaaaagaaacataaagctgtaggatttgttaaaggtatgaactgttgatctaaaaaatattattgaggggttattgaatgtcatgcggattacagattataatttccatctgttttactttgttaagagatgtgtgatgttctccaccctatgatcctatgttcttggagtgctcaggaaagcagtatttccctaaacactatatttaccatatgcatcttagcaaaatttgcttaaatgagcccyctttccccattgtagatcttgtaataagttgttctcttttaattgtagatgacactgctcaagttacctctgattatgaaaccaataacaacagtgacagcagtgacattgtacagaatgaagatgaaacagagtgcctgagagagcctctgaggaaagcatcggcttgcagcacctatgctcctgagaccatgatgtttctggtagtcccatatcacttaactcactcatttacttgagagatgagcttctgttacagatattggctcagaaatgaatctttgaggccaggcaaggtggctcacacctgtaatcccaacattttgggaggacgaagcgggcagatcacgaggtcaggagttcgagaccagcctgaccaatatggtgaaacccctatctgtaataaaaatacaaaaaaattacccaggcatagccaggtgcagtggctcacgcctgtaatcccagcactttgggaggccaaggcgggagtatcacgaggtcagcaatgagttcaagaccagcctgaccaacatggtgaaaccccgtctctactaaaaataccaaaattaccaaaattagccgggcgtggtggcacgcacctgtattcccagctacgcaggaggctgaggcagtagaatcgcttgaacccaggaggtggagtttgcagtgagccaagatcgtgccattgcactccagcctgcgcaatagagggagactctgtctcaaaaaaaaaaaaaaaaagaaattacccaggcatggtggcaggtgcctgtaatcccagctacctgggaggctgagggaggagaatcacttgaacccaggaggcggaggttgcagtgagctgagatcatgccactgcacaccagcctgggcaacagagtgccactctatctcaaaaaaaaaaaaaaaaaaagaaattaatctctgaaacatgagatttacagatgtatttcatccggattaaacatgtattacagcccttcccatacatatcaatatattttttctctttccaagcattattggtctcttaatggttctattatctggtgattagaagcataagtatttatagttatacaataattgcagatatttattaacccaatcaaaaagtaaatataggaaaatgtattatttcattccttaaaacaatattttataaagaaagaaaagaaagatgaaggaagggagggaagaagatattcattgtcttagggcatctgctggttttctctagtatctccttgacttagaacatgaaccaatatttgtttttcttgtcatattktcaggcatatattggcactagccacctattaaaatattctttaatgattacttactttgtgtatttaaaaagatccatttaaggaggatggaagcatatatttgagtcagcttcattttggggaggtggcaagtggtagaaaactgttgactctcaagtgatcatcaatggctgctattatcatttttcttttactgtatttactgtttgtatttctaagtcagagagatcgtcaggtaaaataatgtatatgtttccctatcctcattctctttcttcttttttggcaaatgtactcttaagaacatcctcgtttgggaccaattataaaaaacctttacttttacgtagtacatgtttctcaagaaacagtaggtcacatgaaataaattaaaatccctaaaaaatatggcaattgttattctataggattaatgtccattttaaagcattaatataaacttrattaataatagtaggaatgatcaggtcctactactcatggatttcttttgagagcttaatttaaggagggaaccctyatctcagaaaaatttacatgactatgtagagatataaatttacatgtaatttcagaatattctgaagtctttaaaactttatttaagaaccttgcagtagtcccaaagtagttatactaacttatagaagaaacatccgtgtttttgctggagtgtatatggaccagtgataggcaagcacctaatagtgcaaaatttatatctgaaatggcatttgttcctttccttcttactttggcgtcaatgtctcgttcatgttgacttttttaagcaaagatcacttattcaccttggagttttaagtcatttatttccgatagccacagttgttattgaatttagcaaagcacaaattgccctgtagaaaaactgcatgctgtttaagtattttaatgttaaacattacaggacaaaccaattcttgctcccgaacctcttgtcatggataacctggactcaattatggagcagctaaatacttggaattttccaatttttgatttagtggaaaatataggaagaaaatgtggccgtattcttagtcaggtaagaaatgcattcattcacactaattkaaatataggaaaaacagttcctttgttgcttaaagctctgtaaattcttgacacttgtggataggtgttatgtggagaaaggaagttttagaacacaacattctgtagattccttgctgtgtgttaacaaaagaaactggaacttcaagtgagtcgartgtcatattctacaattaaaatatgatatatttttaaagacaaagtaggtggggatagagatatatagacaagggacaaacgatctagaattcatagaattaagcaaaagaaaatctgacacaagcctctaaaagaagaaaactgcctatttagagatactaatttattgtctgtaattatttttgatgactttttaaaaacttttgaatattacagagcttaggccttatcaaagataatacattgtgccaaaatgtgtttcctcctagtgttatgaaaaacacatcacatagagttatagaataatactgttgctgcataaccagcctttgagtattgttttctttaggctagactactctcaaggcttttcacataaataattacttgttttgctgaagaagaaagaaaacatgtagaaattaagaatttgaaaatgtttgttttaaaccataaaacaaaatgatggatttgctgtactatggaatagctatcgaaatacacacccttaattaaataaagaggatggtgygataatatgtatcagcttatcttcacatgttttaggtgtattcttataaatttgaataagtatcacagcagagatagtaaagaccatcaaacttgtgaatataagacttaggtaagaattcaagacccaacccagatctactggggccactaacacttctctgcaaaacaatagaagagaaatcactgaaatgctgatttctatgcagtgcatcagagatgagctttctttggaccactcaacacatgtctcaatgtggaacttcgtttggggtgagaatcctaatctgtgaagattgaagggaaaagatagcaggcctttcttctagtgtttgattctacaagcacatatggctgtctagtctaggggtacactaacattattgatggaatataagacacaaaattcttacaaagtctgtaaaatattcaattattgcctctgctagactctattctgtccatcaccatgttgaggaatataatggcagcccttgcactttgctaggagttgagagtcctgttcctcttcccttcctttcttcttggtgctaagcaatgtctcttacactagctgatcttcaggacagatttaagggtagctgttcagtccaattcaccttagcctcatactttagggatccccctgggagattgtgtattttctttctgaaacccatggaaaactgcaactttgagggagtgatctttcctgcaaataagcctgtaacggtgccacaggatgtggcaatgagtcaggaagcattttctctcttgwttttatttttttgctagggagtgtgttccctggtatagagagacacatctcatctcattttatatttgatgtatatctcacagactctcgaaaacttaatcttcatagtaactttagtgcaggttttttttttaaatatgtatyttatagaagaagaaactaaggcttaaaagaggctatgctactcttctaaagtcatatagtaaatattcaacccaggattccaaagcagatttatccatatcagaagcctagggcttttacattcattcaattgcttctcatatcttcataaaacaccttgacttattatgtcttcaagttctccaaatgaggattcatacctagtagaaaagtggttatgatagcagtcagttttacagcacaaatgacagcatacagaatttcattacaggtaccaaccactcccttgaagttctgtgagctgggaatgggagaaaacaatttgaccaaaattgctacaaaatattttctaagagtcatggataccagtagacaataaaaagattaaggataattaacaattagatccatgcaaaattcaataatgtatcttttgttccaatcatgttccaaaaacagagtaatatattgatatatgatccttattagtcactgtttatgttcctaatttcccagacattaaactttgaacaaatgtagtttcatatgacttgctaagtagaactttttgggatttttccttttatttgagtttataagaacaaaaatcatgarattttcattatggaaaatatgtatatatttttgccatagtgagactttaggacagctgaaatgaattaatgtgaacattccaataaatcaccttttggctgagactaaatggaaaaagtctcatttcaaaagatttttaaggagacatgtgcaatggaaataagttctcagtttcaatatacagcctgccttttgatgactatcattttaaccaacttaaaaggacacccttcagattttgaaaaggcatttaatgttttccgttaccgatatttacctagtttcaccactgttctctttatgtctgacatacacatagggatgtttcataagkctttgtcttcttttacaggtatcttacagactttttgaagacatgggcctctttgaagcttttaaaattccaattagggaatttatgaattattttcatgctttggagattggatatagggatattccttgtaagtatatgtgatttgtgaaataatacttttaaaatatgtcgaatttgctgtgggtaaatgggatagtgaatcattagcaggtagcacagaattacacatggtagacgctcaatatggagacatcatatggtgattaggaaatatcgcctgtgtgttagaatcctggcccctttacttttcagctgtgtgagaccctagggtttacttaagctctacatgcctcatttcttagttcataaaatgagaattatagtacctgattcatatgattgttaggatcaaataagattataattttaaagaggttattttagtgcctagcacacagtaagtctgacataagtccactttaatatggctattttttggaaataaataaatactaaatttattgcccatttaataacccatcccttttattgggtaaattcaacttttgttgtggcatctgaagagttaagtcactatatatgttttctccacgtaagataaagttggctggcgtttagagggacaggaggatgatggtctgatgaataaaatagaaaagacatatggaagtggttatggaaaaatgataagaaacacttaaaaaatcaggtaaatggaaagacccaaggaaaacacacaatcaagtattcaagctttgagtcttgtgggaataagtttcccatttataacaacaagaaatcggaacacagaggagatgttaaattttcattatgtagcatttcaggaatcatcgattataacacataagtaaaatggtcctatagtgctacgaaatatatggtttgggagacagtgtctataggtcgaaacagggaaattgtggagatgttcaaaaatcatgtaacacatgaaggaaataaatatatagaaagaaaaataatcaaacataatatattgatcggaacatgtcttggaaatatgttatttaaatcatattttagcttttaagcttttaaaagttttaaaagcttttatatttgcttatgcacctcagacttcagagtcccataactttttcktaattgtaaagagctgaaattacattaaaaaataattaatactaataaaacacaagtatttccaggaaggggtatcacatcaacttagggatttattatgagcatatttattgttttcaaaatcccatccacctgctacattggaatgaatatacacagctgttagtgtrtcatagaaaaagagaatgaaaaactgaatctacaagtgagattttctgaagaatrtgggaccaaaatacagacagagtaaggcagttggagtacgkgaaagaggagctcaacagtaccagggcccctgggaacatctggctgacaaatccatggaagttggaagagaaacatgaaaaaaggggtagttggaaaggatctcaagataagccttgctttcttaatacagttttcccagggcccaccctggttggatgccagtgattgacctaagtgttcacgatttctcgaaggtcaaggagttatataaataaacttttatagaaaggaagacactaaaaacactaaggaacagctaatcactagactgaatttccaaattcatgttatattttcaaatgtattttaatgatgtaattagccatagcaaagttccactgagttcaaattgatactaaactccayagacataactaccaactttttcacaggtggtatatcattaaatcatagttgaaagatggcaaatgtttaagtacaaaaataagttttcagattctaagatttattattcacttttatattttcttattacatttttatatgttacaagtaatagatattttttacccctgaaatagtgggttctttattccaggtgaaaagaacttgttgtaataaacctgcttgttctattagaagtcccagatagtctccataaagggaatttatttacatcttctcataggaaagctctagcttcatttgtgatcacttttatctaataatatttcatatgtgctgagattgtaaattaatatgaatatttattaaaatcttcacttatcattagttataatcagcacatacaaaaatttgctgtatacctacttgttttaatatttattttggactatatttctaatggtcctatctaaataaatccttagttgaaaagaagcataagaggaaccaaagttaaaatggggttggtttaactttaatatgataatgtgtgcaaatattagaaactaaatttcttattatagttctaagtgtacctttaacggttttcaagaaaagagggtaagtaggaaakcttttaaatttgtaattagaatccttacaaaaattgaagaatctagatttaaacagagaattaaagtaatttcatggtagtagcaatagaaagacaagaaatatggtcaactcaataatataaatgtgataaaaatgtatttgttcaatcaaacttaggataaattaatgtatggtgaatacccaattgcataaggagataaataatgtttggtgtcattcatagtccctttcagttgggcattttacttaataaaaaatccattcatattcattcatcgatccagttatttttgaaggtagtttttattttcaaagagtttcctctctaaagcatattctccctaacacctctcattctgatttaagtttgagaagtggggagaatgcctcagaagtacctgtgatcatgtagctatttcatggcagcaatgagaatagtcctgctcaacctatatttagttcagttcaattcagctgtacatgatgtgcccactgattttaaagctagatattgaagtgacatggtacatgctagaggggcagaactaccagagtattaactatattccaaaagaaaaaaaaatatttaaagtgttacctctattctttattacttctkcttaccctatggtgcataggagcatagacaaaattttaaatacaaaatatataaatttggatcttaaaatctgtgaatttacatacaactccaaccctccataccagctcacttcaactctgtgcttgagggaaaaggagaaagttgagaaaacaagtgtatcaagacggaagagggagatgggcggactctgggaaagaggtagggtgtaccatgtgctagtgtatgcatgtgcgtctatatgttattaaagagggcgagggggttgccacatgagtgaaggtgtcatcgagaaggctaggggtttgtccaaaatgcagagatgaaggaagaagtatgatgagaataaggataaaataaggatagctctgatagcatttcttatccttctcagttgcctaccctggccagaagaagaagaggaatctttgagcatttttatgtattacatagaaacctgtcagtaacttacattgaccttgctagcttctttcctgggtgtctttgctcctgggttgggttaccagagaattaatgacaagaacaatggagatgccagcacttggcataatactgagtacatgctaagtgaatatttgattaataaacatgtcactgactgctaacaggacagatggttttctattcttcaatctaagtgattgatgacagtattattctcctacacatacacacatataactagatgtatatgtttagataagcagctggatttggttagtgatttttttttatttagtacttttaaacctgtactcgaaagcaaaaggaacatgtttaaatatacatactgtctttacctagtttttaaatcaagattgtaccagcctcataaaatgagtttggcagcttttcttcttgtattttcggcactagattatttacttaggattaattgcttgttgaaagtttgttttttgtttttttgtttttttaaaataaaacattacctataaagttttctgggcctgggccttggggtgggggacagggtggattagagctcaaaaggattagagctcaaaagctgcaagttcacctggaatagatgttatcaattccttaccccaaacaggctctgccaacactgtgatactgccccccatccacctccgtactgctatgctcatgcacaggtttctctgacttgcaacaataatagtaactactggcatatagtaatcttcccagcttgcaacaggagaagataatttaagaagctggcttccaacatatctcccaaaagtggaaccctactcccagactgccattttcctaccataacaggtcattactatcttctaccgatggaggcagaagatattttattttattcttacaaatccagcattgattctgggagaaagctggtgatctatactagttctgtcttgttctacagcagcaatttattttacatgaataatgtttacacaaattacaaattcaccgtgtatctggccctttaaaatatatttcctaatgtaattgtcacaattgtaccatgaatttggcaatattattcccgtatttttaagataaataagactttttactctgtcttatttttaagataaggaagtggattttaaggaactcacccaagttagcatggataatattatagcagaggtaaaagcacacctgtcccaaatccagaaaattctagtatgatcaatttcataaatagcccaagtacagacataaaatatgatcgtaattctcttgcctgtgaattatttgtaaatgtaatgggctcatatcactggagatgggctatactcagggatatagatgtcaatcttaataaaattgctctttcaagtaccatataatattattactcatatttacgattgacacaggtatacaagttttgctattttctcctcaggaggctaggatttgagcctcctcctcctcctccttcccctcctcctcctcctcctccccctcctccccctcttccccctcttcctcttnnnnnnnnnnnnnnnnnnnnnnnnnnnnnnnnnnnnnnnnnnnnnnnnnnnnnnnnnnnnnnnnnnnnnnnnnnnnnnnnnnnnnnnnnnnnnnnnnnnnnnnnnnnnnnnnnnnnnnnnnnnnnnnnnnnnnnnnnnnnnnnnnnnnnnnnnnnnnnnnnnnnnnnnnnnnnnnnnnnnnnnnnnnnnnnnnnnnnnnnnnnnnnnnnnnnnnnnnnnnnnnnnnnnnnnnnnnnnnnnnnnnnnnnnnnnnnnnnnnnnnnnnnnnnnnnnnnnnnnnnnnnnnnnnnnnnnnnnnnnnnnnnnnnnnnnnnnnnnnnnnnnnnnnnnnnnnnnnnnnnnnnnnnnnnnnnnnnnnnnnnnnnnnnnnnnnnnnnnnnnnnnnnnnnnnnnnnnnnnnnnnnnnnnnnnnnnnnnnnnnnnnnnnnnnnnnnnnnnnnnnnnnnnnnnnnnnnnnnnnnnnnnnnnnnnnnnnnnnnnnnnnnnnnnnnnnnnnnnnnnnnnnnnnnnnnnnnnctgccagaaatttaacacctacccaggtgctacaattgccacattgaccataggtttcctctttcttctctgactagggaataggtgtttctctcatattctcattgtcattcttgttctctcctgtttctctcttctccttattttaagtattatgaagaaatgtaatctcttatactagagaaggaaacagtatcatggttggttagcagaaatacaatatataaagtataggtatttacaatatgtaaatacaatagaataaagcatactaatcagtgaagtattatgaggggtctgataaacaaaaaacttggaagaattgcacagaaaaggaaggtgagccaagagcacactgggcacgtggttatggtttgaaagaagttgaactgcacatgtggagtatgacccccttcccttgatgatggcattatgaccagatggcattatctggttaatggcatcatcaaccagatgatggcattatctggttttcctgtaggttttaactcttctaaatggcttagcttcctacattattatacaagaggcttttctttttctttttaagtatttcttagaactatattctgaaattagaatttctagatcagagaatataattgattgtggctttgaattttgcttgtggatgaaatctacatataaaagatatgttattgcagtgctttaagattgatacagaaaaatggtattatgttctattcccagattatttttgagtaccatctatcagagatgaaatattatgtctcatctagttgaagtatgtcatagctattacatttattctcattctctgcatagttttatgcaggagcatgaaaataagtaccagagtaaacattacacttttttcacacagtatgtttcctatatacatagtttgtagtcgactgttgacacagatttttccacttcagatacctgcatgcataataaatgttacaagtaaggtttttttcttgttacgatggatgttatggagttatggaagagtaatcaaataatatttgtcctagaaagtttggccaactttcatggaaatagtaaaatgttaggactaaactgtttgtccagtagatggcactcttagttcttggaccccaaagttcataaactgatgactgttcctgttcactggttacagatcataacagaatccatgccactgatgttttacatgctgtttggtatcttactacacagcctattccaggcctctcaactgtgattaatgatcatggttcaaccagtgattcaggtatgtacgaagtgaatctgcactgccttatgaaagatgggaacaagggtgtttttgtttttgttttttttcaaaaagaaagaagtcaagacaaataatgtcagtacttttttaaaaasttctttgactctcattttctcttctcagattctgacagtggatttacacatggacatatgggatatgtattctcaaaaacgtataatgtgacagatgataaatacggatgtctgtctgggaatatccctgccttggagttgatggcgctgtatgtggctgcagccatgcacgattatgatcatccaggaaggactaatgctttcctggttgcaactagtgctcctcaggtaaatctttagattttggttaggagaactaatttaaagatttctcaagaaagtgaagttcagtgtgatttataacaggcaccaagttaatataagccaaactatacatagtcttacgttgaaattctcagagaccgtgctaattctgaaaagaagccatggattcttccaagattctaatagcaggtatacaactttattatccatgggaatcatttctcagttttcttcttaggaagaaaacctacttgaattcatgttaatggacctctttaacaaacaaaaggcaacctatacaaaagcccctttctgaaaagattagagaaccaagcatttcttggacttttaagaatgtaaggtttctttgtatataaataccattcctttgaaatatattcaatataacaattatgattcttatgacattatctataggttggtaggattttaatatcaatttatttcattggaggattttttatttttttgcctaaacatagattccaaaaacagtgaataaatttaaagttcatcttggtgtatagttctaagtaaaaaattcatcactaagtatgtagacatacccatttatacaatcaaatttagcccctcatttatttaattagctgaacccaagttgctaaacattctgagatcctctgttcttctacaagatctagaggccaatttcattcaatattgacttttctgttttcttctttgcctcttctatcccattgctgttcatttccacagctcatcttataggctattctatagtttttcttgaatctatatacaataaaaattatctgataattttttcttgactatctaccttctttccacttgtctttcatacaccagaattattttttctaaatataggcaaaaatccactggccaggataatttaccattcagattattttacacgtctacatttttatatacctctatgttaatattctgtgcttagtgttttctttttgtcctatgtctttttatttctccataggctatacttgcacactagtgttcaggcattttgtaggcagcttcccttttaaaaaaaaatctctaataaannnnnnnnnnnnnnnnnnnnaattctctaataaaacttctctctgcattattagagaatttcagacaagtaaatgtcattttatgtctccgaatactagataaaaggtgatatttcctgtggagtggagtgagaatgttttaagtcatggacattttgggtattccattcatctttaatagctgtatgtgtttaagaggagataatgcttatgccagayagagaaagtaacctagttacctcttgaggtattgtggcattggtataattatatattatatttatatttacatatatatgtaaatataatttttttcttttttctttctccctcctcttttctatttgtatataatttttatgtttaaattcctgtaccctacaaagaaatctaaagaaaaaatcttttaaaaaatatctattaagataggcgagtgccccctcaaaagagtttggactaagttttcaaggaaaggaatttatcttacaaaaaggggaaatttaaccaagaaaaataatagagtcattgtacagtaataagtgattcttaataagcaggagttacgtgattacatttctttgttgtatgaataaaaagcaatttcaaaagcattgcatattctcatgatttttgtgattattttcttaaaaagttgaactcttaactgtcttatttgcctaggcggtgctatataacgatcgttcagttttggagaatcatcacgcagctgctgcatggaatcttttcatgtcccggccagagtataacttcttaattaaccttgaccatgtggaatttaagcatttccgtttccttgtcattgaagcaattttggccactgacctgaagaaacactttgacttcgtagccaaatttaatggcaaggtaaatagagctgtacccagttttcttttttttttcttttttttttttttttttgagacagagtcttgctctgtcgcccagactggagtgcagtggcacgatcttggctcactgcagcctctgcctcctgggttcaagtgattctcctgcctcaacgtcccgagtagctgggattacaggctcatgccaccacgcctgcctaatttttgtattttgtttttttagtagagatggggtttcaccatgttggccaggctgctctcaaactcctgacctcatgatccacccgcctcggcctcccaaagtgctgggattacaggtgtgaggcaccrtgcccggctgcatcagtcttcattttatagacacattgaaagatatcatggaagcaaactgttgaacaaaacatgttactatgaactcccatatttcaaatgtgaaaatggaatacaataaaatgtttaaccagaagcagacatataggtattgatctgaatctagatgcccaagaagctgagatgctgtctctatagattctactctgtgctacagaggaataacacattctgtcattgtggtttttgtttgatttaatttgttttcatctctatggtatatttgtataaattatctggcagcagtacagatcaaaaacttgaagcagaattttatacctcaaaagtaaatgcccaaatattaagttatgacaattttttatgaactgtaactatattattttaatagtaattgataataaggccaagcacaatggctcacgcctataatctcaacactttgggaggccgaggtgggtggatcacttgaggccaggagttcgagaccagtctggctaatatggcgaaacaccatccctactaaaaatacaaaaattggccaggtgtggtggcgcacccctgtagtcctacctacttgcgggggctgaggcaggaagattgcttgaacccaggaggtggaggttgcactgagccaagactggaccatgacactccagcctgagagagagggcaagactctgtctcaaaaaaagaaaagagaagtaattgattatatatgccaatttaaaaaagcatttgttgctaattcaataattaatgatttttaaaattttcatttttgtaggtacatggtaggtatatatatttatgggttacattaataaattcatataatgtataataatcacaacagagtaaatggggtatctgtcacctcaaacatttatccattgtgttacaaacaatccagttatactcttttagttattttaaaatgtataattcaattatttttgacacactcaccctgtcacccattattataattttatccataattcgtttactttttttgtgaactatttttaccattaatttacacagccaataacatttttaagtagctagaggttcccaattatttgrtattatgatccctatataatatgaagacaataaatgttctattgtttttctcttctcttcaacttttgtttttatcaaagcaaaacatatattaactttatctctcaaataggtaaatgatgatgttggaatagattggaccaatgaaaatgatcgtctactggtttgtcaaatgtgtataaagttggctgatatcaatggtccagctaaatgtaaagaactccatcttcagtggacagatggtattgtcaatgaattttatgaacaggtaactgaccactgyttaatacagcttaatctgtacttacaggttgctcatgaattgctcaaagcttctaacagctatgaaagtatgatcactctattttatattcatacttttgtcagaaaatgcactggtcaattttgatcaggagacaaaaagtgacgtataaaaattggactaaaatataatcatagaactctatgataaaagttatttgcaagcatttggggggaagaagatattgagatagtggaagtcagatgttaggaagatccttgaaatactgtttttttatagatttatttattatcatagaaggtagtttaaatgtatatggagtagcttgtatgtatatggtagtttaaatgtatatgcatatcacattaatttcacttactttcctaaaaaatttatttattatcatagaaggtagtttaaatgtacatggaatagtttatatgtatatgtatatggtagttcgaatgtatctgtatattagattaacttcacttttgtaaaaaaattaataagagcattatgtgaaaaagctaaaaagaaatagacatttcatttgacatgataactaagagttaacagactactcagaaagctaccacaattacataagcygggggtgatcctcctgacattaccctacacccatcagaatgcacttgaaccttcctgtttggcactgtgaaccactcttaaaaagaatgtggaggtgaaggagcatgcataaaggacaggaataagtgacagaaaagcatgtggaaaaaaatgaaggtatttactcttggggaaatataactgtcttcagatatttaaaagagtgacatactaatttagaaatcggttaatcaacattgctgtggagattaaagaagataaattatataacatacttagcacaggatctgattcataaaaaaagttagatccctctctactgccctaaaaaaggtatgaatataccagtctatagaagttattgggaggtagtgttcaggtcaatgtcagaaagaaatttatattgctaaaggtatccaaaaaataggctgagacaccatattaatggtaataaattgactgtcattggacatgtttaaacaagagattagaatgaaattttatggttactataggtaggattcatatatagaatgaaagatttgttttttttattttattatactttaagttttagggtacatgtgcacaacgtgcaggtttgttacatatatatacatgtgccctgttggtgtgctgcgcccattaactcatcatttagnnnnnnnnnnnnnnnnnnnnnnnnnnnnnnnnnnnnnnnnnnnnnnnnnnnnnnnnnnnnnnntgtgtgatgttccccttcctctgtccatgtgttctcattgttcagttcccacctatgagtgagaacatgcggtgtttggttttttgtccttgcgatagtttgctgagaatgatggtttccagtttcatccatgtccctacaaaggacatgaactcatccttttttatggctgcatagtattccatggtgtatatgtgccacattttcttaatccagtctatcattsttggacatttgggttggttccaagtctttgctattgtgaatagtgcctcaataaacatacrtgtgcatgtgtctttatagcagcatgatttgtagtcctttgggtatatacccagtaatgggatggctgggtcaaatggtatttctagttctagatccctgaggaatagccacactgacttccacagttgttgaactagtttacagtcccaccaacagtgtaaaagtgttcctatttctccacatcctctccagcacctgttgtttcctgactttttaatgatygccattctaactggtgtgagatggtatctcgttgtggttttgatttgcatttcactgatggccagtgatgatgagcattttttcatgtgtcttttggctgcataaatgtcttcttttgagaagtgtctgttcatatccttcacccactttttgatggggttgtttgtttttttcttgtaaatttgtttgagttcattgtagattctggatattagccctttgtcagatgagtaggttgcaaaaattttctcctaaaaccataaaaaccctagaagaaaacctaggcaataccattcaggacataggcatgggcaaggacttcatgtctaaaacaccaaaagcaatggcaacaaaaaccaaaattgacaaatggggatctcatcaaactaaagagcttctgcacagcaaaagaaactaccatcagagtgaacaggcaaccyacagaatgggagaaagttttgtgtttttaaaacatcatgaaatcatgtattgcctttcctaagaatgggattaattcataaatctcgaaatatggaaatgcagaaaaatgtaaattaaagggaaaattcatgtataataataccacttcttaggcataattgttgctgatattttgggatatttcctttattaattttgctagataactgctggttaaaaatctcccttttttcctcagaaacatttgaagcacttcaaaataaaacatttgtacagtaatattattaaacatatagataaataagaatatcagaaaccacacaatcacaggagatatattaaaattcaaacaaaatctgggataaggtaaccccttgaattgagcaataaattctttaaagctttctggaagccaaagcaaaaaaaggaaaataggctacatttatatatttttaaaaaaattgttctcactattgcatttttttttttgagatggagtctcactctgtcaccctggaatgcagtggcacgatctcagctcaccgcaacctccgcctcctgggttcaagtgattctcctgcctcagcctcccaagtagctgggattacaggcacctgccactacacccagctaattttttgtatttttaatagagacggagtttcaccatgttggccaggctggtctcgatttgcccactttggcatcccaaagtgctgggattacaggcgtgagccaccacgcccagcctcaccattgcattttcgtgcatttatattctcatataaaagacactgacttgtgtgattaaaatatcatctacttatacattagaatttagactttctgtatttctccttgataaaaagcaaaaacctcaagttcagaaaagtactaattagcaacagtgtttctataggaaccttagcacttgaggtaggatcctttagctgtcaagtaaagaagtttgtgcattaatgcctggggttttacatatttacaaatttcagatgccaggtgaatgttgacttcacttgtattttatttctagggtgatgaagaggccagccttggattacccataagccccttcatggatcgttctgctcctcagctggccaaccttcaggaatccttcatctctcacattgtggggcctctgtgcaactcctatgattcagcaggactaatgcctggaaaatgggtggaagacagcgatgagtcaggagatactgatgacccagaagaagaggaggaagaagcaccagcaccaaatgaagaggaaacctgtgaaaataatgaatctccaagtaagttctaaaacctagttctaatgtgttttccctgggattgctttcttactttagatgaattttatgcttcttatgaaatacacaatacttcaagtctaaacatcatttgcggagtttgactacggatagctcccttccccaatatcataataatagaaatcccagactatggaatctataataataacacatatgatacaaagatatcttctccgtcatgaagtcatgaagttagaaaaaaataataataaggagttgaagcctattcttcagggtatctggttttttgtttgttttttgttttttgttttttgaggcagagtcttgctctgtcacccaggctggagtgcagtggcacgatctcggctcactgcaagctccgcctcccaggttcatgccattctcctgcctcagcctcctgagtagctgggactacaggtgcgcaacactacacccggctttttttttttttttttttttttttgtattttgagtagagatcgggtttcaccatgttagccaggatggtctcgatctcctgaccttgtgatctgcctgcctcgacctcccaaagtgctgggattacaggcgtgagccaccgcgcccagctgcttcaggttatgttagcgatttaaaagtgaaagaatttcagttaccataaagaccagtcataggtttttattggcttggttaggggaactccatgtgaatagataggaggtagtattcatttgttcattcaacagacatttattgagcatctgctctgtgccaggtatccttccaggtactagagatagagttgtggggaaaaaaagacaaaaaataaaataaaatccttgcccttatagaagtacattctagtgggatcagtagacaataagcaaaacaagtgagtatatctatagtatgttaaatacagtattatttactgtagtgataaatgctgagaaatatgagagtaaaaataaaaggagggagatatgaaatattatagagataggttaaaattttaggtaagatatccagggataggaaagatgtaaagcagggaaagatttgtaaaaagaaaaagaaaagacctgcaagaagcaagggagtgctccctggggctgtatgtggaaagaggattccaaagagaggagaaagcaacctgtgcaaaggtccggggatgtacattgggtggggtgttcagggagcagcaggagaactgggatagctggagcagcaagacagaggcagccgggaacgaactgtccaagggagagaatacagtcatgggttcttagttgctgtttctggttgggccagtaaagccccttcctcatcccactgttctgcttatcactagagacagaaactaaaaaccatggtttcaggtgctaaaagcctaaaacaaaacaaaacagaagaacagcaacaacaaataagtcagcctggacaagcttggaaggtgggactctgtaggtcacggtaagtgttgtggcttttactctgagtaagatgggaaatcgtcagtggttttgaacggaagagttagtagactcaacttacattttaactggactgcttcagctgctctattgagaatatgcttggggttgagaagggagcaaggatagacatagggcggtcagttaggagaccattgaaattatccaagtgagagatgcctgtgactttgaaccagggcagtagcaacagtgacagtgacaacctatcacatgtgataattggctggagtgcatcatgtggccaatctaacctatttagcttaattgactatgaaatcatttttatttatgcctctaaagctactctcctatttatcctgtcatgaaacaaatagtgactaatagcataattagtaaaaatccatgacccttgcaatgatattgcacaaatactgctcctaagaacatagtatgtgatttctgtctacctttacagataaagtacaatcttaatatcctcaaggttcttaccaaaaatacaaccagtgaaagacattctgatcatttcgtgcctatttttatcacagtcaggataatgcacaacttggttcattccaaccatcttgtaaggagattaaccttctactgatccattttgctctcatataagcaccttgttgtaggcacacataagcaaacataaagaagtccttatcaattatgaacttatgaagtaaaattttgcaaattgagttttagatcagatctggcctgttaattactttttgtagaatgggggaaaattaaagttgtttttcttcaatatgctactgtcaaagtaattatatttcatttatctgatgcaaataaaaagacttccattagaaaatttgtactaatcttgagattcagagctagaagccaagacttggaattcatgggttattcattcatttttttcacttaataaacatgtattagttttctctttttgtttgttttcatttcaaagagccaggtagtttgctgtcttactaagaataagacagtttttccactgaatgaaggtattgtcagcttagcctctggaaaagctttgttcccaggggccctgacttactgctctttgaactcaaacacatggaaaatacagacgcacagatccaggcattgggaattgaaggacccaggccaggagacttaacaggctcaacttgtcaacctagcctttagcagcaaatgctacaaccacatattccatttctttctgttctgtagggttgggttgtcataccttccmgtttttatcaagttcactaaagcaggaatgagagactttttgggttctgtttgctcatgccttccaaaagttaactgaccacattatattacaatttaaaaatatcccatccacaatgatttgatactgtagctttggaaatattatctttaaagtatttctttacaaccaagaaaatgataaatatggagcaacattagtatttaccaaatattggccacatagagtaacagaattttagaaatgaagggggaatcaatgcttatcagttagctgcctcactttacatatattaaactaaggctcagaaatttaaatgacattgcaaggttgtagaaccagaaagggaacctaggtctcttaatttttaacttcaatgcttttggctctcagtaatgttaatatcagaattcatactggctaaaatggttaccttgactttgcctaatacttaggtttcagaaaaaaataaatatgcacagataacttctgtagtttgtaaaacttggagatgtcccaggaaacagaataaaatgtttcaatatggtatcctaggaaaagaaggtttttatcccaccttataattaaatctgaaagattcctacagtgaactaagaggttyctaatgaagtactaagctgcatttagaattggagcaatgaaaggctctttgttctcctttcaaaaggttccagtacagaacaatttggctcccaatacaggcatgttttagaccacctgcaggctctaatctacgcaaatttatttggtacaaactttcttctacgtcaccttcttattcagtataattccagagaggtttattgctaacatttaacagtattaataagagaacagttgctctcatggggactgccctggaaggaaaaaagaggaaaattgagcttttgttagcttcttccctatgaatgcactgccatcaatgtgtataactttaagatgaaataatcaccttaaactgaagagtgtttgctacaactgtgattcaaacctgtccttcagacaggggtcctctgtaactctcttgattcaaaggattagcttaaaaagtatattaacatttaaacatttctcaacagaatttgatttataacaaaaacgaagtagaaatagacaagtagagatagaagagtaatttttaatttgctttaaaaaatctgatgtattaatgtattttattgactttcatagaaagaattcaaatttakttaaatttcaattgtatctactgcccttgttaggaggctttcaaatggaagaattgatataaggggtcttggcctgtgccccatacacttttgcctatgtcccagttcttcaaactttgcttggaatactgctagctccttttcacccagtgttatttaattctcattacttacatccagcccaggtaccaggtcctttaaaaaaaaaattctacctaattttccacagtttgtgtcatttgtgttgccatggtttgatgtatcaaagagaaattgcaccagacatttgttaaaaatggcaacgaaggcgttattcaagactactgtaataggggagacagattgaactctgttgaagcaaaaggtgggagaattgttcaatgctgctgtgagctagtgaaaaagtgctggaggatgttatgtgagcattggttagtatgattaagccacctgttaattggtacttactaaagttaggctcctacctcccaacagagactaggagataggcctgcctgctggcctacctttcttctttccttccatccttccttccttcatttaaatcttttttaaattttaaaatttaaattttattttgtaagactgcaaagctaattagaggctgggagaagatttatctatattccagaggggcagagaaagaatttgctattacaggttttctaaagtaaatgttctaacaagagggaggtcaggggcctatagtctagaagtctaaaatagtgtcaaactgagagaaatggcaagcccatcttggtcacaagaatatgtctgtcataaaacatagcacatgtatttcagtttttgtcttcttggcactctctcttacagagagactgtaaactcctttaaggcaagatctgagcttaattgatctgtgtttccaaagtatcctggaaagtatttgccagttagtttgagtccatctcatgaagaaattatgaatatcataatttttttttccttttgactctgcctgtgttcatttccctcagcactcattcaatttaataattgtcattctgtgtctrtatggttcaaaattaattcaagataatttaatgtcctttttattcactrtgttttaaaaattaattttattctgtacagtacaagaaatttctgcagtatatcaaaataaaactgttaaaagaatgactagcccttccacaaagatgttggcagatgacctccaagtttctttgtcacccccatagaaattggctttttttctttcattattgtgctattattaagacttttcttttttttcttgctcccagagtaagtcatatctacttcattaaatagacccaaatatcccttttgatcttcctgctaacttgtactgttttttttaattgtttatttacttttgtagagacagcagtctcactttatttatttctgtagaaacaggacctcactatgtttcccaggctggtttggaacccctgacgtcaagtgatcctcttgcttcagcctcccaagtagctaagattacaggcagcatgagccaccatagccagcatgaactattaactctttaatgcagtctcaattagatcagcatctcctgtagaccactttttcgtattagttttatttttaccacttatcaatacttcatcatttacctggaaatgtggaacaaaaactagagagaaaattattcatttagtaaacttttactgaatgctttagtaaagtctaggtcttcacagatattacatatacacaaaagtaaagagaaaagtccatataccaggtgatatggtttggctgtgttcccacccaaccctcatcttgaattgtagttcccataatccccatgtgtygtgggagggacctggtgggaggtaatcgaatcataaggggagttacccccatgctactgttctcatgacagtgagtgacttgtcacaagatttgctggttttataagaggcttttccccctttccttggcacttctctctttgtatgaccatgtgaagaaggatgtttgcttccccttccaccatgattataatttcctgaggcctccatagccctgtcagtcaattaaatctcttttctttgtaaattactcagtcttgggagttctttatagcagtgtgaaaatggactaatacagtaagttggtaccagaagtggggtgctgatataaagatacccaaaawtgtggaagcaactttggaacacagtaacaggcagagattggaacagtttggagggctcagaagaagacaggaaaatgacagaaagtttggaacttcctggagattggagggtcatatggtttggctgtgtctccacccaaatctaatcttaaattcccatgtgttgtggagggacccggtgggagataattgtatcatcrtggcaagtcttttctatgctgttctcgtgatagtgaataagtctcacaagatctaatggttttaaaaagaggagttcctttgcacaagttctctttttggctgctgccatccatgtaagatgtgagttgcttctccttgccttcctgtatgattgtgaggcttcctgagcaacatggaactgtgagtgagtgctcaattaaacctcyttcctttgtaaattgcccagtctcaggtatgtctttgtcagctgcatggaaatggacgaatacagtaaattggtmctggtagagttgggtgctgctgaaaagacaaccaagaatgtggaaacgactttggaactgggtaacaggaagaggttggaacagtttggagggctcagaagaaaaaagaaaatgtgagaaagttagtttggaattttctagagacttgttgaatggctttgacaaaaaatgctgatagtgatatgaacaatgaagtccaggctgaggtggtctcagatggagatgaggaacttgtcgagaactggagcaaatgtgactcttgttctgttttagcaaagagactggcagcattatccccctgccctagagatttgtggaactttgaacttcagagagatgatttacggtatctggtgggagaaatttctaagcagcaaagcattcaaaggcaacttgggtgctcttaaaggcattccattttataagggaagcagaacataaaaattcagaaaatttgcagtctggcaatgcaatagaaaagaaaatcccattttgtgaggataaatccaagcgagctgcagaaatttgcataagtaatgaggagccaactgttaatccccaagacaatggggaaaatgtctccagtatatgtcagaggtcttcatggcagcccctcccatcacaggcctaggggcctaggaggaaaaagtggtttaatgggctgggttcagggtccctgagcagtgtgcagcctagggacttggttccctgcatcccaaccactccagttgtcactgaaagaggccaaggtacagcttgggctgttgcttgagagggtggacgcctcaagccttggcaccttccatgtggtgttgagcctgtgagtaaacagaagtaaagaactgaggtttgggaacctctgcctatatttcagagggtgtacggaaatgcttggatgatcaggcagaagtttgctgcaggggtggggcagtcatgcagaacctctgctagggcagtgtggaagggaaatgtagggtcagagctaccacacagagttactactggggcagtgcctaatggaactgtgagaagagagccactgtcctccagaccccagaatggtagatccaccaacagctggcaccgtgtgcctggaaaagccacagacactcaatgccagcccatgaaagcatccatgagggaggctgtaccctgtaaagccacaggggcagagctgcccaacactataggatgcccctctttgccttccaccatgcttgtcaggtctctccagccatgtgaaactgtaagtccaataaacttctttcttttgtaaattgcccggtcttgggtatgtctttatcagtagcatgaaaacggactaatatggaggactcagaagacaggaaaatataggaaagtttggaacttctagagacttgttgaatggcactgaccaaaatgctgatagtgatatggacaataaactccaggctgaggtggtctcagataaagatgaggaacttgttgagaactggagtaaaagtcactcttgttttgcttaccctgcagagccacaggggcaaagctgcccaagaacacctcctgcatcattttgacctggatgtgagacatggagtcaaaggagatcagttttgaactttaaggtttaatgactgccctattgaattttagacttgcatggggcctgtagcgcctttgtttcagcaaggaaactggtggcattttgcyctagccmtagagatctgtgaaactttgaacttgagggagatgatttagggtatctggccgaagaaatctctaagcagcaaagcactcaagaggtgactttggtgctattaaaatctctcagttttatgtattcagaaagacatggtttggaattggaacttatctttaagagggaagctgagcataaaaattcagaaaatttgcaacctgaggatgtgatagaaaagaaaaacccattttttgaggagaaactcaagtgggctgcagaaaatttgcataagtaacaaggagccaaatgttaatcaccaagacaatggagaaaatgtctccagggcatgtcagagaccttagtggcagtccctcctatcatagacccagakgcctaggcagaaaaaacgatttcacaggccaggccccagaccctctgctgtgtgcagcctagggacttggtgccgtgagtcccagctgtttcagccatggcagaaaggggccaatgtacagctcaggttgtggcttcagagggtgcaagcccgaagccttggcaacttccatatcatgttaggtctgtggtgtgcagaagacagaaattgaggtctgggaacctccacctagattaaagaggatgtatggcaatgcctggatgtcctggcagaagtttgctacaggggtggagccctcatggagaacctctgctagggcagtatggaagggaaatgtggggttggcgccaccacacagagttcctactggtgcactgcacagtggagctgtaagaagagggccattgtcctccagaccccggaatggtagatccaccaacagcttgcactgtrcacctggaaaagccacaggcagtcaatgccagcctgtgaaagcagctggaggggaggtgctgtaccctgcaaagccacaggggcaaagctgcccaaggctgtgggagcacacctcttgcatcattttgacctggatatgagacatggagtcaaaggagatcattttttaactttaaggtataacaactgcccttttgaattttagacttgcatgggacgtgtagcccctttgttttggcagatttctcccatttggaatgattgtatttacccagtgcctgtaccatcattgtatctgggaagtaactaacttgcttttgattttgcaggtttataggcagaaaggacttgccttgtctcagatgagaccttggacttggacttttgggttaatgctggaatgagttaagacattgggggacttttggaaaggcaagattgtgttttgaaatgtgaggatattagttttgggagaggtgaggggcagaataatatgatttggctatgtcaccacccaaatctcatcttgaattgtagtttacataatctccatgtgttgcgggagggacccagtgggaggtaattgaatcatgggggtggttattgtcatgctgctgttcttgttataatgagttcttatgagatctaatggttttgtaagggacttttccccctttgcttggcacttctstcttcctgccaccatgtgaattaaggacatgtttgcttccccttccaccatgattatgtttcctgaggcctccccagccctgtggaactgtgagtcaattaaacctctttcctttataaattacccagtcttgagcagttttttatagcagcatgagaatggactaatacaccagggaaattcacaatctaatgggaggatcttagctgaacttctgaactcttggctcaagtctaaaatcgtcacttagatgagggtactgagagttaaatgatattctggttgcttggaaaagaacagacctctcttctaagctgtctaccagctgcctactttacctctctactcagaggtcttccagacacttcatgttcagaatacctctattcattttctgctgatatggttttgctgtgtccccacccaaatctcattttgaattgtagctccaataaytctcatgtgttgtggaaaggacccaatgggagacacttgaatcatgagggcagtttcccccatattgttctcctggtactgaataagtcatggatctgatgattttataaggggtttcctcttttgcttgactctctcattctctttttgcctgacaccatgtaagacatgccttttgccttctgccatgtttgtgagacctccccagccatgtggaactcttgagtccattaaacctcttttttctttgtaaattatccagtctcaggtatgtctttatcagcagtgtgaaattgactaacacaccctcaaatatactcctcatccaaccttccctttctcagtacatcttaccaacatactcaactgctcaggccagaaaacagggttgtctctgattcctccctcttaattccctacctctaatcagttgccaagtcctgttgattctcccatacaaatatatctcatatttattgacttttcttcattttcattacccctgtcctaatccagtcaccacctccatacaatattgtaccaactgggccatctccctccctttctgctgactttcaaagactccataagactcagtataaatgtacctgcttgttcactattttcctactagagtaaaagcctgctgctggcaagcatcatatttatcttgtctgtcagagggtcactagaactgaggacaacattttggtacatatcgggtgattcataaatagataaggaatttagaaacctcaatagtgaatgctgacattaaatagtcttctttgaaatatatttttttctgtttaaattgggtttattatttttcctcaattaaaggatgtaattctgtgaaaatttttcttaatatttgcatgttgaaaactttgaatcatttggtcaaagaaaatgtaatgtatttcttttttaaatgcatacgtgctgatgtataagatctgtacaggtttgtccaaggctccctcacagaccctatagtctagaagagaaactatttggaatatatgaaaataagatttgagtttattttttttaagtagggtactcatttattcagattaatagacagaagcaaataattttccaaagtagatgtaaaaaatgtacattcctataagcaatatattagttctaattgttaaattcttcgtctacacttgattttttatagtcattttcattttagctattccaagtaggcatagagtgctcttatgttatagttttcatttgcatttccctgtcttatgtaatatgcaactttttgtatttttaatcaatatatatttgtacatatttatgtggggcacatgatattttgctacattcatcaaatgtgtaatgattaaatcaggatatttagartatctgtcacctcgagtatttgtcatttctttttttttttttttttttttgagaccgagtctcagtctgtcacccagtctggagggcagtggcacattctcagctcactgcaagctcactccgtctcctgggttgaagtgattctcctgcctcagccccccaagtagctaggacaggcatatgccaccatgcccggctaatttttgtatttttagtagagatggggtttcaccatgttggccaggctggtcttaaactcctgacctcaagtggtccatccgcctcrgcctcccaaagtgctgggattacaggcatgagccactgcacccggccatatttatcatttctatgtgttgggaagtcccctcttcccactattttaaagtatgcaatacattatttttaacaataatcaccttactctgctatcgaagaacttatttattctaactagtatgtttgtgctcattaatcaatatctcttcattcctcctaacccccaaccatacacccttctcagcttctgatgtctgtcattctaccctcacttccatgagatcaacttttctagctcccacataagagtgagagcatgagatatttgtctttatttgctagacttatttcatttaacataatgatctccagttccattaatgatgctgcaaatgtcataattttattctttttatgtctgaatattattccattgtgtatgtataccacattttctttatccattcatcagttgatggacacttaggttgattccatatctttgctattgtgaagactgctgcaataaatatgggggtgcaattatctttttaatatactaatttcttttcctttgataartacccagtagtgggattgctagatcatatggtagttctcttttgagattttgagaaatctgcatactgttttccatagtggctataccaacttatatacctacaaacagtgttatgagttcccttttctccacatccttgccagcatctgttgtttttctgtttttagtaatagccattctaactggggtaagatgatatctcattgtggctttgatttgcatattcctggtgattagtgatattgagcattttttcatatacctgttggccatttgtatgttttcttttcagaaatgtctattcatgtccttgcccactttttaatagaatttttttgtttttgttttttaactgttgcttgattttcttgtatattctggatattagttccttgttgtatgaacaatttgcatatattttcttccattctatagattttctcttcactatgttgattcatttgctatacagaaggttttcgtttttagtttagtcccatttgtctgtatttgtttttgttgcctgggtttttgaggtcttaatcataataatctttgcttaggtcaatgtcctatagaacttcccttatgttgtcttctaacagttttatagtttttggtcttacttaagtctttaatctatcttgagttgatttttgtatatagtgagaaatggagtctagtttcattcttctgcatgtgaatatccaattttcccagcaccacttattaaaaaagatgtcctttcttcaatatatgttcttggcacctttgtcataaatcagttggctataaatacatgcatttatttctggagtctatgttttattggtctatatgtccatttatatactaacaccatgctgttttgtttactatacccttgaagcatattttgaagtcaggtagtgtggtgcctccatctttgttcttttcgttcaggattgctttggctactcaagctcttttttggttccatagagattttggaattgtttttcctgtttttctgaataatgtattggtattttaaaaataaagattgcgggggaggagccaagatggccgaayaggaacagctccggtctacagctcccagcrtggtggatgcagaagatggtgatttctgcatttccatctgaggtaccgggttcatctctctagggagtgcgagacagtgggcgcaggtcagtgggtgcgcgcaccgtgcgcgagccaaagcagggcgaggcattgcctcacttgggaaacgcaaggggtcaggkagttccctttcccagtcaaagaaaggggtgacagatggcacctggaaaatcaggtcactcccacctgaatactgcgcttttccgacgggcttaaaaaacggcgcaccatgagattatatcccgcacctggcttggagggtcctacgcccacagagtctcgctgattgctagcacagcagtctgagatcaaactgcaaggcggcagtgaggctgggggaggggcgcccgccattgcccaggcttgattaggtaaacaaagcagccaggaagctcgaactgggtggagcccaccacagctcaaggaggcctgcctgcctctgtaggctccacctctgggggcagggcacagacaaacaaaaagacagcagtaacctctgcagacttaaatgtccctgtctgacagctttgaagagagcagtggttctcccagcatgcagctggagatctgagaacaggcagactgcctcctcaagtgggtccctgacccctgacccctgagcagcctaactgggaggcaccccccagtagaggaacactgacacctcacatggcagggtactccaacagacctgcagctgagggtcctgtctgttagaaggaaaactaacaaacagaaaggacatccacaccaaaaacccatctgtacatcaccatcatcaaagaccaaaagtagataaaaccacaaagatggggaaaaaacagaacagaaaaactggaaactctaaaaagcagagcrccaatcctcctccaaaggaacgcagttcctcaccagcaacggaacaaagctagatggagaatgactttgacgagctgagagaagaaggcttcagacgatcaaattactccgagctacgggaggacattcaaaccaaaggcaaagaagttgaaaactttgaaaaaaatttagamgaatgtataactagaataaccaatacagagaagtgcttaaaggagctgatggagctgaaaaccaaggctcgagaactacgtgaagaatgcagaagcctcaggagccgatgtgatcaactggaagaaacggtatcagcgatggaagatgaaatgaatgaaatgaagcgagaagggaagtgtagagaaaaaagaataaaaagaaacgagcaaagcctccaagaaatatgggactatgtgaaaagaccaaatctacgtctgattggtgtacctgaaagtgatggggagaatggaaccaagttggaaaacatgctgcaggatattatccaggagaacttccccaatctagcaaggcaggccaacgttcagattcaggaaatacagagaacaccacaaagatactcctcaagaagagcaactccaagacacataattgtcagattcaccaaagttgaaatgaaggaaaaaatgttaagggcagccagagagaaaggtcgggttaccctcaaagggaagcccatcagactaacagcagatctctcggcagaaaccctacaagccagaagagagtgggggccaatattcaacattcttaaagaaaagaatttccaacccagaatttcatatccagccaaactaagcttcataagcgaaggagaaataaaatactttacagacaagcaaatgctgagagattttgtcaccaccaggcctgccctaaaagagctcctgaaggaagcactaaacrtggaaaggaacaaccagtaccagctgctgcaaaatcatgccaagatgtaaagaccatcgagactaggaagaaactacataaactaacgagcaaaataaccagctaacatcataatgacaggatcaaattcacacataacaatattaactttaaatgtaaatggactaaatgctccaattaaaagacacagactggcaaattggataaagagtcaagaccaatcagtgtgctgtattmaggaaacccatctcacgtgcagacacacataggctcaaaataaaaggatggaggmagatctaccaagcaaatggaaaacaaaaaaaggcagggattgcaatcctagtctctgataaaacagactttaaaccaacaaagatcaaaagagacaaagaaggccattacataatggtaaagggatcaattcaacaagaagagctaactatcctaaatatatatgcacccaataaaggagcaccaagattcataaagcaagtcctgagtgacctacaaagagacttagactcccacacattaataatgggagactttaacaccccactgtcaacattagacagatcaacgagacagaaagtcaacaaggatacccaggaattgaactcagctctgcaccaagcggacctaatagacatctacagaactctccaccccaaatcaatagaatatacatttttttcagcaccacaccacacctattccaaaattgaccacataattggaagtaaagctctcctcagcaaatgtaaaaggacagaaattataacaaactatctctcagaccacagtgcaatccagctagaactcaggattaagaatctcactcaaaactgctcaactgcatggaaactgaacaacctgctcctgaatgactactgggtacataacgaaatgaaggcagaaataaagatgttctttgaaaccaaggagaacaaagacacaacataccagaatctctgggacgcattcaaagcagtgtgtagagggaaatttatagcactaaatgcccacaagagaaagcaggaaagatccaaaattgacaccctaacatcacaattaaaagaactagaaaagcaagagcaaacacattcaaaagctagcagaaggcaagaaataactaagatcagagcagaactgaaggaaatagagacacaaaaaacccttcaaaaaattaatgaatccaggagctggttttttgaaaggatcaacaaaattgatagaccactagcaagactaataaagaaaaaaagagagaagaatcaaatagacgcaataaaaaatgataaaggggatatcaccaccgatcccacagaaatacgaactaccatcagagaatactacaaacacctctacgcaaataaactagaaaatctagaagaaatggataaattcctcgacacatacactctcccaagactaaaccaggaagaagttgaatctctgaatagaccaataacaggatctgaaattgtggcaataatcaatagtttaccaacaaaaaagagtccaggaccagatggattcacagctgaattctaccagaggtacaaggaggaactggtaccattccttctgaaactattccaatcaatagaaaaagagggaatcctccctaactcattttatgaggctagcatcatcctgataccgaagccaggcagagacacaacaaaaaaagataattttagaccaatatccttgatgaacattgatgcaaaaatcctcaataaaatactggcaaactgaatccagcagcacatcaaaaagcttatccacaatgatcaagtgggcttcatccctgggatgcaaggctggttcaatatacgcaaatcaataaatgtaatccagcatataaacagagccaaagacaaaaaccaaatgattatctcaatagatgcagaaaaagcctttgacaaaattcaacaacccttcatgctaaaaactctcaataaattaggtattgatgggacatatttcaaaataataagagctatctatgacaaacccacagccaatatcatactgaatgggcaaaaactggaagcattccctttgaaaactggcacaagacagggatgccctctctcaccactcctattcaacatagtgttggaagttctggccaaggcaattaggcaggagaaggaaataaagggtattcaattaggaaaagaggaagtcaaattgtccctgtttgcagatgacatgattgtatatctagaaaaccccattgtctcagcccaaaatctccttaagctgataagcaacttcagcaaagtctcaggatacaaaatcaatgtacaaaaatcacaagcattcttatacaccaacagacaaatagagagccaaatcatgagtgaactcccattcacaattgcttcaaagagaataaaatacctaggaatccaacttacaagggatgtgaargacctcttcaaggagaactacaaaccactgctcaaggaaataaaagaggataaaaacaaatggaagaacattccatgctcatgggtaggaagaatcaatatcgtgaaaatggccatactgcccmaggtaatttacagattcaatgccatccccatcaagctascaatgcctttcttcacagaattggaaaaaactactttaaagttcatatggaaccaaaaaagagcccgcatcgccaagtcaatcctaagccaaaagaacaaaggctggaggcatcacactacctgacttcaaactatactacaaggctagagtaaccaaaacagcatggtactggtaccaaaacagagatatacaagaatggaacagaacagagccctcagaaataacgctgcatatctacaactatctgatctttgacaaacctgagaaaaacaagcaatggggaaaggattccctatttaataaatggtgctgggaaaactggctagccatatgtagaaagctgaaactggawcccttccttacaccttatacaaaaatcaattcaagatggattaaagacttaaacrttagacctaaaaccataaaaaccctagaagaaaacctaggcattaccattcaggacataggcatgggcaaggacttcatgtctaaaacaccaaaagcaatggcaacaaaagacaaaattgacaaatgggatctaattaaactaaagagcttctgcacagcaaaagaaactaccatcagagtgaacaggcaacctacaaaatgggagaaaattttcacaacctactcatctgacaaagggctaatatccagaatctacaatgaactcatacaaatttacaagaaaaaaacaaacaaccccatcaaaaagtgggcraaggacatgaacagacacttttcaaaagaagacatttatgcagccaaaaaacacatgaaaaaatgctcatcatcactggccatcagagaaatgcaaatcaaaaccacaatgagacaccatctcacaccatttagaatggcaatcattaaaaagtcaggaaaccacaggtactggaaaggatgtggagaaataggaacacttttacactgttggtgggactgtaaactagttcaaccattgtggaagtcagtgtggcgattcctcagggatctagaactggaaataccatttgacccagccatcccattactgggtatatacccaaaggactataaatcatgctgctataaagacacatgcacacgtatgtttattgcggcattattcacaatagcaaagacttggaaccaacccaaatgtccaacaatgatagactggattaagaaaatgtggcacatatacaccatggaatactatgcagccataaaaaatgatgagttcatgtcctttgtagggacatggatgaaattggaaaacatcattctcagtaaactattgcaagaacaaaaaaccaaagaccgcatattctcactcataggtgggaattgaacaatgagaacacatggacacaggaaggggaatatcacactggggactgttgtggggtggggggaggggggagggatagcattgggagatatacctaatgctagatgacgagttagtgggtgcagtgcaccagcatggcacatgtatacatatgtaactaacctgcacaatgtgcacatgtaccctaaaacttaaagtataataaaaataaaaataaaaaaaataaaaataaaaataaagattgcactgaatccatacattgcttgggtagaatggtcattttaacaatattaatacttcagatccatgatcatgggatgtctttgcattcrtgtgtgttgtcttcaacgtgtttcatcagatttttgtagttttccatgtagaggtctttatccatcttggttaaatttatttctaattttttatagctattgtaaaagggattgccttcttaatttctttgtcagctagttcatcattggtatatagaaatactactgatttttttgtatattgatttttgtatcctgcaactttactcaatttatttatcagatctaagagttttttgatggagtctatgtttttctagatataggattatgtcatctacaaagagggacaatttgacttcctcttttccagtttggatgcctgattgttctgagtaggacttctagtacaattttgaatagcagcagtgatagtgagcaccttgtccttttctagttcttagaggaaaggctttcaactttccacattcaatatgatattagctgtggttttattatgtgtggtgtttattatgttgaggcatgttccttcctagtatttttagtttttatyatgaagtgatgttgaattttatcaaatgctttttctgcatatattgagaggatagatgcaaaaaagcatttttatgcgaagtcacccagtactgaactttttattgttgggagtctttattgctgatttaatctgattacttattattggtctrtttaggttttctatttcttcctgattcaatcttggtatatgtgtccaggaatttatccatttcatctaggttttctagtttgctaatacatacttgttcaaaatagtctctgatacttttgtatttctgtgctatcagttataatgtctcctttttcatttctgattttatttttggaggtcttctcatttttctyggttagtctagctagtggcttattcattttgtttatcttttcaaaaaaccaacttttgtttccttgacacattgtactttttaaatttttattttatttagttctcttatctttattatttcttttattctactactttgtggcctagttagttattgcttctcaagttccttgaggtgcattattaggttgcttatttgaaacatttttagttttttgttgttgatatttattgtgttaaacttccttttgactactactttgtgttgtttccattttcatttgtttcaagaaatttattgatttattccttaattatctctttgacccaaaggtcattcagagacwttttttttaattttcatgtatttatacagtttccaaagtttcttttgttattgatttctagttttattcattgtggtctgagaagaaacttgatataatttagatttttaaaaaatgttttgagacttattttgtatcctagcatctggtctatcctggagaatagttccatgtgctgacaatgagtactctgcagctgttcaacaaaatgttctgtaaatatctgtgaagtccattggyctaaaatgcagtttaaatccaacgtttatttattaattttctgtctagatgagctgtctggttctgagagtgggatgttgaattcctcaactatttttgtgttgaagtgtctctctccctttagatctattaatrtttgctttgcatatatctgggtgtgatactgcttctcagccttttggctaagatcaggtttagtatctggttgctctggtattggtgcatatatgtttagaactattctatcctcttactgaattgatctcgttgtcattatataatgactgtgtcttctttttactgttttgacttaatttctgtttcatctaatataagtatagctactcttgcttttttgcttttgtttgcatgaagtatatttttctgtctttcacttctagtctatatctgtcttttctatcttttacttctagtctgtatctgtgtacaggtgagatgagcttcttagcacataattaagtcatgttctttaatcaattcacccattctatgtcttgtgaatggaaatcttagtctgtttacacccaaggtgattatcgatatctgagtcttcattcctgtcattttgttaattgatttataattgttatgtatatcttttgttcctttctctctctctctctctgtcttattgtttatcattgcagttgggtggttttctgtagtgctaacatttgattcctttcatttccttatttgtgtttgctctaccagtgggttttatactttcaagtgttttcataatgatagatatcatccttttgctttcacatgtcagcctccctgaggtatttcttgtagtgctggtctagtggtgatgaattctctgagctttgcttctgtgagaaaagactttatttttccttcatttataaaggacaacttggctgggtatatggttttttctttcagtgacttgaatatattatcccattatctcctggactgaatgatttctgctgagaaatctgttagtctgattggagtttccttataagttactagatactttycttttgctgtttttagaactctctatgtctttgacttttttttttttttttttgagatggagtctcgctctgtcccccatgctggagtgcagtggcgtgatctcagctcactgcaagctccgcctcctgggttcacaccattctcctgcctcagcctcccgagtagctgggactacaggcacrcgccaccatgcctggctaattttttgtatttttagtagagatggagtttcaccgtgttaggcaggattgtctcgatctcctgacctcgtgatctgcctgtcttggcctccgaaagtgctgggattacaggcgtgagccaccgcacccagccatctttgacttttgaaagtttggctacaatgcaccayggggaggaccttgaattttatttgtgtgagtttctctgagcttcctgcatctagatgtctaaatctctttttgttagacttgggaagttttcacctataattttgttaaacaggttttctgtcccttttattttcttttcaccttctgggacactgaaaattcaaatatgtcatgcaagctttgttcattattattattttttatgtttttagtgttcatctgactgggttatgtcaaaagacctgtcttcaaattctgattctttcttcaacttgatatagtctattgttaaaacttttgaatgtattttgtatttctttcaatgaattcttcattccagagtttgtctttggttctttgtttttatacctgtctctttagtaaatttctcattcatattatgaattgtttttctgagttgtagtctatctcactgagataggctttaatattgttattttgaattatctgggatttcaaaaaattcttattcattggaatctgttgctggaggattattttgttcatttggaggtgtcatattttcttgctttttcacatctcttgtgtctttgcagtggtatctgtgtatctggtgtagcagttgcttgttctaatttttttttcttttctttttatttgagacagagtctcgctctgtcacccaggctggagtgcagtggcaccatcttggcttactgcaacctccgcctcccgggttcaagcaattctcctgcctcagccttccaagtagctgggattacaggtgcccgccaccatgcctggctaattttttgtatttttagtagagacggggttttaccatgttagccaggatggtctcaatctccagacctcgtgatctgcctgtctcagccttccaaagtgctgagattacagccgatttattaaattatcttttgtcagggaaactttttcttgaaggtgtatctatgctgccagttgggtaaagttccttggcttttgattttgggtgcaggcagtagcatagtctctatgatttatttgactgtaaacagtatcagtagtatctatgattccttcagtggcttagagtgtggttattagtggaagcctgttgtaaaattttgctggggacagggatgtgatgtgaatcagtctttagaccccagtggtggcagcagtgggccacatgtgcctctcctaagctgctcaggacttggtggatatgtgggtcctggtgtgagctccctctctgaagcaatgccatcacatgatttccaggcagctctctgtatcagtttcagagaccacatgggttgacagacttccccaaggctaggactgcaggagtacatggtgggaatgtggatggctggattcattcacttaatctttcctcatattttagggagcctctctaggctcatagatgatgctagctgagcaggctgccttacttctctcttcttccttaccttaggcatttcctgtaatttctctgttgaattcaaaattatattttagatgataagtctgattacctactcactccattggttcttctctgtggagcaggcaagtaccagatgcctctagcctaccgtcttgaagacaccctccaagacaagtttcttaaaggaggtatgctaaggtagaaccttttttttgttagaagttataaaattccaatggaatgagtatatacaaaaagagaacattattggttcatgtaaacatgatgttggctattatcagtgcttacttgttcctgcgtttgtctctgcctcacctgcctaacagcttgttctttcagccttgctttcttcatgaagctggaactgtagccagctctaagttcacttcatgccagatgcataagcaaaggagaaaggatctccaattacacctcgcaaaccgacattcattctgtgcaaatgagaaatatctcaggggaggactcaggcccgacttgggccacacacacacccattggccagtcactgtgaaacaattttgtagacyggttgtgagggcagaagtagaatttaacaaccttttctggaaccacataattgaaggaagggggaaaagttccccctaaatgattttggacgcacagttaccagaagaagagataaagataaggagaagaaaaaggaaaaaataaaaacagaaacagtatatactctaggaggtacatatggagtatcatgggaatttagaagaaagagattatttcttagaagaattcagtgaaatctgatggagtctttaaaaaatgaaggaatatatactctcaagtggttgcaaagaacatttcaggatagacaataccagcttgaaaatatgagttcagtgtagatgttttaaaaataagaaaagcagagtagttaagtgtagttaactacactttgaaattaatttttagtttattttatttttttgagatggaatctcgctctgttgcccaggctggagtgcagtggctctatctcagctcactgcaagctccgcctcctgggttcacaccattctcctgcctcaacctcctgagtagctgggactactggcgcctgccaccacgcctggttaattttttgtatttttagtagagacagggtttcaccgtgttagccaggatggtctcaatctcctgagctcgtgattcgcccgccttggcctcccaaagtgctgggattcacagacgtgagccactgcacccagcctgaaattaattttttagtccacatgaagcagatgaggaacatcaaaaccatctttaaatatatcagtcttgtagatgtttgtgaattaaattgattgacagagacagactaacaagaagttatttcagtgatctatgtggaaagtcttgagagcctgaatgtaatgagaataataccaagatataagcagaatcttgcactgaacattgccaaatattaaatactgtccctagttatttgtcagtgatattttaatgattattgccatcttcctcttttttccccattctccaaaactgcattattataatatacagtattataatatatatattatatatataataatatatatataatataatataatataataaggttatggattaactcctcttaattatctgaaaagagataacgttcatgtgctcagcacacaactaagtagtctgatttggtgttttttattttatttattttagaaaagaagactttcaaaaggagaaaaatctactgccaaataactcagcacctcttacagaaccacaagatgtggaagaaagtcattgaagaggagcaacggttggcaggcatagaaaatcaatccctggaccagacccctcagtcgcactcttcagaacagatccaggctatcaaggaagaagaagaagagaaagggaaaccaagaggcgaggagataccaacccaaaagccagaccagtgacaatggatagaatgggctgtgtttccaaacagattgacttgtcaaagactctcttcaagccagcayaacatttagacacaacactgtagaaatttgagatgggcaaatggctattgcattttgggattcttcgcattttgtgtgtatatttttacagtgaggtacattgttaaaaactttttgctcaaagaagctttcacattgcaacaccagcttctaaggattttttaaggagggaatatatatgtgtgtgtgtatataagctcccacatagatacatgtaaaacatattcacacccatgcacgcacacacatacacactgaaggccacgattgctggctccacaatttagtaacatttatattaagatatatatatagtggtcactgtgatataataaatcataaaggaaaccaaatcacaaaggagatggtgtggcttagcaaggaaacagtgcaggaaatgtaggttaccaactaagcagcttttgctcttagtactgagggatgaaagttccagagcattatttgaattctgatacatcctgccaacactgtgtgtgtgtgtgtgtgtgtgtgtgtgtgtgtgtgtgtgtgtgaaagagagacagaagggaatggtttgagaggktgcttgtgtgcatgtgtgtgcatatgtaaagagatttttgtggtttaagtaactcagaatagctgtagcaaatgactgaatacatgtgaacaaacagaaggaagttcactctggagtgtctttgggaggcagccattccaaatgccctcctccatttagcttcaataaagggccttttgctgrtggagggcactcaagggctgggtgagagggccacgtgtttggtattacattactgctatgcaccacttgaaggagctctatcaccagcctcaaacccgaaagactgaggcattttccagtctacttgcctaatgaatgtatargaactgtctatgagtatggatgtcactcaactaagatcaaatcaccatttaaggggatggcattctttatacctaaacacctaagagctgaagtcaggtcttttaatcaggttagaattctaaatgatgccagagaaggcttgggaaattgtacttcagcgtgatagcctgtgtcttcttaatttgctgcaaaatatgtggtagagaaagaaaaggaaacagaaaaatcactctgggttatatagcaagagatgaaggagaatatttcaacacagggtttttgtgttgacataggaaaagcctgattcttggcaactgttgtagtttgtctttcaggggtgaaggtcccactgacaacccctgttgtggtgttccacacgctgtttgttggggtagcttccatcggcagtctggcccattgtcagtcatgcttcttctggccggggagattatagagagattgtttgaagatysggttattattgaaagtctttttttttgtttgttttgttttggtttgtttgtttatctacacttgtttatgctgtgagccaaacctctatttaaaaagttgatactcactttcaatattttatttcatattattatatatgtcatgatagttatcttgatgtaaatatgaagatttttttgtttctgtagatagtaaactctttttttaaaaaaggaaaagggaaacatttttataaagttatattttaatcaccatttttatacattgtagttctctccaagcccagtaagagaatgatgattcatttgcatggaggtcgatggacaaccaatcatctaccttttctaatttaaatgataatctgatatagttttattgccagttaaatgaggatgctgcaaagcatgttttttcactagtaacttttgctaactgaatgaattctgggtccatatctcccagatgaaaaactgttaaccaataccatattttatagttggtgtccatttctttccaacactgtttgttatgattcttccttsagtacttatatacagacctgctcattatctaaacaatcttaccttctaagtaaaccttgattgtgatttccagtttttattttctctgacgtagtagaaaggaatgtttacattaaaaatacttttgtttctcataaatggatattgtactcccccctttcaaagcattattttacaataattcatggcattttaaaaaataaggcaaagataatacgacaaaaaatatacatggtttcaaggcaaattctccaataagttggaaaatgtaaaaaggatcaagtggatgcagcctctacctaaataattaaaatatatttcagtatatttctgaattaacaccaggtcttcattatttagaacttactaaattgttttcattttcttagttttacctgtgtatctccatgtttgcaaaaattactataagtcaaattttgccagtgaatttaactatttttctttccttgcaattaaggggaaaaaagcatttatcttatcttctcataccccttgcatctaagtacttagcaaagtcaatattttcccattttccaaatgcgtccatctctaacataaatattaattgaacatagagctatgtttggagtgagtggactggcaggacagttggaagtccatcacagtctattgacagtttcatcaaagctgtatagtccaactagtggggcagcttggctactatggtggaagtctcagcaaactgcctggttttgtttgtttgttttgttttaaggtacaggaaataagaggaataatagtggccaaagcaattagaacatcttcattccagaactgtgttcagcaatccaggcagattgatacatttttctttaaaaataaattgctattacagctagacgtcaattgggataaataaagggatgaagatccactaagtttgtgactttcatacacacccagtacatctcaaaggatgctaagggacattttctgccagtagagttctccccctttttggtgacagcaatattattatgttcacatctaactccagagcttacttcctgtggtgccaatgtatttgttgcaatttactacatttttatatgagcctatttataggtgccattaaactcaggtctttcaaatgaaagagtttctagcccacttagggaaaaagataattgtttagaaaaccataaaatcaatggtaggaaaagttggaactggttacctggatgccatggttctctgttaaataaagtaagagaccaggtgtattctgagtgtcatcagtgttattttcagcatgctaataaatgtctttccggttatatatctatctaaattaacctttaaaatattggtttccttgataaaagcaccacttttgcttttgttagctgtaatattttttgtcatttagataagacctggtttggctctcaataaaagatgaagacagtagctctgtacagggatatatctatattagtcttcatctgatgaatgaagaaattttctcatattatgttcaagaaagtatttacttcctaaaaatagaattcccgattctgtctattttggttgaataccagaacaaatctttccgttgcaatcccagtaaaacgaaagaaaaggaatatcttacagactgttcatattagatgtatgtagactgttaatttgcaatttccccatatttcctgcctatcttacccagataactttctttgaaggtaaaagctgtgcaaaaggcatgagactcaggcctactctttgtttaaatgatggaaaaatataaattattttctaagtaataaaagtataaaaattatcattataaataaagtctaaagtttgaaattattaatttataaaagtgaactaattgtgtgattatcaaatcctgattaatgagaagtgaataatctaaaaatcatttatattctactgtgggaggtattcttggtgcttccatgtcagtatcgggctctccattgtcctcatcatttatagtacttctaaaataataatggaaacctcaataagggtcttgtcctcttctgtcatcctaaccctgattctagtttaatgcctttcctgacttatatgccatttgtaaataaacttcctttcaaactgttagaacgctccaataaaacaaagttctatgaactttcatagtctagaaaaaccaacaagatcccccttatttagagattattagctaatgtgtgaaagaaatatcaatagaagttcaaatgctaatagctcaattccagataattgaaagctaaaatatctatgtactttgaagccaaactgagtttatttcattgatcgaacaagcagcaacacattttatgaccattgtcctaggtcgtttgtgtctttatgaatttgctgatattgtcagtccattttttaaatcttcaacaaaattcaattttaagattaagaaatcagcaattttaggtaaagaatattccaagattaaattgttctttttaagaaatatatcagttttaggtcctatgttcacacatcaatttgttcatctggaagatattcaaattcttattgggaatgaattacactacaaacaatgagttgagctaaaaactatacataacttaaattgagatttgcatacgtatttgtgtgtttcacaccaaagacccatgctcagagaatggtaacatattttccagtctatgttatgcaccatggatgttaggcaatgtgtgctattgccaacacatggtatttgttgaaatacatgttgctttgaccttacctaatggtgcttttacctaacttgaagtgctttttgtgttcccaccagcaaatcattctaacagcaggctaacaatggtgaagtaaaatgaacatttttgggccgggcgcagtggctcacgcctgtaatcccagcactttgggaggccaaggctggtggatcacctgaggtcgggagttcgacaccagcctgaccaacacggagaaaccccgtctttactaaaaatacaaaatgattcaggtgtggtggcgcatgtctgtaatcccagctacccaggaggctgaggcagaatcgcttgaacctgggaggcagaggttatggtgagctgagattgcaccattgcactccagcctgggcaacaggagttaaattttgcctcaaaaaaaaaaaaaaaaaaaaaaagaacattttttggcaaaatatgaagacacgaaactgaagataaaggcttcatttccatagtggaaatcagtgtttacctgctgattcaaaaatactgacctagtatcagtgtaggtaagaccataaaatacagtgtatagaattatatataaatggaaaacaaaattagcttttgacatatgtttaagtctctaaaaggaatccacattttctttccagatacagctagtttttctccacatgtttttaaggttgatttccttgacacacattggtatccttgggtttctgcttccttgaaaagttgtggagcacagaagaaaagccttctctttacagataaaaaatgttgaacatgttcatgttctgacaatgaagcaatgatttcctcattgctttgcattaagaagtggttctttagttatgcaaataattcaataaccaaaaatgcttcaaagagtaataataaatcaccataggtaagtattctcaagaatgtttaaatttggtttattttcttgaagcaaagttatttaattttttaatttttaacttaaaatgaaacccacaaaatgacattcygtggtactgagtattttcacataatcagaactgtaaactactgattattttcatatactcagaggctgaatattttgatataataagaactagtatcatataacagaaaactagaaagaaggtttaattctttttctaatattctacaagcctcatggggaaaatgttttatgaaggattcaaatacattagataaaaattagtgtcaataatttaactttgtacaaattatagtctgagatcttctgagttttcctaagacaaaggagtgtattatccagcaatttattgttttgtgttgttataaaataaatgttctattaatgtatattttattttactaagttctaacacaaaaggccaaatacttatctttcctactaagaaaaattaaaccttactaatcttgactttcacagatgaaacactgaccagtcaataaacaacagccactgcattaatctgcccagcatgatcagatagtaggttagaatttgaaattcattaataaaaaattaataacaaaactttgtaagccttaatggtttaatatttccgtgtcattgaaagttcctatttcaaattaaacaaactacagcaggatatttttcctttcctgtttcaaaacaaaaaccagatgaagaaaaaacaaagacaaactcataggaggaaagcatggcttctcttcaattatacttctcttactcaatattagtaaccaaaaaataagcagaaattctcctctgccataattaaaagaaagaatggccttcgacttaagttctagttcctcaagcctgctttccttgtaaagtccatggtactaagaagcaaaaaatgcagagctgtggattgggagtgaacactacataaaatttgcagggtatcccaggacacccctcagtctttaatacaaaccaatttagttactctggagtgaaatgacttgtggatacactgttcaaccatgacttcctttatgacaaggagcacttatacatgtttccaaatgtgaattagcccttgaattagtttgaaaactgctacttgaataacttttgaagagaaagattttctttccggtaattttactccctaaaaaaggcaaaatactcagatgttcaatgtgaaattacaaatagttgtttgaagtatatatacttcaataaatagttctttgtgtatataaagtgttggttcatagcagtttccttgtcccttttctttttaaaattcccaactgattatgggtcaaaaactccatcttatatcagcgatgatttcattttaactatttataaggataatttagtattatagtattgctaactttaataattctaccatatctatatattacctgttagtgaggttttaatggctttacttaatacatatttgttcatcagcttaaaaaatcactaaattttttatactctgtaaaatatttgcatgggaattttagcttattatgtttgcttaactggtgtttttttcacttatgactgtcagtttatgtcttaatgtattctcacagaagaatgcataccatttttgttccaacaagaacaatctgttagttgataagcactggtaataaatatcactgaacccacccaccccctgatatttcttcctcaagttttctatcatgcaaatcacaaaatgaaaattggtgcttttacaaatatttgaaagctctcaatgcaaaataataaaaatgagattctccctggctttctataatatattaggatatgtgactgaaggaaatttaatctgaatttagagtgttttaggttttggttggtttgaataatttgatttgcattttggtattaaaatgtgctctgatttctgcgggcatttgttctgaccagtcattacctcttcccaacagaaaaaaaaaaaaaaaaaaaaaaactggcattggcaagttttaattaatatggcccaaaaatttgaccttgaaggatatttgtaaaccagagagtatttaattaactaaatttactgtttctgaaaagcaatattttcaaataactgccaaccaaagtgacactatagggatgtcatttgtacatgacaatttttaacaatgtaattcttaccactctcgacagacctgaatatgtttactaataactttgccaaatttttcaacttctagaaaaacaagagtgagtcttttgaacttcatcattttgcaattgaaataaatcttgtcctttcacctatatcttccatttaatatatgtagcaatacttagtatcatcccatcacaagtattgttaggcgacttagtggcggagaaatgtttgtaaaaagtagaatctgtacagaaaaaaaactagatcaattgtatttatttttattattttttagcttagatactatgttga

SEQ ID NO: 6825 - DNA, 37154 bp, Homo sapiens
gctgatgtggtccatgctctctgagccaggcctctcttgacttcttatgtttagttattcatgaaaccactgggcctgtctaaatggccaagtcatataggaagagacagagtgaaagggagagcaagagctagagtgagagaaagagagagagacatcttctcaccttcagacctgatcagaggcaataatgggagaccatgggaggggagagcctgatctgatgattccttttcagttattttctggaaagtttaaaaaatatggtattcttcatggagaagccaagatgttaggctgcaggcagtgcttatgctctctagcctagtgaggaggaaagcagtataggtaaataaaatgacatttagttggtaatataggcagggcctatatcaactgccacctataaaaggcgttggtgatggtctttagggggccattggcaaattgctacaacaaaataataaaataaataaaataacaaaatccaagtttatctcccagaatctatctgggcatatcattactgttggaaagacttatgtttaccaggtgagaaaactgatgctgagaggggttaaatattatgcacagcttctcacatctagtgaagtaactgaactaggatttatatctagggactctgtccttcataggacaagttgctaatttgggggtgttctcagggagaggaaaatgtctatatgctcatatgcacagattatccaaatcaaaactctttctccccattgtcctttctcagttgaactagatgttaataccactattgtattagtcgactaagattgccttctgcagaaaaccacctatgtctcctttctacccaagtgctctggggctcctcccctgcccattctcctccaacatcccattccacattctctttctatctctgcaggactccctgtagtcctccctgcccatccattatctccctcaagctgtcccctcagccttttctaacagggaaaggctggtgccctggtaaagagtcccccacccccatcccactccctggcactagatgggcttgggagacaatgactgcccctccctcatgctgttctgatgtctcttgttccttccagtcacctcccttccaggcccatgaggagggcctgaggcccacactagctagtcttttctctggaggttgtttgggggcagggaggaagtctaaagtagagagaaagcgctgccatgccttaagccaacctttccagaagtataatgcccttgccactagtagtttgggaaacaatttttattggcatgcaggcaaatattttgtttcaatagtggcatatttatttttatggataccttctatttttggcaaggaatgctgattttccatttatggttataatgtaatgttttattttaaaaacaaaatgacttagggaacaaaataagttgacttaaaaataaattattagttaaatatatatttagtatatacaagtagactacagaaatggcaaaatagattgaagttgaagaaacattgccttaagctaagcccactcaggatgaaattttatctgcccccaaatcaacatctcttgaaaagtggtccctatctttccttgtgtcagttcttaacacccagggggtaggcatgcttctcatgtttgttttcatagaatatctgtgttttcaggggaccaccatatgcaaaaatgtcaggggaggggtactcaattggattaagaagccagggcccacagaacagatgttttcaccctactaacccaattgctgtctgctttttagttgccacagtctaaacattctttaatgcattgtctttttcagtcattgctcaagaggtaggttagtataccagttttcatagtgggaaaaattaggagacttaataatttgctgcatatcttggtggccaagttttccagccctggtcagttaggctttaggacacttttcttaggcttcaggaatgtgagcatggaagtagtacagaaaggaagtagtacagaaaggaagtaatacaggaaggaagtagtgcaggaaggaagtagtgcaggaaggaagtggtacaggaaggaagtggtacaggaaggaagtagtgcaggaaggaagaagtataggaaggaagtagtggaggaaggaagtagtacaggaaaagtggttgtaagccatttaacttactttttttcatctgaactgtgacccccaaattatcaatttgtcttgtgaagtcacttcatttaggaaaagcaatgtaaaagtaaaaattagtatttattgtgtgtactaggtgmtttgcatatgtcatttctttaatcctgtaggaaataatatgttctccaggaggtgacaatgtctatatgattagattcacagattacctatccaaatctaagatctccgtcctctctcttcctttcccaagaacccatacatatttctattaattggtagaaataattattaatagactttgtcacttggccactgtgggctctgacgccctctagtgacagaaaaattctttggtagaagaagtaatatccctagatagcagtctacagaattgtttaagcaattatctttacttgagcttgaaactagaatagctaatttgtaacaattaacttttgtaacaaaagaattattatactgatcaaagttctgataatttatcagttaagattttttcagttgtaagaatctagcttaagcagaaactaagaatttgtagagttgggtaactttgggtggtccagggttcaatttaagaaccaaatgcatccagaacttggatagctctaccaaccttgatctttcagcatggtttcctctcagtgtggtttcctctcagcatgagttgactgttttcagctctggcagggccacaagctcccttcacaaccaaccacatcagtttcacatctcacatatttctacttcaaatccaatgaaaaagaaagggtttgtgtcccagtgtttccagtaaagatcccaaaatctactccaactgaatgtgatgtgctgattggcttaagccaagtcacatttcccacccactacctccctccacctacacatatacccaagccctgggattggtaccaatgccactgtgatggttaattttatgtatcaaattagctaggccatggcacttggctatttagtcaaacactatcttagatgtttctgtaaagcaatgttttggatgggattaacatttaaatctttacactttgagtaaaacatttgctttctataatgtcaataggccttatccagttagttgaaggccttaaaaaagaaaaaaaaaaagactgacttccactgagtgagtgagaattatgccagcagacggcctttggacttgaactataactttttcatgggtctccagcctgttggccaatgctaaagttttggacttgccagcctctacaatcatgtgagccaactcctatctatctttccatttattcattctcttggttctatttctctagagaaccctgactaaaagaaccactcacatcaaatagttaagaagaggggagagggacagtttttctaaagacaacttggaagtactattaccagaaggaagaagaaggagaaaggcaggataaacagtcatggatatacactatagctgggagttattaaaatcaacttattgcaatttagtaaaaacaatttggttgacaacattttttaaacattaggaccaaaggggaaaagaacaaaagtcttagtggtaaaaagatgtagaagtttttttttttttttttttttttaatcttaactcttcctgtttttttacatagtcaagattcttgtttaagtgttattcagaatgttcagaaaccaggatatcttttgagtagaagctttaacttatatggtatggtttgaataaggatggttgtccaaaacatctccaacatctgttggagtgcctgaaattctattattaaaattttatttctttgcccttgaaggcctgaggactctcaggaatatgctggtaaaataaaaataacctttagagatgcccaaactgttttccccagaacaccagcattcattaggtgttcattcaatagattcttcaaaggattccaaaggcaaagaagtttggggaacagtatatataattacccaaccctttgacattagcatactaagggccctgagaagttttggattaagaaagttttcaaattaaagtaacccagaattttctaagattatttgaccatgaaacatatgtctccccacaaagcacatattcctatctccttgaacttgaggataattagacgtacgtgggtagagggtaggggaagggggtatggcatagaaagagcaggaccttgggagcaagaatatctaagtttaattcctgactctgctatttattaactaaccatctttgccaatgttgcttaagcttttttggctacatttttttatttgtaaagtaagtttaataatcactcatctcactgggctataatgataagtattaagtaaggaagatccacatatgtgagttgctggcttataattcacactcaagagatactgattttgtcaattgtcctttcccctttttttctctcttccctccttccattccttcttcccttacctctcctttccttccctcacaccccttttccttccttctttttacatttttttatttaaatgaacttttcattttggaatagttttaggatttcaaaaaatttgcagagataatacagagaatgcccatataccatcctccttatcccacttctttttgtgtctattagatgctcagagtgtgtgcacaaggctggcacgcccagggtcttcctcatggcactaacagtctactgaaaggtggaacagagacaagcctatcaacacctacaagactggtggtaagtgcagtgacagatgcaaaacacagggtgatggaaagccctcaggagggtaacctaacctagatttgagggcccaaacaggctccagaagaaaatgtcaactgagaggaagcctgaaggatgaacagtgggctaagcaaagggttattaatgtgttattaatgggttgaatctaattgggaagggagagaggttgcagagtgaggtgcagagcttggtggacgatgccaaaggaatactgaaacctttagtgtgtccagtctggaactgcatccaaattcaggttcagtaatgatgtcattatccaaacataccttctgtaaaattcatgctaaactacctaagagctatctaccgttccaaagcaatagtgactttgaacagtgttcaccagagcacgaaagaattacaagatttttttttaaagaaaattggccaggaaataatgagtaacgaaggacaggaagtaattgtgaatgtttaatatagctggggctatgcgatttggcttaagttgttagctttgttttcctcttgagaaataaaaactaaggggccctcccttttcagagccctatggcgcaacatctgtactttttcatatggttaactgtccattccagaaacgtctgtgagcctctcatgttgcagccacaacatggacagcccagtcaaatgccccgcaagtctttctctgagtgactccagcaattagccaaggctcctgtacccaggcaggacctctgcgctctgagctccattctccttcaagacctccccaacttcccaggttgaactacagcagaagcctttagaaagggcaggaggccggctctcgaggtcctcacctgaagtgagcatgccagccactgcaggaacgccccgggacaggaatgcccatttgtgcaacgaaccctgactccttcctcaccctgacttctccccctccctacccgcgcgcaggccaagttgctgaatcaatggagccctccccaacccgggcgttccccagcgaggcttccttcccatcctcctgaccaccggggcttttcgtgagctcgtctctgatctcgcgcaagagtgacacacaggtgttcaaagacgcttctggggagtgagggaagcggtttacgagtgacttggctggagcctcaggggcgggcactggcacggaacacaccctgaggccagccctggctrcccaggcggagctgcctcttctcccgcgggttggtggacccgctcagtacggagttggggragctctttcacttcggaggattgctcaacaaccatgctgggcatctggaccctcctacctctggtgagccctctcctgcccgggtggaggcttaccccgtcttagtcccggggataggcaaagtggggcgggcgcgggacgcgtgcgggattgcggcggcagcggcgcacgcgggcacctgggagcggcgggctgctgcgggaggcgttggagactggctcccgggggctgttaggaccttccctcaggcccgggtgctcagaacgctggaggacttgcttttcttgggccttgatgcgaagtgctgatcccgctgggcaggcggggcagctccggcgctcctcggagaccactgcgctccacgttgaggtgggcgtggggggcggacaggaattgaagcggaagtctgggaagctttagggtcgctggagggggaccccggttggagagaggagcggaactcctggacaagccctgacaagccaagccaaaggtccgctccggcgcgggtgggtgagtgcgcgccgccccgcgggggcggggagagagcctgcagccttcagaacagatattgctcattttctggcagttctcagacgtaggaaataagtcagcaccgaagcagtggttaagccggagggctcggaagaacggcaccttttctttctcgaaaaagttatatgggggctgaatgagcttctggaggcttgtttaccgttttttattgtcacacagaaaargaaactgccttgtctcccttccgggaattctctctttaasactgtaagtcgctgcctgagtggtttcattttgttttgtttttctgcccttctctttcttcttttgccctttcttagcttgcactcccatggtgatttctgcttggtctcctgctggggttggtggtactcgttcycaccgcacagaacccggcgcctattattggccaagaaacttgagcagcctgttttgaaaagtccctcgctcagaaatgccagcttgcagatggctaatcaaagagacgtggatccaggaggctcatttgagtaccggagcctctgagagtccatggatttttattttattgggccccaacaaagtgccaggcatagcgagagaagtgtttacaaatgtgatctccgcggattctcacgagagccatgtagtggggaagataaccacatccccattttacagatggcgaaatgaggttcagagagcttcagtaattcagccaagatcacacagctagtaaatgggagatatgggattgaactcagatctaattccaaaactcaggctgttcgctgattgcatctgatatccagattacaccaagaggctgagatgtctgggtccattttatgattagaaaaaaaaatcctgttcctttcagaaatagtgtgcactatttgggmttctttagaaacwtccttggagaaaattaatgattcaagattgagaaaacatttatacaacctcaggccacactcttctctctcttgttattaaccattgcaccactgcwatgttggctgctttgaaaatctcatagtttttggacagcagtattagtaaagtgtaagaaaattgtcaaagcttggagctatgcttgttgaacttttgtaccaatagcacctttaccagaggctgcgtgtttaaagcccgaagaaaactttgcttttctgaaagaatacacacacacacgcatatgtaaatattcatacatttatgtatatatayatattataatacctataagttaggtataacttatatttgtatatgatatatggcctaggaaattaaggcttattaaataaaatttataaatgcagatgagtcaaatacaaagatcagacataactctatcacctaagtaatcattgtttacgttttgcagtttatcttccatttctcccctctaatmtgactcttttaaatttagttacacagaaattggttttgcgctcacgacatgcctaacatcaggcctttatccttaaagaagtttcracactcttgtgtcacctcatgtgtctacagaaaatgtttgcttttatgccttcacggttatgttttcttagtagtagcaataaataaaatagatgcaaagtgctaattacttggaatacagaagcaaattttaattctattaatgggctggacatagatgggtggggagctgttttctgcttttcccctcttcccctagtcctctgactctggtgataactatagtcaacaagtatccccatccttaaccccttttgcttctctttctctttccttctctcaaccttcctggtgttagttttctctttcctatttctgagtgtttttactccgacacttacaataaaaaagtttgaaatcccaaaaagttgacaaatttctaaaggagacagaaaaagagtcaaacttactttacaaattaatttgagaaatagctgtgggttgcattttttttttttattgtgcatgaccctgttattggccaagaaacttgagcagcctgttttggaaagtccctcgctcagaaatcccagcttgctaattgaagggatgtggatccatgaggctcatttgaattccgaagcctctaagagtccatggatttttattttattgggccccaacaggttttgtcttgcattatttaggacattggccaggcaatcactggacagccagtttgctctcctttacattttgtagaatggttatcttatggtcaaaggaaagggagagggcctttggaaaataaagctgtgtatttacaagcagtcatacagaatagttttgtggggaaaataaagaacagttatttaatttgtaatttaatcatttttcttaaaccaacccaaagagcataaaatggaatatttatttatttttgtagcttaatttgtaatttaataatttttcttaagccaacctaacgaacatattgggctgtttattttcatttttaatgggccatatttacatcacaaaggacttgagaagtcttacaaatacaataaaatgataaaatatgaattaagacattagcaaccaggatggaaaaacacaaatttgtaaatgatggccaggtttgcaagcaaaaattaaattgataaatggcagcacccccactaccagctayagttagactratgaaaaatcctctaatgttcatgcctgaaatacagttaccacccttagcagcaaattagaggcaaagaagttctggaatttggacgttgtctctgagtaagctctttgagacactggacaagtaatttccttctgaatactcttatactgacacataggagaagtgtcagtgtttcaaaggaatctctttgaaggctactacattgctttaggggtgccagattaccagagtaaactgccagtttgagagaataactgtttcttaagagatggtctgaaacctaagtaaggaaatccccccacttgaaagcccctaggaagttaattgcttttggcaaattatcttgggccccaaaagtcccttgatgagcacatgttttgtaataggtactaaagactatttacttatgatgaaaaataaaataacacaatttaaaacttgaaattgataaaaagcaacttgaaaccaaatttaggacagtgaacccatccctttcttatttttaaataggtaaatatagaaaaaatgaccacatgatgtgaaacaaaaagcaaatatttaaaaactacatttatactttatctcaccacactaatgtaaagaattttgattttacttataaattcttagccttgtctacacatatacataattgcatgtttaatttgagctatatatagtctgttttttgttcctttgcatgttacacaaacctttttctatttcyacataatttttatctcatattttttattggatacattatagagagagcatttattaaatgagctgggattactataatttttattatttattttttaatttattacttatttttataatttactattgaaaaaaagcatttcttaaatgtactgggatacatatatatatatgactttttcttgttactaaaaaattactcatagaacttacatattaaaattttaggacttgtgatgaaaaataataaaataatttaaaacgataaaaagcaacataattttatatgttgtaccttgtacttccttataaggtacaacactrcaatagccttagtgtgtagttttctttttgctatgtatgtatatatatattcataaaagtggaaaaataacatttaataaatcctctttattttctggaaaatccttgctttaaaaaaagtctttagctttttatatagttctacttctaacaccaattaaatatcttcaattcagtctcaagcaggaacaaatcttcagtccacttgcctacctttactgtctttgaagtgacagtgtgagtagtaaagcccaaatcagagagaaattgacttttgtaagattggtaacttcaccttccccggaaggaaatgaggtggttcttccctttgatcacaactgctttcttgatttgaaataaactgttgtacagcccagtcaccccatctttagacatttagaaatggcaatcatagttatataggacaactagcctgagtcccactaagtagaaatgatagtgaatttagtataagattatacctttaggctgggcaggtgactcacacctgtcacccagcacttcaggaggccaaggtgggtggatcatggatcacttgagattaggagtttgagaccagcctggccaacatggcaaaaacccaactctactgaaaatacacaaattagctgggtgtggtggcgtgcctgttatctcagctactcgggaggtcgcggcaggagaatcactggaacctgggaggtggaagttgcagtgagccaagatcatgccactgcactccaggctgggcgacagagtgagactccgtctacaaagaaaacaaagaaacaaaaaatcatacctttagagcaaggccagccttgtgaattagcaaatctgactacaaattcaatcagcagatgtactcagcccagcaaagtgagcaagcttactataggttgtgttaaggcatggactgggataaactggcaaaattagagtaaatttgacaatttgacattggattcattaatgatagcctgtccttcaatgaagtcaggcagcattgtgtttctattcacctctgtgttttgtgaggctataaaaatataagatatgagaaatgtgaatactttttatttgtgagggcagatatcttgaaaaagagagcgagaggaagtcagagtatgcgggtgaagactcttgtttttttgctgaggatttagctttggtttttagccattctcacagagatcattggtcctaattaactggttgttgttgttttttttcatgtgaatgtctgtaaggtttcaggcttgattttaaaaattgggcctatactcacagaaagacaaatactgcatgatctcgtttatatgtggaatctaaaagttttgaatccataaaagyagagagtagaatagtggttaccagaggctagttgggggcaaagttgggggatttagggagatattggtcaaaggatacaaaatttcagttaggaggaataagttcaagagatctagtgtacaacttgatgtctatagctaataacaatgtattgtatacttgaaaattactaagagtagattttaagtgttctcgccacacacacacaaaagaaaatgataagtatgtgaaggaatgcccaatgtaattagctcgatttagctaattatcttccaaaatatgtacataattatcttccaaaatatgtacataattcaagacatcatgttatataccataaatatatayaatttttttatttgtcgaataaaaataatacaaaaaaaccctgggcctatactgcccacaggtagtggccacaggcagagctggtcccaagcccctccctctctctgtagtcccttatcccaggttgctttattcttgtatgacccacgtggcccctctgggcttgtaagggctctggggctgtattttaggactctatagcccttacattacccatttcctctaccaaaggtcatttctcttatcttcaagcttatttttggaagggtcattatttcttcatgagaagtcaaattctgatttgcaagtgctgaacacagatgccattagtctataaaactcttatattctcacatgtaaatgtagtaacctgctaacctcagattctgcttcctctaacctagttgccctgcaactgtgatgaacctcaaaatcaccaagggtacttccccattctcagagatcctgattccttaggtctatgtaggggccttagcactttttattaaataatgcatcactacaggattctgatgtctgtcggggtcttgagaactatttttctgactctagcactaaactcaaaatgtaatttcagatggaatttcctaggctcattcattttattttatttatggcttggccagtcatggatctaatcagtaacttgcaactgttgcttcaactacctctgtcctggactttccagagattggctttaagaaagaaagaggacatccctgggataagattaccatgtgtatttttatgtacacattttgaaaaacatacaaatgaatgggatctttgcttatctcttccatgtagaaaaatttattttacttctatttcaggttttcaataatgtagtaggacaagatgacatcactatatccctgttttttacacagatatattagagatgcattatcttattggaaattttaaactattcaataataaactattagtcttttagaatttctttttcctcaagtgttgataagtaactgaaagtctacaagcagacaagcagaattagtcggtggaacttcatttcttgctccatttttgtcctcagcagtagagggtggtgagatttcaacccagcctagcaggaccaataagtctggaaagaagtagctctagttcatattggcacctgctaattctagttctgaagaccatgggaaatctcttgcctatttagctcagtgatcatccaagatgggaaattcttgggctcagctgtgagggatcccaagtttatatgtamcactaatgtctcacaaatcaagaatccaagagaatcaagagactatagttcattccttatattaaattcttaggactgccaactgggtggctacagttttgggggctagaagtctgatatcaaggtgccaactggactggttccttctgaggaccacgagggcaggatctgttcaggcttgtagatggccttcttttccatgtgtcttcacattatcttcctctgtttgtatgtgtgtccaaatttcctcttctttttttttaatttagaaatttatactgtctacaagctttatatagctttagttaaaaaaaagcaaaaaaaaaaaaaaatcaaaacaaaaacagtgaagccaagacactcttccaaagtctggacccttccggccttccaaatacaagagctctggaagttgtatataccaaatttcctcttcttaaaatgtcaccagtcacattggattaaggcttaccctattaacaccattttaacttaatcacctctgtaaagaccctatctcctgatacagtcayattcggatgctcaggaagttagggtatcrgtatcactatatgaatttgggagttgggggaggacacagtttagcccatgacagtcctgaatctcctttgctagatgcatgactgtgggccagtcacttcaccagttgggatactgccatctctatcagaaaaggggtttgggctaggtcatctataaagtcctttctgctctaaattgtaaatataatgagataccaacatttagtttaattgtttaaaattttagaagctaactggrtgctttgctggtgtcaacactcccctttacaaaaaaaaattcggccgggcatggtggctcacgcctgtaatcccaacactttgggaggccgaggcaggcggatcacggggtcgagagattgagaccatctggccaacatggtgaaaccccgtctctactaaaaacacaaaaattagctgggcctggtggtgcacatctgtagtcccagctactcgggaagctgaggcaggagagtcacttgaacccgggaggcggagcttgcagtgagccgagatcgcgccactgcacctccagcctggcaacagagcgagactccgtctcaaaaaaaaaaaaaaataaataaaaaaaaawaaaataaaataaaataaaaatctcactttctgtttctactgttctctcaagtacccctctgccttctgttacttctttgctgcattctgagaggaatggggtggggagcactctttcctgtagaaccccataacccatctattttcatcaatttatttgaaattcaaagccaggggttaaaatgtccactttcaatttgagatgtctaactttcagataaatctattaacatgcatttctaagtgacttttaagctaagcattttattttattgagctcgtatggaagggtaactattatacttgtataataaagtgcactttcaaaaatactcggttcaaatgtaaaataatattcgtaatattttaagacaaacctcctagaacttatatgtgtctttcttcccagagcagtctytatgggtgcctaaacaatactgcattattagatttttttcagtttataagccacacaagaaagttaacccatgtcatctctagaggcataaaaatagacagttgttctgagaaacatatctgtttattcctagttcagtaacagcgcaatgagatcctaaattatgaggtactttttgtttatcttattgtctcattggcaaccagcaactcctgttgcatttttgacatgggaatctatcagggtgtggttaataaagtacrtttccatggtaagtattctttaagaaaaaataaaccaagatttcatcagagacagaaattactgcaaactgtacttacyagtttctggtgatttgtataactgagctttcratttcaaaaattaaaaagttctctttagtgtaacatatttttgtgtcyagtaattttacttcaaaaataaaagagaattttctttaccatcaaacaacgttgctgtaatgagtggtgatatatttagtcctagaggaccaaagagaaataaaatggctttgattatgctggtttaagaaaatatatccgatkaaacagargttaatatttgtgatgtttgatttagtaaaattataagactaccaaagaaaactagaagagcaaaataaccaaaayttatataaagawttcaatgttgataattcaaaggtttagaattttttccacctttcaaatactaagttgctgttatagatttactaccattattacccagattttcyattttactaaaaaataataacacagttcgttatgataaatcagtatagatctttaggctcaacacaaccctgctaccttttaaacttttttattatacaacaaacacatatgcattatcaagaaaagatgagtttagcaaaatgaagaaaaatagtcttatcaactagaaataagcaccattaaaatttctgtgtgttaaaagataatatrctgctgaaactttttttttcttgaaatgtccctcttttctttcacttttcattttcttaatccctaaccttctactgttgaattttctggaccaccgttataccccctcatcaatagggcatttttttctgcagtagctgagcacaatggtcatattgaagaaattcccttgtgggggctttgcctagaggtaaaatcctcttggccgggtgcgttggctcatgcctgtaatcccagcactttgggaagctgaggcgggagcatcttctgaggtcaggagtttgagaytagcctggccaacrtggtgaaatgccgtctctactaaaaatacaraaaattagccrtcatagtggtgcattcctgtaatcccacctactcgggaggctgaggcaggagaattgcttgaatgccggaggcagaggttgtagtgagccaagatctagattgtgccactgtgctccagcctgggtgacagagcaagactccgtctaaaacaaaacaaaacaaaacaacaacaacaaaaacaaagtaaaaccctcttcactgtgatgactctaaagcttgcttttgtctctctaaatcacaacaaaccgtttgcagtgtgatgctgtgctcaaaattgagaattctcactgactgttccaggcatctgtctactcattcttgccatgctgagggctgtcatttctcaccactgaatgcctttttttttttttgtgcttctttttaaaagtcttttcctgtttgctttgaacttcaataaaaacagggggtaagaaggtaatatgcttttattttgtctgtggggtttttttcttccttcttttggttccttttcagatcctagctcatcaaggccatttgccacactgacactggaataagcctgaatgggggtctatatttcttccagtagttagtttaattcggtcattgagctgttgctctatttgtaaccgtcatgctagatccgagggctgactattcctgagaaagtgtggagatcctttcagactgccatggtgctagggcagagtttcagtcattatcttctgtgtctgctaattcttgcatcatttcttctactctgtaacctggttggctatgaaaagtgattcttcctcactgatgctgcaggcaatgggtgaatatccaattgttctctcaggttcttgtcatcggatacaaagaacaaatttcatgtgtccctgtttctgagaggttcaaagggagcaaatgcacagattctagcttaggatgacttccagcttctaactatttgtctgtgcattccatttcctcacccctgcgagaggttgcagtcatggtaacggctgttctgagaaattcagtgcccaaactggagggaggggaacacaaactcagcttcttcccragcttcagggcagggctggcaagttttgccttccccgccagcaagagccctggctttaggggtcttgctacagttttcccagactggaggtcttggggctggattctggttcttagcgaattcttgccaaacacctcccctttccccagyatccatttgttttgaaggttctttgcaggcttcttgccaataattgtcttaaaacaaatggagttgtttgcatacctagatggagtaaaatatttaggaaactattctacaaatatgaaacagcccagatttgggccagaagtcctggtcctgagtctcttgttagccactcttaactgtgaattattggacaaatcatttctcgcactctgtgtaatctgtcacctgggtacttgatgatttaaaccaggaattgtggcccttctcataatactgtctcctaaatattgggtgaatttagtatatcaaggagggcagggcactatacccgtaggggactctctctctccctctgtctctttgcctttctcagatatgcatctttggtggcagacctggggttcaaaccacagttgttttgaaatttctctttccttctccactatgctccccctcactgaaactttaataataaaagtagcacacttattgggcatgtatttgttatgtkccaggttctgtgctaacagctttaagtgcattattccacgtattttcacaacaagcctgtgaggaagaggttatttccacttatagataaagaaactgagacttggagaatgtaagtgattttacccacaaacacagggcagtaagtgggaggccctgttcaccttagaacacctggcttctatcattcatggtgctgtttctagtgtggtttgaagaacctgagatccaaactgctatacaagtgacctgctgctttcttggagagagaaatctgaaagacagtggagccctcacattgtctttgcctgtgcacagcagatactgccaattttgggtgggttacacttgtttaccacgttgcttacttcagaaatcaataaaattctcttcatgcttttattttacaggttcttacgtctgttrctagattatcgtccaaaagtgttaatgcccaagtgrctgacatcaactccaagggattggaattgaggaagactgttactacagttgagactcaraacttggaaggcctgcatcatgatggccaattctgccataarccctgtcctccaggtatgttacacaaaacatccagagattacagtgaaagtcacagttaggagtagcacatagtaatcatgactataataattttacagtttttggttcccctatattatataacataactgagagaaaaacaactatgaaattattttccaaagatgagttttatttatatttatcaygcttatttgatgtggttatggataaatttaatttacaagtgacatgcacctctgaaatgagaagactggtctatttggctccatttttttctaagcaaaaatgactcatttgtgaatatgaaagcttatcatgtcaaaactgattaggatctaccataacaatagtggaactctgaaagcaagagacttctcctcttaagggatatgtctcagcacttcccttcaatcagaaggtctctaagaaagctgtcctggcactgaagcctgcaaaatatatttgcattttgcagctgaataactagacgaataagaaaagcaacaggcagaaaccaacagcttttttttttaaatcaatactttgaagggcaaactaatttcagatcacaaatccttcaaacactggtaaattagaagctaagcaaaatgcaattgtgcaaacatttcttcaactttgagtagagttgaaaaaaggaaaatagcacatgggttcatgtgatagattaatagaacaaaaaaggactgtagtatgtttcatggttgtcctcccaggcttccagcactcaagctgtaaaacaggatgggtcctgtttgtgaaaagattctaccagtctccctgtgcttcatgtccagattttaataaccgttatggaaaaatctcccctataacccaacccatttatacttaaacccatttacacttaaatcttctccaacacgaataaagaatggcgtcctggctttattataacctgctaaacacaatcaatttgctctatgaattgaaatctttgttcataattttaaaacctaaaatgtaaattaaaatgaacaaaatatgctttgcacatcaaactgtcaaggatttttgtctattgctttttcggttttgctttgttttattttaatttaagaagtgaatgtaaattgttacaaacttttaagaaatacatttggatatatgagtcaaaaatttgaaaaaaaattttttttaacttttttttcttattattatactttaagttttagggtacacatgcacaatctgcaggttagttacatatgtatacatgtgccatgctggtgcactgcacccactaactcgtcatctagcattaggtatatctcccaatgctatccctcccccctccccccaacccactgtttatacttgctaagatagcaattaatttatacgaaaataccctgagaaaataatcaaaaataaaggaaaatattgtacacatgatatttcattatcaatatgatgtaggattccttaggtaaattctggaatatttaaagactgaaatagtatgtatcaaagtcatgttttctgatatatttctaatataatcctcaattatataaaccttcttaagtaatttccaactgatctggctggattaactgattctccctgatccgtctataaaatatcctggatggcatccaaccatgttaaatactcttcccacttcaattccctcttgttgaattttaggcttatcaatatctaagttgcttccaaatctgtttatgctcattagtgttgtgatattcatatgtaatttgattgaatattgcataaattaatgaaatacaaatacagagraaagacagattttatttctaagaaaactaggttgagtgctttggagaattcaataaagatgagctgctaaaatgttgttgatgaattttgtgagggaaaaataaaagttaagtagtaggaaaaaycacaaaaatctctaaagccattcatasagattattggtatgtttatgttttcctttcatcaaaaacgaagggagggagggagggagggagggaggagaaaaaaagaaagaaatgaaaaaggaagagaaaaatagacaaacaggaaattataggtgatgcattatggatgtgacttaagaaagaacctgggattataataacttctatatcacaaaattgtcaaatgattatatagttatattttataaattaaaacaaaatatttacagtatttttaagtgatttcctatgtaaattgacatttttgattaaatgatcaaagaagtcctccccacatcatcatattcaataagaaggattctatggtatactgcacacatatttcatatatacacattgtacatatatatatatacacacctgttatatatatgctcatgcatatacatgtatgtatgtattatatgcataggaatgcaacaaaataacggcaatatctccagattgttgatatatagttttttgtttgtttgtttgtctgtttttttgagatggagtctcactctgtagtccaggctgaagtgcagtggcatgatctcagctcactgcaacctctgccttctgggttcaagcaattctgcagcctcagcctcccaagtagctgggactacaggagcacaccacaacaccgggataattttttgtgtttttaatagaggcggggtttcaccatgttggtcagtctggtctcaaactcctgacctcaggtgatctgcctgcctkggcctcccaatctgctgggattacagacatgacccactgtgcccggcctgatacataagttcttattatactttcctgccttttccaacatttctataataagcatatgtaccattatactaaaaaaagtattttaaaatctgattttcaataaaacaactacttattttcttattttaataaattttgttttcatactttggaggaacgaaagaacctgtggtttactgtatctccattataccaaggaagttgtgctaggcacattctgtaagataattcattaaagagaccaattcattcagagaccagtataataccactagcaaaaaataaaattatacttggacttgggttctgttttctttaaatattgctacaatgttatatagccctatgcactatttttgaattttgttctgggaatctccagtttgttttttactattgacagactattatctttacttactaaaatagcatatatatttacatgtcataatttgctcatgtagtaaatattttgttttatcaaaaagaatatatgaagttattaaggaattcaygttcctaggaaacacagcagaaattaattttgctgtataggtgagcagagcagattaaactgcttatatttttaaaactagttataccattaacaattagagtcactagtaatgtttttctcacacttcccttgatattttctgtcactttcttcttaattctctattcccttaccttcatctagctttccccatagcatttttttagcacttgatatcaatatatttatttgtgtattgtctgcctgcatcccaagaaggtgaagtctttggtgatgaagggtttatcttatttcctgcataatatcaaacttctaaaaagttcctaggactcaataggcatttaataaacacctatcagataaatgaattttttaagagarcacattacataatgctttctaatagcaatacagtgacaaactttatttttaaagtaaattaatgcaaatatgtatattatttaaaattgtttgtttttaagataacaagcctgatagataataaattttggcataaatatgttaatgcttatcaaaactcatcagtacatatcctgtcttttgatgaaaaagtaatagaaaggggagaacaaagagaactctcatgctcactaggcaggccgagtgcagctctgacagcaatgcaagagaaatattactatctccatcatatgcaggatgaaatttaggcttggagaaaacaacacttygttaaagattttatagctgctcaagatttgaccaaggcttttaaaacttcaaatgytcttttccttattacactgtttcttatcaggatttgtggactttggaaagtaaaatgaaaagtcagagcaatgtgagttagtttgataatctcagtggccagtaacagctatccccactctgaatatataccaaccaacctctcccctttctccaaggaagttagttcttggcaaaggcatttcatgcagtgtactttgtcattctaaccttcctttttttttgtatgctcctgttgctaatcatcctatttctatgggcttcagtcactcttttagcttttgtcttgggagactttctgtctgttgacatgacttttaaaataatcttctcccccattgtatttatatctcattagcctacccccyctccccttgtgttttagaagagttttattgtctgtcatccctctatasttcccaccctgttacctgcccgtgtcctgttcaaacacttgctccttttttccttgggcaggtgaaaggaaagctagggactgmacrgtcaatggggatgaaccagacygcgtgccctgccaagaagggaaggagtacacagacaaagcccatttttcttccaaatgcagaagatgtagattgtgtgatgaaggacatggtaagagtcttaaaatgcaattgaaagaggccaatcttggaatttyatgtagaaccatttataagacaatttgaaattgsggcctactgtggtgctatgttgacacacaggaaagggaaggacaggtggctagggtaccgcagaaccaggtgccgagctaactactggtctagacctttatgagtaagtctaggcaattcttccagatataggagaatgagtaaatatgaaccctaggaacagggttcatcagctcaaatcaaaagctcagaaattattttttttctggccttgacttacgcttatataatggtgctcgttcatggccagaaaaattcagaagcctgcagatacaaggacacagaaatccaaaaggtaggtaggaatgctccccctttctttggggatttagtttgtcctgataattccatctggggacctgaattttcatggatatctcaatgtattctaaggacccagattgaagtataacagaagtgtttctagttttgtttgacatgaagaaacctctggacataaagcttttcccatccctattcagcctataaagcaatgtttctcatccctggcagtgcattagaattgcttagggagctactaaaaatgtttcatgtttaggtcccayctcagggcaattacatcagagtctctgagtgaggaccttggtattggcctgatggagtaagtctggggtagagcctaacattctacatttttaacaagctcccaggtgatgctcatgctgccagtccccaggtcaccctttgagtgttaaggctagagactagaggaacaggggagacgtctaagtattggtgaggtttgtcttggttgctgctaaatgattgctggccatttcaacctggggtttcctgttctgtgtttaaacactgactgtattactggtgtcatgctgtgactgttgatataagcagtggatctcaaaaatccatgcagctcctgcccaccattttcatagtctgcttataattagccgctataactaatagtttccaaactgattttctaggcttagaagtggaaataaactgcacccggayccagaataccaagtgcagatgtaaaccaaactttttttgtaactctactgtatgtgaacactgtgacccttgcaccaagtaagttttagtctttctctgattaaaacactagatataacatgagagttatcattttcctagggaagtaacactgactgagagttaagaattagggttctagtcctgctttgcctccaagcaactagatgactgtttgctcatttaaacactggtgaacttcctgtgtaggtgacactttgctggccacttaagctaaagatatgagccrgacatatgcctggcatcaaggtatcagtccagaagcacagacagtcaaggaaagcaatggttattgtgtttcaacagcatgagaatarcatcagaagagacttatgttccaggtgttacaaattatacagaaaaacttttcaactctgcctgaggagatggaggtgaagacatgaatgtgtctcatgacttgaatcttgaagaaagaaaagaaagagcattaacaggtgcacatggatggaatgcacattataggcagggaaacagcagctgcaaagagacaaaggaagctcaggaaaacagaatacctggctggagtgtaggaaagactgagaagcgttcagggctgaatcatgaagggccttgtcttttaggctaaagaggttggttttgacccaaagttagagaacctgccttgtaagtcatcttgggaagcttttaggagttcatctaataggcttaagaaataagcacatgatgccttatgtttyatttgctargaaaattttatgtacagttgtcccaggctctcccctggccacaagtgtctgagagtgcccctatgatgacaggctaggtaggcattggggaagcagctgacttagtaaaataataacaataatagtaattccaaatatttcataatcttgatttaattttcttgtcatcataaccttttgaaatagataatattatttccatgttattgatgagataaaaggctcatggcagtgtgacttcccaagctcacctagtcaggtaatgggcagaggctgtgaactcagacaacctgattgtgaatgtttgtctgtctgaaggaaatcacacatgaacctcttgagtctcctgatcaccaccggttgctaaaagtggcagcctctaagggccagctgagtaccctccctgagctacatcatgggcktggctatcacctggccattttcttggtctataggaattttttgaaattacttttgacagtttattttaagagctagtttaagctataggatttacgtgttcagtttattacyaggtttaagtttatttttgtatccacttcatctctcttgtgtgtcactattttcctatcttcctttaactcttgaaatcttaagacartcattccttatgatatttttcatccagccatccaaattatattaacttgtgccagctttagatactaatttagaaatatttgaaggaatacgtttgccagagatgcaaagatgaataaaatggcccctaatttacaaagtgccattgaaaattataaaggaattattctgccaggcttttgaatttctcctgtatttttttttctagatgtgaacatggaatcatcaaggaatgcacactcaccagcaacaccaagtgcaaagaggaaggtaattatttttttacggttatattctcctttcccccaaccccatggaaagatgtgaagaaaaaccaatcactcttgattastagaaagtcctttatttaatcttaaagattgcttattttcatataaaatgtccaatgttccaacctacaggatccagatctaacttggggtggctttgtcttcttcttttgccaattccactaattgtttggggtaagttcttgctttgttcaaactgcagattgaaataacttgggaagtagttcacaaagatttgcctcattcttacctataaaaagctaccactttggtagatttatgtattgttaatttcttgcccctgaatgcagccttgagagctgactgataagaacraatgaaattattcctcagctagtttctgagcaacagttttggggcattgagtggtattctcatccttcctatgaacaggtgttctctgcagcagcagaattggccaaaaatcagaagyaattcttcactattcattgagatctccctatgcaaaaagagaacacaagaagcaaaggcattcccaggaaacacattgcagggaacactttaaaaacttgtacttcactgcctcctcttcctcggcctaattgcttgtttttaattatttctccttcttaacttaaaatactatggggacacatgttatacaaaggtgacttagtagagtcagtagaaaagccaaaattagatattatcataattagtctagaaaaatccctttaagtcattcatcaactacagggtcacaccaactttcagtaacttagaagtattcaattttcccttctcagaacaattatctgtttcttcagttcagttgaagaagaaagtttgccttgcctttagcggttgtttagctgaaaatacatttgggatatttaagcactgtaattgtgctcagagacatacagattcttctatctcacattgactttaatgcatacacctattgagtatgtatgcttgagttatttgtgtgtgtatttcatttctgggcatccatagcaagttgatgttgacttgcttgtcctacggcttctgcatcctgccatagtcttgccgtccacatctttgctggacagagagtggtgcttgccatatggtaagtcaaaagccatctccttgctaggccagcctgtggtaattagatgactaattaagatatgtcctttcactagaacacttgacttagtagtacgaaagttccaaaatcagcggtctcctgcgatgtttggccacttttaagtttcactgaatttctcctttttccttcttatatttctcttagtgtgaaagtatgttctcacatgcattctacaaggctgagacctgagttgataaaatttctttgttctttcagtgaagagaaaggaagtacagaaaacatgcagaaagcacagaaaggaaaaccaaggttctcatgaatctccaamyttaaatcctgtaggtattgaaataggtatcagctttccttgaaaagaaaaatagagaaattagtgatttggctttttgttacttccttttacttttttgtttcttgtttgtttcattttgtttgagatggagtcttgctccatagcccaggctggagtgcaggggtgcaatcatggctcactgcagcctcaaagtcctgggctcaagtgatcctcctgcctcaactgtgaccctgggactacaggcatgcaccaccatgccaggttaattttttatttttattttttatagagacagggttcactttgttgcccaggctgrtctcaaacttttgacctcaagcaatccttctgcctcagcctcccaaagttctgggattataggtgtgagccatcacatccggcctgttactttctttatttaaacattgcttgtgtttgtgkgtgcataggttaaaggggcctcacagatgaattatgatatggtacccaaattaaaagtaaacttgtacacaaaaaccgtaagaatcaacaaaggagggaattgagagtgtgctgaaaatgagctgaaaaaagaacttggccaacctccatgttccgtgttgttgttatccctgcagagaaacagcctttaccaggcatgggttcagtatccaagcctgagcaaagagattgctcttaaagtttgtcataagggcacagcttaactttctctggctgccggttgaccttatgtctcaccatatcttttcccaacatggtatcaatatatttcagatagcaagaaatacaccgagaaaagaaaccagttgcacttaatggaattattttcttatttggggccagggctcagtgggagttaggattctttaaattaatatggtaaaaaaaatttcaatttgagccattttctggtattaagaataagaatagttacagggaagaaaattttrgagtagttatatttattatttattttaataagtctatatgaaaaataacctcmacctattttatgaattctttaggtttcttgcctttaaaaactaagacaatattgcttagtttctggcaaggccggaacctttcagaataaaaattgaatggtaaaagtaaccttcttaatcacttaatctagcttcctaattttatacatcaagcaactgattgtacttctttctgaattaaggaaaaattagaagttcacatttagaatattctaaagatatatttttatttgtctttctctgcttccattttttgctttctaggaaacagtggcaataaatttatctggtaaggcttttatcattttatttcatagagatggcatcctttagagtaataggccaatttcagagtaaaataatrttactaatttcagtgacatattatgggatcttgttatttctcatacaattctacctgctcagcataaagcatttatcaggcagtttgtttaaatttataatgartactcatagttaaaaataatcaagtaacaataagacacaatagtctgaggcttaagaaacttttccttcataatcagctagatgtattacagaactcctgcctaaaaagatctagaggttaaagtgtactgtagactcaggtattatcagtgtacccaactctataacaacatacatgattccattcagtkgttctttgatctgtgatttagagataagatgatcataaactctttgcttatacttttagatttgtgggtcattgatcattggatccataagagatgttataggtgatcttttccaatcctcttaatttataaatgagaaaagaagatacagaaatgttatgtattgtggcccaggttatttaacaaattactgggtatatggcaggatttggagttagaactcaaggttgtcttgtttctgtattcccctagtcagctcttcatagacctttaggacttagctataytctgaagtactataaaaagagaaataaacatggttttcactaatgggaatttcatttagaaaaacaaattttcagactattttctatttttcagatgttgacttgagtaaatatatcaccactattgctggagtcatgmmactaagtcaagttaaaggctttsttyvaaagaatrrtgtcaatgaagmcaaaakabdtgagatcaagaatgacaatgtccaagacahagcarrayagaaagttyaactgcttcgtaattggcatcaacttcatggaaagaaagaagcgtatgacacattgattaaagatctcaaaaaagccaatctttgtaytcttgcagagaaaaktcagactatcatcctcaaggacattactagtgactcagaaaattcaaacttcagaaatgaaatccaaagcttggtctagagtgaaaaacaacaaattcagttctgagtatatgcaattagtgtttgaaaagattcttaatagctggctgtaaatactgcttggttttttactgggtacattttatcatttattagcgctgaagagccaacatatttgtagatttttaatatctcatgattctgcctccaaggatgtttaaaatctagttgggaaaacaaacttcatcaagagtaaatgcagtggcatgctaagtacccaaataggagtgtatgcagaggatgaaagattaagattatgctctggcatctaacatatgattctgtagtatgaatgtaatcagtgtatgttagtacaaatgtctatccacaggctaaccccactctatgaatcaatagaagaagctatgaccttttgctgaaatatcagttactgaacaggcaggccactttgcctctaaattacctctgataattctagagattttaccatatttctaaactttgtttataactctgagaagatcatatttatgtaaagtatatgtatttgagtgcagaatttaaataaggctctacctcaaagwcctttgcacagtttattggtgtcatattatacaatatttcaattgtgaattcacatagaaaacattaaattataatgtttgactattatatatgtgtatgcattttactggctcaaaactacctacttctttctcaggcatcaaaagcattttgagcaggagagtattactagagctttgccacctctccatttttgccttggtgctcatcttaatggcctaatgcacccccaaacatggaaatatcaccaaaaaatacttaatagtccaccaaaaggcaagactgcccttagaaattctagcctggtttggagatactaactgctctcagagaaagtagctttgtgacatgtcatgaacccatgtttgcaatcaaagatgataaaatagattcttatttttcccccacccccgaaaatgttcaataatgtcccatgtaaaacctgctacaaatggcagcttatacatagcaatggtaaaatcatcatctggatttaggaattgctcttgtcatacccycaagtttctaagatttaagattctccttactactatcctacgtttaaatatctttgaaagtttgtattaaatgtgaattttaagaaataatatttatatttctgtaaatgtaaactgtgaagatagttataaactgaagcagatacctggaaccacctaaagaacttccatttatggaggatttttttgccccttgtgtttggaattataaaatataggtaaaagtacgtaattaaataatgtttttggtatttctggttttctcttttttggtaggggcttgctttttggttttgtcttccttttctctaactgatgctaaatataacttgtctttgatgcttcttggatcccttagaaggtacttcctttttaaccttaacccttttagtagttaaataattatttccataggttgctattgccaagaagacctcttccaaacagcacatgattattcgtcaaacagtttcgtattccagatactggaatgtggataagaaagtatacatttcaaggggtaggttttattattaagaaagccaaatgaggattttgaaatattctttcctgcatattatccattctagctacatgctggccagtgggccacctttcttttctgcaatttaatgctagtaatatattctatttaacccatgagtcccaaagtattagcatttcaacatgtaagcatgtcggtaagatagttgtgctttgcttagggttccctcctgtgttatggtctggaaagtgtctttaggcagaaagtctgagtgatcacagggttcgctcattaatttctcttttctgagccatcatagtctgtgctgtctgctctccagttttctatttctagacagaagtagggcaagttaggtactagttattcttcatggccagaagtgcaagttctactttgcaagacaagattaagttagagaacaccctattccactttggtgaactcagagcaagaactttgagttcctttgggaggaagacagtggagaagtctttgtacttggtgatgtggtttttttcctcatggcttcacctagtggccccaagcatgacttctcccatgtcaatgagcacagccacgttcccgagttgaggtgaccccacggtccagaatcatcctcattctggtgaacctggttctctttgtggtgggcatactgggtaggagaatcacccaaaggtcacccatgagctgcagaaaaaaaggctatttgcagaaggagctcacagatcacattgaaagcattgcatattcaaacatcttggtcttctttattggcatgcccacagggtcttctgacctctgattagatcagacactttttagatattgaatcatcagtttctgtacaactatctgaataaggtatataatcaatgaaatttagaatttttttctatgcttactcctgattggtaatttgtttgggtttagaattctatacaaggccatttgtaattttcctcagcactttaaaaatattaaaccatgttttcttaacatctgttgctgttgattatgtctgctcttggtgtaaatatcattcctttgtaggtaatctgtaattttttttcctctggtaatttttaaagcttcccctactactttcctatgtgttctgcagtttcacaacaatgactttcaatgtgtatttatttttacttaatctatttaataagatttaattagaaaggcagggctttcatcatttctggaaaaaatcccagctattttctctttaaatagtgtttctttaccattctcattctcttcttctgaaactgttgttattatctgttgaagcttcttgagttattttctaggtctcttaattttttttaaaacaataattgtctccgtatgttgcattttaggaaatttctcattactctttttaaattaactgttagtttttactaagcccggctagaatagtctatccactgaggtatgtattttgttttctatatttttcattcttaatgtttcttattgttccttttacatttttacttgtatatgtttcattcctgctttttttaattttctttcttctttctcttttctctctttttttttttcttcttgcagtgcagacagactttattagtacagcagaggtgcccacagagcaggcagaagggatcagtgcctggatctgtcccttcctccttctgccctcgctgagccctagtgtgtccggaattggtgggttcttggtctcactgacttcaagaatgaagccgcggaccctcacggtgagtgttacagttcttaaaggcagcgtgtccggagttcattccttctgatgttcggatgtgttcggagtttcttccttctggtgggtttgtggtctcgctggctcaggagtgaagctacagaccttcgcggtgagcattacagctcttaaggcggcccgtctggagttgttcgttcctcccggtgggttcatggtctcgctggcttcaggagttaagctgcaaactttcgcagtgagtgttacagctcatgaaggcagtgtagacctaaagagtgagcagcagcaaaatttattgaaaagagtgaaagaacaaaacttccaccctatggaaggggacccgggccagttgccactgctggctctggcagcctgcttttattttgttatctggccccacccacatcctgctgattggtccattttacagagagcygattggtccattttacagagagctgattggtgcgttttgacagggtgctgactggtgcgtttacaatccctgagctagacacaaaagttctcaacgtccccactagatcagctagatacagagtatcaacacaaaggttctccaagtcaccaccagagtagctagatacagagtgtcgattggtgcattcacaaaccctgagctagacacagggtgatgattggtgtgtttacaaaccttgagctagatacagagtgccgattggtgtatttacaatcccttagctagacataaaggttccctaagtccctaccagactcagaagcccagctggcttcaccccgtggatcctgcaccggggctgcaggtggagctgcctgccagtcccgcgccatgctcccgcactcctcagcccttggatggtcaatgcgactgggagccttagagcagggggcggtgatcgttggggaggcttgggcatggtgggctgcaggtcccgagccctgccccatggggaggcagctaaggcctggtgagaagtcaagcacagcagctgctggcccaggtgctaagcccctcactgccccagggccggcggggctggctggccgctcccagtgcagggcctgctgagcccacgcccacccggaactcatgctggcccacaagcaccatgtgcagccccggttcccgcccatgcctctccctccacacctccctgcaagctgagggagccggctccgaccttcgccagcccagaaaggggctcccacagtgcagcagcgggctgaagggctcctcaagcacagccagagtgggtgccaaggctgaggaggtgctgagagcgagcaagggctgtgagggctgccagcacactgtcacctctcactaggaggctggggcctggcctggaccagtttctcttgttccacctgaaacacatgagaatggagagcttagggctggccttgcttctggctcctattgtcataactctaatgttatcacttcattgaaaagattagacctctccttccccagtccctaggcagggaaccccagccactggggagagacaactttgtggggcctgggcttaggtatatcctctagacacttccgaccccaccccacaccctttagttctctgaggctcaacgcactttctttatttcattgacaatttatcatagtttaatataacttattccattatttaccttcttgaagatcctactgagttattttagagtcttttttagagttgctctattattttaattttaactgcagtgatttcatgctgactttgtaggctggctttcctcatgtgattttccttatgaatttttgaaatttgtaggcttatcttgaatagcccatttttttctctctgcactcatctctccatatttaatagttctgtgtgttcttttgccagttcttccagagtccccagttctgagccaagatttactgagataatcttgaggctcatacatcatggtgatatcaggactatcacagattcagtcatgcatttgggggcagcttggctcagccactggtcataggctgtgccgaatcttctcagacccttaggcctgtagcttcctagaagccacagtcccagggagtgtttggcagtaggtctgtcttagtagctctgtcttagctgtcttccacaagacagaaagttcagagagagaagaaggaaaagaaactggttaggcagacagttaggaggggtccttggtaaaactccttcaaacagagaaatagcctgaaaaaatcaaagctacaggcacagatagagcagcctggggaaaaatttagctttagctgcagagataakggagcaaggcctaacaaagaagcctttgttctttggataatcagcgggctcccaggaaaaagtttcctccccttttcagacatgtacatgatgggctccatgggaacttgcacagggagaggggcttacctaaaacatacccacagtttcataaacaagagaagctgtactttgtgcttacctaagacatacctgcagctgcacaggtaaggagagttacacagacagctactacacagttaagggaagttacacaaacagctacagagatgaaaggagttttttcttataaaagcttttggattcaactgtaaaagtggcaaccctctttcagcctcctctttgctgcagagagctttcttctttcaattattaaacttttactccaacctcacccttgtgtccaggctccttaattttcttggtcatgagacaaagaactccaggtactacctcagacaacaagactgaaacattgtggtgcactggcaagactgcaacagttctacatcagcccgtggttttaagaagggagcctggttcctgttctgcctcaggtggggcacatttattccgtaccaaacctaaaagcaggctttgctttgcttccaagcattgatccaactaagctttggcttgttgtgcacaagtcatcatcttgtagttgtttccattcttataccatgaaaggattgatcttatttttgagcttggctatgcctttttattttcctttagagacattctatgtatcattgctatttgctcagattggtaggaggtggccctcaagaaatgaacttacaatttggtattaaccccagggcccattagataactagaaacaatgttttgttttgttttacattttttagttaaaactaaggatcaagttgtttttcagttatatagggccctttgacaggacttgatatggtttggatctgtgtccccacccaaatcccatgtcgaattgtaatccctaatgttggaggtagggcctgattggaggtgattggatcatgggggcggagttctcattaatggtttagcaccaatcccttggtgctgttcttgtgatagtgagtgagtaattgtgagatctggttgttttagaagtgtgtagcaaaggccgggcacagtgactcacacctgtaatgccagcactttaggaggctagggcgggcagatcacctgagatcaggagcttgagaccagcctggccaacatggtgaaaccccgtctctactaaagatacaaaaaattagctgggcgtggtggcacacgcctgtagtcccagctactatggaggctgaagcagggagaatcacttgaacccaggaggtggaggttgcattgagctgagatcgtgccattgcactccagcctgggcaacagagcgagactccatcccaaaaagaaaaagagaagtgtgtaccacctcccctgacccttgctccttccctggtcatgtaagacatgcatgctttcccttcacctcccaccatgtttgtaagtttcctgaggccttcccagaagcagaagaagctacatttcctgtacagcttccagaaccatgagccaattaaacatcttttatttataaattacccagtctcggctgggtgcggtgactcatgcctgtaattccagcactttgggaggccaacgcaggc

SEQ ID NO: 6826 - DNA, 31463 bp, Homo sapiens
aataactaaagttacttaggagaattctcacattatattttgatgtatttggaatattagagttatctgcttggtacatagttggtgctaaataaattttcttgaatcaattattaaatacattaatgaaatggctgaacatttctaatattaacatacagagaagttgggttgatttctcttgaaaatattttttaatattttatctctaatgaagaattttctctttattttctctctggctttacatgccaactgtatatgtgtttcccccccmcacacacaattttttttaaaattctccttaaaaaaaattttttttttgctcctcacactttgccaagtcccactcctaagtttttaaatttgtttatcattgacttataaaaattagtgagtgcctacaaggtgcaaaatgccaaacctaggccttgtagggggatgaaaatattaaggagacaatttagtagaggaggaaaatgcagaatggtgtgtaggctcagatactgtgtaggctcagatacagcagcaattcattctgccaagtgtgaggagaggagtggaggtgaaggtgggcactggtcagggggtgcggaggattggaggagttttccaagggcttaaagtagtgggtttgaaggattttcataggtgtgggataggacatattagtattcctgctcaaaataataacccaaacaaaggtacttggaatggtaaaaaagtctggtataacaggtaaatggaagagtttactagaagatgactatggcaatgaagtctgaaagaggaaggaccttgaatatcattccaaagagtctggaattgttctgtggttaatgagccatcatcagtggtttcaagatggagctggcatgatttgacttcgtttttagagactgactctgataccagtgtgaaggatggagtagaaaggcaaaagaatgaaattaaaaagatgagattggaagctataatactagccaaggcaagagatgatcatagtcataatcatagcaacagccaacacttattgaggaatgcctgactatgtggtagccagtattctaagccctcagcatgtctccacccattgaattcttagacaactttcatgaaattgatactactattatctctccacatgaggcaattgaggcgaagcgaggctaagtacttgttcaaggccatgcatctagttagtggcagagcccagttaaggaagtccagtttcagggcgtgtgctcttatccacaatgcacaaactcatgctgcagttacagaaagagaaaagagggcacaaccacgagtgatggaattggtaggacttggtatttgatgcgaaaggaagggataagtgatgactccaaaatttctagcctgaatggtggaagtttgcaatgccattagttgaaagttctagaggttgaggaataggttgagctgatgagttccataggtttaaagccaataaactcttcatttgggcatatttagcttaagtttggaaatcgggatatgtagttcaaggcttaatgatagaattctgatcttgaaatcatggtagctgatgagatggctcaacagagtagaagtaaacctggatgcttaataaggcaaaagaggtaactaaatatgcaaattagatggcactgagtgtggtacagcctgtggctgacctcagagtggatgtatatcctgcctaaatattccatttcatttattttattttattttccagagtcttgctctgtcacccaggctggagtgcagtggtgcaatcatagctcactatagccttgaattcctaggctcaggcaatactgctgcttcagcctcctgagtagctgggactacaggtttatgccccaaagcctggcttgttctctgttttgtttttgtttcctttttttttttttttttttttttgagatggagtctcgctctgtcgcccaggctggagtgcagtggcgtgatcttggctcactgcaagctctgcctcctgagtagctgggcctacaggcgcccgccaccgcgccaggctaattttttgtatttgttagtagaaacggggtttcaccatgttagccaggatggtctcgatctcctgacctcatgatccgcccgccttggactcccaaagtgctgggattacaggcgtgagccaccacgcctggcctttttttgtttgtttgtttgtttgttttgttttgttttgttttttagtagagaaaatgtctctctatgttgctcaggctggtcttgatctcctggagtcaagcaatcctcccacctcagcctcccaaagtattgggattacagacatgagccactgttccctgccccatttttaatgtatctgtttggccagagggtgggatggaagaagctgggaatagaaccctggtccacattttatattgaagctgtggacagaggaagatgaggcagtgaagaaaactgaggctgggccagagtaataagagaactgggagtcattctctccagaaacagcctaaagaaggaaggcagatgaaagtacaggctgacacagaagtgtgggtagggagagggctgagataggctctcatatatttgccagtcagcaggtgatccctgagagagctacttctttggaatgaagaaggttagggagggaatagaggtaagaaaattaagtcagaaagtgccaaaactattttaggaagtttgcagtggagaaaagagagtcagatgttaactgttgtgggacagcagagttggaggaaggttcttatttgaagacaggggagtcatgagggctgaataaaaggaaccataagggacacaagaagctaaaaagaggtgattgataatgtatggtctaataggagattggaggaatgggctcaaaaatcacagacagggaggggttacattttgttcctacatcaatgtcaggaaatgaatggagaaaatggaaacagacaaggggaaagtgtgagtctcaggataagaaagttgagattgagtttatgtagatgtccttggtcttccttgttaaggaagagggaaggtcatctgctgaccgcctggggaagggcctgagaaagtgggcacctgcagcacagtcccatgaagaatgggagagtgaatctggaacaaatccaaggtgggctccaggcctggcacaccttgcagaggttagatcagctggctttctagtggagcaagctcataaagtcacgtttccaccacacccacagtccttgaccacagatgcaaagaaggccgatgcctaagtttacccaatcttaggattaggtaacctggctggagtggacttgtggggaccagctcatgcagatgctggtttggagggatagggggtggagatggtgcactctggggccaccctggctgggaaggaaacccagacagactgggctggtttaaatctgccagtctagacatctaatcaggagaatccctcatccattcatcaaaaatgtccctgtaacttatgtttaaaggtcactttaaatgtccagcaaataatttgattctaaagatatagtgaaggcaagtccatggatgatatcttaattggaaaggtaaaagatcatttaaacttatcaatgaccacttgtggtgttgatctctgtttgctttcagaggtggccaaagacattttacagatatccacagtgtctcttttagaaacagacatagtggaagtgatggtgctttcctcgcttccagaagcagggagaagcaggttggagatgttcacactgcctacattactgccacaaggtaaggaaaacataagcagccagttctgctcctgagcccagatacattgttgttattgttttttgggtttgttttgtttttatcttggcatgtgaagaggtaaaatggccaccttttgtctatctttacaaagtaaaaccaacatgctaaacagtttgaagtgtggacttttcctctgggcttcctgactcatgagtctgctttattaccataggaaaagagataggatcaacggacacatcaaattgatttgttatttttgtgatgtctcttgttttgtagctttgaatagacaaggttaaattcagatagattacagtgtagttcccttcactgacaaaattataaagacagttttctggataaaaaggtatgagaaaatagatactctttccttgttttaatgacaaatatatcaggttagcagttttgcaaatatataattatagagcagaagagagccgacaacctccaagtacttttatgtttttataagaatctctatactaccatgggtttcttttaatatgtctctaagttaattgattaaaaattaatcaaggcattacagaaatattttacccactatcagtcatttaatactcaagtatttctagggagacaagtgtttttaaatcatttttatcacctactagcttccgcaatattagttgagcatttaaattttattttgcttttcataattgttcataattttaaaaaaacaaaattaatttatggtacaagtgatttctcttctttttccaaatctaatagtttccacaacctttgctgatgaaagaggaaggctgaaagatgaaatcattcataagtacctgtatgagttggagcacgctctgtcctctgcagtcttgggctttcaaagtaaccaaatatatggcttctgtagtcaagtgccatacatctgtagctaccttcttcctgaagaagtatgtcaacacttaagtgtgctctcatttatcttagcaatcaagattgatacattatactgattagatgtgatcctcttgaccactttaacagaatagttcagttaacaaatgccttcattttattaatataattcccttgagctagatatatagtgttatttgttaatccatcatacaatatatttgagcaacctgatacttgtgccacatacatcatctttgtcagataaacatgcagatgacacaatattagtttagtsccttaaaaaacaacctagcattaggaaatctattctacatatgccaagggctacaaggtagatgatttgatttgcagtggaactttgcatctaagccataaccaaaattacaaaaaataattaaactgtgtttctgacattttttcattacactctcttcagacttctcatgcattgtgtcacctcctgctgcacataatggcccagtaccctcctgcttgctgccccttgacctgtcactttcccttgatgtctgtctacccactttgataaggtctgccttccttcctctaaattcttcagtcaaagctcttctttgacagagtagccaggactagacacagagaaggaataaatgattagtggcaagagagattcaagaaaagtttcatgaaggaagcaatatttgatctggactttgaaaagtaagtcagatttagacatggagagatattgcatacaattttggtgggcagcgctcatatagggaggtagggcaggactggtggggatggagtagagtagggcattccagacaaaaggaaggacacgtgcagaggcttggaggtaggaatgcatgaaacatacggggaatattgactacattattttgacttaagcatgaagatatgtgaaaatgattagtaaaagcaaagattatcagtgtaggctaggatttttaatggcaagtaaataaagaagactttacttagttggcagaaacaaacttttatttgcaaaagtgggaaacatgatgcaaacgcaggtgtccactttatcctatatccatttatttacaatgacaatgtttgcactttatgccatatcaktttatttacaatgacaatatacaacaggcatgtatatctgcaaacccaaaggtgctgtttacctgatcttttctataatgtggttattttctttgattggcaggaacataccggtatctacattcttaaaccatacaaaaaagtacaaagcagacagtatggacctggactgctctatctgtcttcacatggattgtggctcataacaatagctaaatgtggaattctgtgtatccgagacgtttatactttggtaagctgctttcttaaaaaaaaatattgtgggtgtatatattgatctcatataggaaacattttatatgtatataaaaatttgcttatatatgcataaaaactctgaaaagatattgaaggtactaattaccttgcttgccattggaagtattaggtcatgggaacaggaaggagatttcacagaatactcttttataatttttgaattttgaaccatttgaatgtattgcctatttaaaaacctaaatgagaaaaggcatcatggttgagaaccagtatgactcagaaatctcagtttttaaattgttgccctatataccaaattgatgatgcattttgtttaagttctaatcaaactggcttagttagcatccttcagagcatgttatcttccattcttcacagtgcccgtcaccctctctcattatactcagctacttcacacataaatagaacctccctgactcttgaagccatcggaactcaccatctctgcttgctgaaggccccttccctagctttatagacttctgcaatccattcacttctctgtgtctgatttcctattataaattggtgataataatccctgtccttccatactacacaaaggtagtggaagaacaaattagtattggtgaatgtggtttgaactggggattttaaatactatgtattgccaattgcctacttccataccaattaaaatgctgttagcaaatagaaaatgatttatccacaaaaaaggggcatataaccccattagaaaagccgtgtggtagaattgcatttgtaatttttctggtttatttcttaactattgaggaaacatttgcttggtgtcggagtcattctcaccagggtcatgggattcagtcaatgagaatttcaatggatggacaaaacattctggtgaatgggagagatgatggcacccttgtctacctaaagtggaagtacgtacagtattcagtaagtaaccccatgtagtatagtgtgttaaaatagagattttattattatttaagtacagcaaggccaacgtgctgggagaccactgccagtgcaaagaaagtttgttatactcacagatcccaagagaagcgtacactgcattctcgggtaccacatggggcagacctggggtgggtcaggaggctgagagagggaggaaaacgtggatgagatcctctagtatggttttcacagggaggattgggcaggtttaggattggctagtttgaatattatcagtgggttctgaggcataggagctggctgtagttgtctcatacttggccctggggtgattagggtggggaaatggtggccccgattgtgaaagcccactagaggaggtggttgggggtatggtctctggattgatcggtttgcttttgaaaagcgtgttccagagcaaattgtttactatcttcagagactggctagcctccagaagtcagcaaggccccagatatcagagcatcaaaatacaaaaaaaaaaaaaagacatagttaatatttatctgagagtgatcagtcctatctctcataacataagaaatgtggacaattctgaccctcagataactttaaaaactcctgtttatccctgacatatacatgtatgtatatatacacacactttcctaattagattttgcttagattatatcaaagacagtttcagtccccaaacaaggaggggatccgttttagggaggtactattatcatccttgcttccaagttaaactataaacgaaattcctcccatggttaggaggaatgaacaagaacatccagcctgtgagactagaaacaagatggagtcagccatgctagacttctttcactgccgtaatctttgcaaaggtggtttcaatcatgcaattcattttagaaaaaataatatttcgtgatacctcctgtgatcaaagcagtaataaaatacggcccttctctgcaacattgtgaaaatgttaaatgttgtggagattttgtatcataacaattttgctagccacttacctcaaaaactcatttsaggattgcatcatcatgcccattttatacatgggattctgaatagaatattagcttttatctcactatgtaagtcctaacatattgtttataaccagcgaacaaatactatctcaggcaacaacaaacaagtgctggagccttatttatgcagctcaaaaagaaggacattttgatccattggtaatcacccaaacttctgactcaaaacaaagctgggtttaaaacgatggtctaggccaggcgcagtggctcacgcctgtaatcccagcactttgggaggctgaggcgggtggatcatgaggtcaggagatygagaccatcctggctaacaaggtgaaaccccgtctctactaaaaatacaaaaaattagccgggcgcggtggcgggcgcctgtagtcccagctactcgggaggctgaggcaggagaatggcgtgaacccgggaagcggagcttgcagtgagccgagattgcaccactgcagtccgcagtccggcctgggcgacagagcgagactccgtctcaaaaaaaaaaaaaaaacgatggtctaggacttttgactttgtgaccttggcaaatgacaacccctctaaatcatctgttacaatgttacttaaggtagggggtctgtagcatctgtgagcttgttagaaatgcatattcttggatcccatctggactttctgagtcagaatgtctgcaagtggggcccaggaatctgtttttaaaccctcccagtgatgctgatgcgtccaaagtttgcaatgccctggtgaattaagtggaagtaataataccactctcaatgcagggtggggtgatgagggggccacatgtgattatgtgtgtgaagtagcacactgcctggtgcattccgagagctcagccagtgcactggctcttctgtgcaatgaccagggcaggtacagagggcatgttgagtaagggtatgaggacagtgtgaggagagggtaccctagaaaggtcaagaagcttgtcatggcctggaacccatgaaagggtctcctgtaagaagcagagtcctttagccatgcatggtggtgtacccctgtagtcccagctactctagaggctgaggtgaaaggatcatttgagcccaggagttcgaggctgcagtaagctgtgattacatcactgtactccagcctaggtgacagagcaagaccctttctctttaaaaaataaaaattaaaaaaaaaagaagaaattctgcaaaagaagtaggcactgaagaagtttccacaaggcactgtgaagaattgtccacatatttccttggttagttacctataaactgaaatggttagttacctgaaaataatasagctaaatgtgattttttaaattatgatttttrtagcctctgtgttttcttttttattaatataggcgattyggaggacacctagccagtgaaattctggactattaccagaaactattaatttccctgagcagcgccatggacaaggagaatcattatttaagcacaacaccaaaagtttccgtagatttgggatccgattctgaacacacagttgagttcctatatgactagcttgcttgcttacatttctttctttgtaaatcagaagttttcggtttgtggttttctttaagcagatatttagtaatatttctctttatccaggtatcccatgattttcaaaaagggaataagctacgtctgagagaaaatattcagcctttctcaaagcaattgcaaatagtacatttcagatctcatttaaaccatagtacaagatccaggcttgcctggaaaaaaaaatcttctacccacacttgtgcttggtcaaaatggtctctctatactttcatattacagatattatttaggaagtgtctagctaaagaacagtattcactcattcaattaacaaatatttatagagtgcctacagagtgctaggctgtgggggatatagccatgaacaagaaagaaaaatttctgcttccatggagtttacatcctaattgggggttggagatgggcagggagaaacagataaacaagcaaatgcagaagaaacaatgagatagtaacaagttctattcagtgaataaaaataggttgatgtgatagtattgggctggatagcctctccaagcagacatttaagctgagatctgaattaaaagagaacaccaccatgcaaagacaatgggagggtagcaagagtattcagggcaaagggggaaagagcttggcrtgtggtatgttaggacctaaaaaagacctgtgcagttgaagcgagctagggagaaagtggtgggaggtgaggtcttcaaagtgggaggagaccaggtaacgaagrgctttgtaaactaggtaaagagtttgaattttattttacatgtaatgagaactgagtcaggtgttctgaacacaggattaacaargtatagttgacrttattgaaatgactatttgatgctatgaggagaatgtttcctgtaggtgataagaaggatmagaagcagggacattgctcaggaggctaaggcagaggttcaggtagcaatgatggaggtggaggagtcttgtgccaaggagagaagtggtggattccaggtgggtttcagaggtagggttgatagaactcactgatgaattggacatagagagagaggaaaagaaagggcccaagaactcctagattgttttacttgaacatttatgtagaagatggtgtcattcatggagatggggcagactctgggggaagggggcagctatgaagagaaagaagggaattcaaaatcagttttacccacattaagctcgagaagcctgttagacatccacgtgaagatgccagttcagccattggatagatgaaccttgggttctggggagaggtcaggactggatatgttgatttgagtcaagggcatgcggatgggatttaaagccataacactaggtaaggacatcatggaagcatgaatggcaagaagcagaagaggaccaggacagagcaacttctggagaggcaggagaagagttcagggatgcagaggaccctgaggaggggtagccagtgaggttacaggagaaccaggagaacatggcatcccaaactctttcaagacattttgctgcaaaggggagcatagaaacagggtggtgggccggcggggacggtggttggcacacacctgtaatcccagcactttgggaggccgaggtgggcatatcacgaggttaggagatcaagaccatcctggctaacatggtgaaaccctgtctctactaaaaatacaaaagattagccaggtgtggtggcacgcacctgtagtcccagctactcaggaggctgaggcaggagaatggcatgaacccaggaggcggaggttgcagtgagccaagatcataccactgcactccagcctgggtgacagagcaagactccgtctcaaaaaaaaaaaaaaaaaagaaatagggtggtgtctgaagaagaatgtgatggtcaagtgagagtagttttcctaagacaggagatagtagagcatgtttggatgctgttgggaaagatcctgtaaaagggagaaattgatgatacagaaggagatggcattgaaaaaaaattgtgttaagtattaagacttcaaaaagaagaaaaaagatcctaagcatagatggtgrcacaggccctgatgggcaggaacatttgggtcacagtaacaaagaaggcaaagagtggtgacagtgtgactggtctgatcatctctgcttcctcagtggaagctgtggctactataagggcagactggtgggacttacctgaataaaatgttacatcttgggcagacaaaatgttggagattattttcaaaaatgcaacaaatacaaaggaattcaaagcagttacatgtggtagggtgggaggggaaaaacttgatgaattttaactttaagacatgtctgtctttttctaccatgtatcagaaacagaaggcaagcactgacttatcacaagatgaattagttctaaccgatgttaagaaggaaattccttggatacaacaaaaaagccaagaggtatttgtgaaacatggggtaggtttgaaatagtgctctgtagatgcaccaaatagattagtttcctatggaaacctactggaaagttagaagatggaatgagacaccacttggcagagcattacaacatacaggtgtaacttttckgaaagcaaataaacaccctaaacacagcccaatcatttagatcaagttatatgagctttaagaactgtacgtaggctgacatgcaacccaacaatggtgtccaggtaagccacagcaaaggatgaactgcagtactccaccgtggagtgagttttaggggatgcttgtcttcctctgtcctgtggaccaggaacaggggaagggatgctgtggctgcagctattcaggaaggtgactgactgattacagctcgtgtctggatttagcctattgatctagtctcaagttcccgataaaagtgcatactggttttccttaatcaactgttcactaatttttcactgcttcattattttctttccattggccatataattgacatcagtttcatgttgctttaatgtcacttacatagtagcagttagatttaagcaaggtactgcagtggtattacttcatgtacactttatattagtctttacaaattttagtttctgtttctagagaattgctctctctctctctctctctctctctgtctgatatttctcttgctttgttaagtgatatacttgttctgtttcaggccatcaaaaaggaggttaatctgttttccaagaaaaggaaagagataaaacaaggaatcaaatcactttccaaaactgtaagtgttgtaatttcatattctaatacctttggccctcattctaaaattactttttgaacttaattttgttctaccctgaggaactatacctcccttttctctgcttgtaagctcagttttctgaggttctttaacaagataaaatttctccaattcacactccatatcaacagcggttttccccatcttcccccaaattaccatcttatttgtctttataatactgatttttatcaaagttatgcatttatatttttacagattaaataatactgagttgtgtagttaaaaataatattttttaagcagcaactgccctacttctcttgactgattcctgtactcctgaggtaactgttttctcttctttctactttttcatttgggctgtttacctctgtctaaatagtcttcttaatacygttgttatttcttgatatttctgttttgatgctaactatgggtgtcctggtatggaacatgagtagttatgcttgttactgctccccatccccactatagcacacatataaatcygtgcttggaatacacactatgatagttatttgaatattcttcaatgctgagccacatggtatattattattacatttctgcttttacaacttgatttttcttagaattaatagttgcctttgttttgggtaagcccttctatgacctattcaaactcaaaatgctaacaaattcttctcaatacaatcaaatacctgaagtgatcaatctgtgagtgcattttttgggcaacctcccttctagagctttccatcctccagctccagtcaaagcaccttgctcttgctctgtagaccaggtgtatggctgccgtcctagagatctgccttctaagtcagagctcctgtttcctgagtcccacgtgattttctttgttttcttggtgtgtattcttcagtagcttcctatgcaggactgctgtgttgtgccatgcttgggaacatcctttataaaatctgtgcttctggggtgccatccaagtggaatccactgtgaatgatgccctgctgctagacctgtcagatgctttggctctgttcttgagaaagggtacatgagaggtacattttgtgagatgtggtttttcttaaaatgtgattatcctacattcataaccatttgatggtttgccttcagaatgttgaaggctttctccattgtctcctggcttccagtgtttcctttagagaatccagtgcctgactcccaattctttgtaggtaaccagatttttatctttggagacttatagaatcctctctttatccatagtgtttggaaatttacagttatgcaccttgatatgttcgatgagtattctaggtttgctggtacaaaccaagactctcttcccttttccactcttctttgagccccaagaggctggcctttatggacagtagcaatgcactctcttgccttctggctttctcttgggtttaggcaataagtagcatcagcaggagaaccccattgttgctattcatgaaggccagcctcttggggctcagattgcagggcagaagactaagaccagggtcctcattctcccagtttcctccctgtagggttatgagttggcaatgaccgccatccttctcctacatttatgggtctctccaggttcattaaccactcccagcctttgcccttcagacctacgagcagagatggcttcccgagcccgcagttggtagcctaatgctttatcatgtgttgctggctctccttactctgccaaatcttttttttttaagtttctctcttcagttttcccatttgaatgtgttactttttcctaccaggaccctaggtgttttcttcttccatgtgctagacttcgatgggcattttaataggaaacctttgtctcttggttttagaaaaagttcttaaatcatttccttggcctttgtttttattttcctgattactaataaagctgagcaccttttcataactctaaacactatttgtatttcttctcttgtgaatttcctgtttatattctttgcctatttccttattggataattggtcattttcttgttgattataggagttctttatttttattttttatttatatgtatttatgataattagagttagctagcctatggtaacaaactcagaaaaacatagtggcacagtgatgagaaggttatttcattcccatgtaaccatcctgggtgggtatttagctcagcagctgctctgttccatgcagtcattcagagacccagactgttggagaccctgctatcttcaactcagggcttcgaagattgccttgcttgatctcatttgagtcagttggaaaggagaagagcgtggaagtgtgaatgcgacatatctaaaggtagcccttattattaggtggaacttcatgcaattgctgttttatgtggctcaacctacaaatattttctagaaaagtatatggctcatcctactmtaaatactttcttttaacttttataatgtgccaaattttaaataattttattataaagcagaattttaaaactatggcatgatccaagttattgatcattttctttataacttttgggttttacctctgattttaaatgacctttcaaagtcacacatattttcttctaatgctctttgatttcatctataatttatttttgtgaatggtatgacatatagttctaattttattttttcaaataaatagcccatttccccagtctgttttatttaatatactatcctttctctgctgatttgcaatgtctyctctatcaatccctggatataggattgttgctggactctgttctaagattgaatattgatttttcttgagccaataccaagctattttaattactatcactttataatagttcttgtaccttgagaataattctccttttgcccttctttaaaaaaaattggcctttttatgtgtacttaattttccattggaattttaaattcagcttgtcaatctccatgaaaaactctgatttgattttgattgagaatatattgcttatagtttgatttggagaagaatttatctgccagctctgaactttagtatatatataagtatgtrtgataaaactttactgaagaatattttttaaattgaattaagatatatacagacagtccccaactcacagtggttcaacttataatttttcaaccttatgatggtgcaaaagcaacgcacattcagtagaaacttgggcgtggtggcacatgtctgcaggcttattttgatcttttcccagagtagcaatatgcggtaccatactctctcacaatgttgggcagcagcagtaagccacagctcctagtcagccatgcaatcacgaaggtaaacaatgaatattctgaagtgtactgtgttgccagcattttttggatatcgtgttttatgttttcacagcccatcatgtctacaaatgccccttttgacatgatattttcatcttaccatgggtttgttgggccataaccccatcataagttgaggagcatctgtatatttatatatttacatctttcatttatttatttagagacaggatcttgcttagtaacccaggctagagtgcagtggcataagcgtagctcactgcaggcttgaactcctgggctcaagcawtcctctcacctcatccttccaagtagctaggcctgcagacatgcaccaccacgcccaagtaatttttgtatttttttgaagagacagggtctccctatgatgcccaggctggtcttgaattcctagccttctgccttggcctcccaaagtgctgggattacaggcatgagccactgcaccaggcctgtatatttatttcttttaaaatatataacttttaaagttatattttctttttggttttttttttttgtttgtttgtttgtttgtttgtttgttttagayggagtctcgctctcgctctgtcgcccaggctggagtgcattggcatgatctcggctcactgcaagctctgcctcccaggttcacgccattctcctgcctcagcctcccgagtagctgggactacaggtgcccgccacctcgcccagctgattttttgtatttttagtagagatggtgtttcacggtgttagccaggatggtctcaatctcctgacctcatgatgcgcccacctcggcctcccaaagtgctgggattacaggcgtgggccaccacgcccggccagttatattttcattaaatatataatacttacatatgtgtatattatatatttatttatctttattcaattttaaaaaggtaatctccagtgaaagtttatagtttctctgaaagtgactttaaatttcttattaggtttattttaggtatcttatagtttataccgtttttgtgaatggaatatttttctattgcattggtgatatggtttggctgtgtccccacccaaatctcatcttgaattgtagctcccataattcccatgtgttgtggaagggacctggtgggagataattgaatcatgggggcgggtctttcttatgctattcttgcagtagtgaataagtctcaggaaatcagatagttttaaaaaggggagtttccctgcacaagctctcttctcttgtctgctgccatgtgagacatgcctttcctttcactttctgccatgattgtgaggcttcaccaaccatgtggaactgtaagcccattaaatctctttcttttgtaaattgcccagtctcaggtatgtctttttcagctgcatgaaaacagactaatacaattggtatatgttatatattggtatatattattggtatatgtgaatgttactgatttttttctgaccaccttgttgaattctttttagttctactattttgtcacttgattgtcttagattatctaggtagactatcatatcttttgaaaataacatatttctctcatcagtctttatacttcatttatttttctagtcttatgattctttttatgaaatacaatattttgcatccctagttactgtaaaattatacccttctcactcaattaacttttcttttgggcaacaagtcttctatttgttgaatttattgtctctctccagtggtcttgttgttccccaaatatttagtgatttattgttattatttcatggttgtctttataattgaaactccctgttatagttccatgacaccaggtcagtctgctttggaagaagtgtaggagatctgactttagcaggtattctgtctgctctcagtaaaaagtgaaggggtgggtggtgttgggaagtgtcttggcatcccattgtgtggtgggggtkgttctctattctttctagccactaacagattccttgggccttgccctgtttctcccatccaaatattcattccagtttcttctacctggagacaaacactccagttactactgctggaccctagggaacttcaccaggtagggttacaggcaggttctactgtctgtttctgatgcagcacccccagctaatcaacctgccagcactcttaggtaaacccttgttcctgtatctggtgtagcttccactcgttgttgagtgctgtgctgagggcattcrgggctgtgatgcatcctgctgatccatctgatttccgtctttcagttgttatagttttcatgctcctgaaggattctattccttttttcctcttcattgtagtaatgggtttatctatgctatatacttcttttctcttaactttatattttggggcaaaaaagaaaaattgttaaactcattctcagtctaccattttgaaactgaagtcccatttttttctatcatttgtctgccttgtttttatttgtaagtgctttttatatattaaagacattaatattttgtcatatgtgttgtagtgtgtatcctttgctcctgaatttttttaagttatgaacttttaaagataatttttattgtatagaagttcaaatttatacaaaattggagagaataatataatacatccaatggccaatatcatttcaccaatgcttccatccattacccctcccctgattattttgaagtaaatcccaaacatcatatcatctttaattatttcagtatgtatctctaaatgataaagactcttaaaacacataaccacaatgctgttagtgtacctcaaactagcaacagtgctttaatatcattgaatgaaatgatgagcttatatatttttgtagttttccttattaaatgaaagagtttttaaggatgaaaccttaaaacttcaataaccacaataagcccataatctaattatttacttagtagtacattttgataaatagaacatctattttttattgattgctgcctaaaagaaactaagaaaattatcttattacagtttaattctttacttgtcagcactcttttttatttcaacattcagattctgaatatgatggaagaaaatgacaaactagaaaatattgcaaaattagaccaacaggaatttggtctggatcttgaggaactagaaaggcttcatgatgaaagtcaggaagaagtggcaaaggtatgaaaaagtataatttaagcaccataaagttatgatgaaagaagtaaaaagataataggaatgggaactttttcataataatgtgaatatracaaaacctttttcagtataatgtgaataaagcaaacatagtgcatataagtataatgaatcagaggatcatcgaatttgggggttaggagcagggagaacatctaggccagccagacatctgacatttgcttcccctccatgacattcgtgccagccatacgtttgaacattgttggaagtcttctcagccacctcatgccaactttggacgcttctggtttagtaagccctttcttaattagagttgaaatctttcttcctgtactcactgatccttctactctttgagcacttcctactctatggcccctctgagagtggtagaggattagaaatttccatgttccctgtggatcttctcctgtctgggctaattatcccagctcctatgaccatcatatattatagtttcaatagcctcgtcatcatcatgccgttttcctctggattaattatatttgcatatggtacccacagaagaattcaaattattttctgtccagtgtagagaaaagcataaactgaaacctccattcatactatacttctattaattcagcctttgtattattttctggcagtcacatcaaattgtttgctcatatggattttattttaaataaaagccctaagtgtgttttacacaggatattctgaagctacctctttctcaacctgctagtacaggttaattttttgaatgtgcaaatataaaaacacaggagaatgcaagatagctggattcaaggacagttaaggtggattataatagattaaacaactacaccaagaggaggttgattatttgactgatgcctctaggagggaggtttccaccatgtaccccaggacttggtcctgataaacatgtttattaatgactggggtgaagatatagaaatgaggagatttgtcaaattagtgaatgacatgagactgagaaggtgaggaaatgtagtggataacaattaggacaagagtatctcaacagactgacttagtacaataaaatttacctgagataatcattccttcattcattctgcaacatttattaatgtgctgggcatattaatctaggtgctgggaatagaataaagaagacagacacatttctgctgtcatggggctaatgtattgaagaagacaggccgtaaacaaatctctacatagtatatgatggaaacaaactggatgctgtgatagatgtgggagatctacttytgtggtcaaagaaaaccacttcaagggctgacatttcagttgagaactaaagggagagagagatctggctgtgcaaagatctgagggaagagaatgtcaagcacagggagcagcaagagcaaaggcccacaggcagaaatggcttggagtattccaggaacagcacaccagaaaggctgaagcatcgtggatgggagagagcctaatggaatgaggttggggaggtaggcagaggctagccctgacgrgcttgtatattgcggtaaagaatttggcttttttattaactgtgcaacaggaagctatgaaaaaaaatcccattttcttatcacaagaggtaggcaccaatctaggagctttttaaatgttatttattttgatcatcacaatcaaaagaggcaggtgatagtttgccgcacttgaaaaaactgaggcttagatagaggcttagagaattagagtcacttggctaagatcagagccaggaagatcctgactcttcctccttggctctggtttggctcaggctcggaatgccccctgctattctgcaccaagttctcccagcccactcatcttgaccactcagcaatgtgtgtgggttcagtgcctgcccgcttcctcactgtatctttgcttctctctccaagctgtatacaactacttgacacagtgaacctgctcccctggcccactgaactatttaccattgccaaactcatcctacctaccccaccgccaccctgtgcctctgccccagatgcccctccttgccacttaccaaattcatgctcatccctcaagagttctccttgatcctctgaggcaggatttggtgcagagaaaggccttccatatgctagtttccctcatattgtttwtttttttttcttgagctctgtgcctttgaagagatagtaacaccagattaggtacaacagtggcccaggagagaacagtgttagcagatggcaccataaactcagctgtttaggagctttcagcatgtttaggatcagaatactagtccttgggaggagttagtggcacctgccagtcaaggatgtgaatgagagactaggctactaccctaccccggccaggatcccaatgataggaagaagaccaaagcccgataatgacaatctggacacattattagggactgagtttggaggagttgatcaaacagcctcagcagtggagagaggagggccgagtgggctaggaatcaggcaggctctgacaactgatatgccaagccagctgtctatttagaaagaaataatttaaaactatattagctattaactcactggatcagaatyaaaaagaaatgaattgcaaattaaagtcatttaatcagacaataaaataaatagaaattcacaagaagtactaaaaaagacattttaaatctgcgagatattagtcttatctagtttgctaataattctgccaacaaaatgaagtgcacaaaggtcctgaagaggatcctaaggactaaagattgttagatctcactttcacaccaggcctttcagaaaactctattaaaataagaatacttaattatttaaataataagcaataggattatgtaagcaagtaaaactaattgaagtaacatgtttttaagtggaaaaaaacacagattgtatgatccccaagagtagtagagggttctttttattgtggatgtaaataatagaagaattaagtacagtaaagactcccagacagaggtcacaaactggcacttcaaatgtgtgttggcgagatttcamccaacatttagatatctggcagtttcacttaaaaatatgaattccagacctctctaataaaacaggaagacttcgctcagtggttttgcttccctgctgttccaaccagcaggctttgtgcacattagctacgcagctcaccaccacagtgcatccatcctcacaccccacttcactcgtgtrtgcaacccgaccatccttagaggtactgtgtgtcctcaaggaagagaatccaagcctacagacaaacttcaggagacgttctcaaaggcagagatgtgtttcccgaaagtgcatctcagtgcaaggkggctcaaagtgttggagaaagacaaactctaccactgaaggtgcagttaatggctacttagtgagtttacaatggagattattatttctgagtccacactttcatttttatcttttccctttgtctgtgttcttcaagatgataaaggatgtagagatgcataacttagccaagagctatttggctgaacttatcaaagaagaatgttggaattcgatggctgtgaaaggtcgagctcttaaggtaacagatagaaccctaggtacaaaacctgaygagaattgtcaycaaaagctcaggaaagttttaaaaataaatttaagaaaattcaggcatagcaaagcactgagagcatggcttgccccttcctatactgaatttcacctggatgtgtccctgtctcttggttccttccctctgtgctcagtccccgtgtgcttcccagccagcatttctgaagatctgtcttagcattcttttcctcctttcctctcaggcacccactgcatctgggtcttaatagctgtctrctcactcacatttcacacagattgaaaggtagacgaaatctggttcatgtttctgcctgtgcctgccttcccattttctaaggagctgtttctcattgagattccctccaatgtaatttccctctttgtgtagggtgaccaaaagtctcaggtcttgtctgcaatcccagagtaactattatcagcatccttttcactttcaaatatgctcccaatgtggacaatgaagtatacggccaccctacattttatgtgatggatattgctctaaaacagggtcctcatgagccatacattttgggctggatcatttcttgttgtgggggctgttctatgccctgtagggtgtgtagcaacatctctggcctctatttggagacagtagcattgttcgcctccagtaattacaataaaaaaaagttgccaaatgtcttgggggcaaaggatagggagagaagggaggagaaaaattgctcctagttgagaactactgacctaaaaatcagcccttcacaaaagcacagtattttatataaagtttataccaatactcatggaatacattgttttatttttaaaaaggtttccattgtcaattttactaacacatgataacctatgggttaattttaatcacagaaaacatcccctactcaaccccagatacacacaattatactacaaatggatttattttgtcttgcgtttttttccccaagtgttttcatatcccctgtgtggttgaaaacttcccratgaaagcgcgcacggttgaagagctgaaagaattggaaagagttttacagcaaaagaagattgaagcagagtgtcttaaagtactattttaaatatacatgtgtttatataagtgatgtgctttattttagagtctcctttgttcaggtttgagttgggatgtaatttaagtttaggtattgtatgtatttatatttttatttcttgttaatttgtagaatatattctaataactataggagcctatatccacacaataaatcaaggagcctgtatcctatacaacactggctagccctcaaatatgaggatataccttaaaaagtgagatttggtgttctgctcttaycctgcrcagaggttgtcttcatccacacatatccttttcatcctcccttgtcactagggattgtattttaagataattgatcaaggatgaagtagaatttgttttgatgsaattatggttttcctaaatcccaactttttaagcaataatctctgtcaaaccactaaaaaaacactgcccttcagtgtagttttgttttggtcrgaactttgcacccactctttttctgaaacaaaaagaaggcatgcttaattcgtgttaaccttcacccactgatcctttgttaacaggtttctttgtaaaatataaagagaatatatatttcttaatacttaagtaccaaaaaagactcaaaatatttacaagcagatgtcatactgacagaaagatataaatattacacaccatccaggacaatttttattcctttgatttatctatcatttatcagtttctgaagccttaatctcttctgcagcagttctgggatctattcatcacttcsaattcagttgttggcaagacaattcaacaaattaaaatgattgttgaaataattaagttgtcacaaaatttccctttagaggattcttattattgcataacttctgtgtcatctttttctacatgtagctacggaaggaaattgtagaggctcagtctggagttaagttgattaaacagcgtcatgaagaggatgatgaagaagaggaagaggaagacaagacagtaaaatatagcaatttgcccaattacctgcttggtagtctgagtactgattttggggtagatacctctttattgtcaagccaattggagcttcattccagagaagagaaaatcaaccaaattatattattgaaagtgggtcaattttctttttatcctgaaaaatctctagactccccattaggtggctttcaaggcctcacattgaaaacaaatgccaatcaaatgatgatttaaaaatacatagaggaggctgggcacagtggctcacacctgtaatcccagtactttgggaggacgaggcagtcagatcgtgaggtcaagagatcgagaccatcctagctaacatggtgaaaccccatctctactaaaaattaaaaaattagctgagcatggtggtgcgtgcctgtaatcccagctactcgggaggctgaggcaggaaaatcgcttgaactggggaggtggaggttgcagtgagccgagatcatgccagtgagctggatctgcactccagcctggcaacagagcgagacactgtctcaaaataaataaataaataacaatacatagaggaatatacagatactgtccatgtcctttagacagatcttgtgtacaagagttgcgttcgaccatttggactaggttactgtgataccaagttttctaaagaacattccacaacagctgacaccacaaaccattctgttttggacttcagtaagctcaaagagaaaagaaaacactagaattccgttttctcggtatacccaaatgtcaattaggatttccctgtaagatcaagatgttattgtttatctatctgcttaacctggggaaagacaatttcctctaaatttctgtaaattctggggttcgaggacaaggtgttggggtccctctggctctaagctcctactccttaactttccaccaaacagtcttagaatacgtctatacatgtagaaaccctgactgaaggtttttgaaaaggcagtgactgagattgtgccaatgaagatagtttgaaattgaatgctggcaatccctgttcctgaaaaccctccagccacgtctgcaatttgaattctagtctcctgccatgttcttagctctctcttcctatcctcttctttttatgctctagcccctgaaatttctgttcatttacactcagagctatttagttacctcatttgttgctcagcttctgccttcagggtctcaccttcttgctgcttttaattaaggtgttttcctacaaggaggtaatttcagcccaagagaaatttttgtgctagctgttcagatcatttttttcaccttgctttaatggtttcatcttcagtaggatagacatagactaaactcctatggcaacataaaggccactttggattgacccatcaccaggagtgggggcaatccagttggtcccactggcaccttaggaattggttactccagctggctagcacaggtttctttcctacctgagaatggtgtgttcatatagaagaagagtattgtgtgtggtggtgattctctggcagattctccaaatactttctacaaactatctcttcttttccacatctaccccaacccaggttccaaagaaaagacatgtgccaacttaaatcctgtatattgctttttaaatattttatagtggattttgtacaaaagtagagagaatagcccaatgagcctctaactacccatcacccacttcagcatttgtcaacctgcacatggagttacaatttacatttcaggaagtaggttatagtctaacaattatgtggtagccttaatcctacccatacctggatgccactgtagattattgagccaagaaatgacttaatattaagtagtattctagaaagattcattttaccttcttaaaagataatttgtggggccaggcgcggtggctcacgcctgtaatcccagcactttgggaggccgaggcaggtggatcacaaggtcaggagatcaagaccatcctggctaacatagtgaaaccccgtctctattaaaaatacaaaaaaattagccgggcgtggtagcgggcacctgtagtcccagctactcaggaggctgaggcaggagaatggcgtgaacccgggaggcggagcttgcggtgagcagagatcatgccactgcactccagcctggacaacaaagcgagactgcatctcaaaaaaaaaaaaaaaatttgtggaatgattttagagggaaagtataattgtgggatcatgttaccagtaaagatataatatgtgatgtgttttcrgtaacatgttaatatttcaggatatcatttacaaggtaaaaactgttttcaataatgagkttgacgctgcatataaacaaaaagagtttgaaattgcacgcgtgaaggaaagaaatgttcgaattcgagaaattattttagatctggaattggaagaagcagtctggcaaccagaatttgaagactgtgagaagccagagagaacgcttgttgtgcaagatgaggaggtactggctagctgtgttctcctttcccttctttctcaggagactttccccagctcctatttgttcaacttggttactctgtgggaagtgattgtactgggtagcactctcagttgcaggtaacagaaagacatgatgtagcctcagcaatgatgagaatttcttttacgaatcctgtggagtccagggaagatttggacactgagcccaggaagaagcagaaaccaaagactagagcctcatgggaggcccagaagccttctatcttcatctcttagttcacatcactctgcatttctacttcctctagcaatttctactttgtatctcctccacatgagaaagtagctggtctgaattagaatctcttagtcccaattcccagttcatttgggaaggggctccttggcccagctggggtccagtgcctgtacccagagtggttgggtcacattgcgggaacgaggccagtggagctccagtagtgatctaggtcattcaggcggtgtggatcccagagaaaggggctctccggacagctttctttaaaggttttggcacagaggcagttggaaataaatgcctaaagaaaacaattaaaatctgacaatatttcattttttaaaagtaaaaaaaaatgctaaagaatactcaaagaaagaccttttctcacataaaaccaacttgactcctggggacaaaagataatagtggtgtttagaagtaatagaaaatattttaacagtctctgctggatattggctgggcaccattcgtggtgccctagatggattgaaatgaatttatcattgtaagtcatcataaggtaggtactgatattagttccattttacagatgaggaaagtgagacacagagagtttgagtagtttgaccacagttacaaagctagtaagtgtcattgttggggctttggacccaaaccatcatgccttagagttcatcctcttaacctgtgcactctgctgtacttgtttaagcaagtcatttttcctaaaccagactttcactatgtgacctaaaactctggagcaaggtgacagcaaggacctcactctgctgctctctggagggccctgcttggggcagtcactttgtacctacttctccttgggctctagtccatcctacatttaggagagtgctcttgctgcaagccaaacttactatgtcccttctctgcctcaccccttgcagtggctgctcacttcacttgggataaagcccacgagcctcctcctaaatgcccaccccaccccctttcttgcccaacttctctcccacctggctccattctggtcacaatttcattcacacagtcccttgaatgccccaagctctcgacctcttaggacccccatccttcagaatttggcttagatggcacttctttgagcccccctccctcccctccttaatctatcaggttccctgttataatctttttagtggtggacacaagctttgagagttaatagagaagtaaagatctatttttccaactctctcattttagacctcatcttattccaaaacagaaaattgggtgcaaagtctgcagagtccctttaatccccttagtatcttccagcctcctcccagtatgtggaaggaaagtttagtttgaattttgtaagaataatagcaggaaatgacattttctctttcagattacagcccacaaacacattaagccgtggcacaaagccaaagaattgatcgtgaatcatgaaaaggagcactggcttctgatacaggcatgtagctttgcttaacacaggtcctaagaccctctttgctttagggatactgcttcctagtttggtttaataacccatcaacacatttgtcgtggtcagaggtcacttgaatctcagttggcctcctttccccttctctcctccaggcactacctaccttccccaatcccaaatgcagtcattctaatgttgggtgggaagctgcctctggagccacctggaatgtcaggtctctgtctcagtattcctctctgattctggctctttcccaggatgccagtacaagactccgagctctgatggacatgatgggaggagttctggaagtcaagaaggaagatattttgagaatggtgatatttctgttcatccttatagaaggtggaatggggtggaaagagctacttaagttttaccatttttgtcctatataaacctgggttttagaagttctacagcaacaactattatacaacctccgtagtaccttataaacctaccacattagggcctggcgtggtggcttatgcttgtaatcccagcacttgaggaggctaagtgaggaggccaggaattcaaggcaggaggctaggagttcaaggctacagtgagctgtgatcacaccactgcactccagcctgagagacagagcaagaccctgtctcagaaaaccaaaaacataccacgttagacagataataaatttgaaaatgcaggtttgccttccaatctgacaagacacaaacaaatcaataaaaataagtaactacagtggttttggtctctattgaaggcaggaatactgtttcatcagtaattatccagatataccaggaaacattttctttgatacctgacataggttttcctggggctcaggggtagttctcactataaagataccaacacacccctctgagtctatcacctaagagtccaggtatatcccaccctgctcaccttcacctaagtcacagaagaactgttgtaaaattttaaaatatcttttgcccaagatgtcaggtcgttttccttgccaatgtgaaggactgtatccttttaaagggctttttaaaaaaaactctgagcttttactgtactactgcatttaacgtttgagctgaaatatatgcttttcttcatatcttcaggtgattcctcaacctgctttcatggcaaaacctgatgctgtgtggactgaagaagaaagaaaacaattcaaagattatgagaaaaaagtaaaggagttaaatgaagaaagagataagtatagaaaggtcagaagagcaaataattaatataacctaccatatccagagtgctgtttaaatatcttttcaaatgttttctactttgtcgatatctttaatagcttaaggacagtgtttcagcttaaattctcaagagaatttggagaagtaagtggagataaatttaaggaattaaaccaattttaaagcaaagaaacatacagcaatagtttttttaaagctgttattgatttcagcatttcccgtgtcattacaattcatttggcccttcattcattcttcaggtgttcaatgaacccctaatacaacatgttcaagtcacggcaaggtattgctctgtgttgtgtacatttatttgaattcagtaatacttttgcttgatttgttctccatctcaggaaaaaggtttgaataacaaatggcataatcaatgcagtacattattt

SEQ ID NO: 6827 - DNA, 160556 bp, Homo sapiens
  misc_feature (1)...(160556): n = A,T,C or G, or insertion/deletion polymorphism (see Tables 1-2)
aaatacattaagagcattaaatgaatattaatcacctttaaagtcttttagaaaaggacttgtattggtttttggctgcatagaggggttgaataagtgtatgtatgtgtgtgcgtgtgtgtgtgtcttcttaaagaagatgtaattcacaaatagtttagctccctagcgctcagttgtagaatagaaaatagaacattattcaagttaattgaaaggtgaggtttttatacccccactaatgctgtgtatctgtctttcgtttgttaacattatttgcttaatttctttcaactcacactttggataatactatcaaaaactaaggctaaacattccttgtgtatctttaagcatgcttctcctgaaatttaactacattagtagttgacatttgtatacatatatcctaatacaagagtaggataaggtggaaatgtaatggcctgagggatggtgaagcattctttcagtatttttcatcatgttgggctcctagattgtactggggttgcccataaatcaaaccccatactcttagaattcattatattatggtgatatccgaacctagtgaatggtatgcttgggtgttttccattgagagtggatggacctctttataaagttggttgctgcaaaatccagttcttccaaaagccactttatttagggtttattcacaagtcatatccattttggtacagtgtttgtttcctaatatttattaaccaccttataccaaatgtcttgcaaagaaatgttattaaaaccttgaatttttacaaatgtaaaaaacaaaaagtgtattaatgtatttgttcaggaaaagctacayaccgaagggcttttgtatatgaattctgtggtggggagacccatttgtaatctatatggcagttccatctgggttttaagtttagatttcaccgtgtcttagtgcttcattctattggtttattggaacatgtaataaataggagtagtgatgtattaaaacacaagtattcattaatgttttatatcttcactaaaattctatagttatgaaactattttatcaatcaaggtgttatatttcagtcagaagtgaaaatttatgaagagtatttggaagtgtgtacagaaataaactagacttacaggtaggctagatcagaacgttaacatatgaacctgcagaaatctggtaagacttaaattcagtgtgaggaataactctagttctctcctatgagcatttcctaaaagccatctgatttggcattcttactggagctgcagacagaaatctacaaagacaaaagtaaacaaaattaagttattattccactgttaggaatggaaataaacttgtgaagtctgtttattttgaagtattggtgaactaggcttgctaattgataactgcagcagtttgtgtttactccagttcatcagcttaggtcatttgaaagatataagagcttaaggcaagaaagaaataacatggaattctatttgaaggacaacagaacattcttggaaaagcagctccagttggtttttcagctgtcaaacttgaatgtgtaagtccccacagagcatggacagtcggtgcagagttccaaggaaacaattattgcctgatgaccacttccattttgtatacactctttggttcgtataggccatattccaactggctttttagtaatagaaatccagtatataatgtatcaaatacaattgaggttctaacctagtgtgttaatttatctgaatttggatttttaaaaagtaataaaaagttaaatgtacttcctttggattccttatttctttcctttttgaaacatgaaccaagcataagggataacccattattgacaggcaaatgaataacttagtaatagttttccacaattaaagcaggggtctgcagactttttctgtgaaggtctagatagtaaatactttcagctttgagggctatgcagtctctgttgaaactatcgttgtagcaccaaagcagccatagtagactacataaactaatgagcatggctatgttccagtataacttcacaaaaatggcccacaggccatagtccgctaacccctggaatgatgtatttaaaatttaaggtttaaatttgtatttcaaaagtgaactgtaatgtacagtaaagttgagagaatggtccagtgaataagattggtctttcttaagaatgatttttcttttattgccattcttttgacttttttgtatacctattctgactcttacactcagactttaccatctatttgcctgccatcctctgattgatgattctttgcatttgtttagcatttactactttttcaaagcagtttcacttgttccttcacaaccatcctgtgaagctggtagagtagatagctgtgttttatggataagaaaccacagctaaaggtgctcttatgtttagcccagaagtcatcaagattcagggccctgttgtcttgactattgtaactgtaaaatgggggtgtcaccctctctagcctgggaggcaggtaatatatgtagaagtcacattgaaaattagtgttctatacgaatggaagagattatttttattgtgccacattgaaatcagtggttaatttctccatgtctatttgtatgttttgtttttccgtttctgactagtttttaaaaatcctgaccaacctccttggttcttttcccctagttttattaggtgcctcagtcaacacctgtacttggcaattcccgttagccacatcattggtacaaatttggattactttttatttctttaatgaacactttttgtctggttggaaaactaaggacagaagggactcgtatgcagccagcttcttgatttcaagtgaactatttttgtggaactgttactctgcaatataacattagaaaaggggggaataagcctaattgggacatgtggaatcagtgtagtttacaaatgtattttaaattacttgattatttgaaatgattttcaaagtttgcacgattactttgcttgacagcgatttcaaaggaaaaaaatgtgggagatggttgcaggggaaaattgatataagtggggctggccaatgttatggttattcttagtgtctcagtctaagccactaggattacaagacttaatattgaaggtcagtgaagaaaagggagagtctagaaagtgagacatggaaggtgattctaagttggggttggtcagagaggtctgctgcagttatagaccagaaagggcagtcctggataggtaagtgtcacagatagggtagctgcaatgctggcatgaggatgtgggatatgcgattatcagtgtgtcccaggcagagacatggagggtgtgaagcagccttgttaggatgactgcagggtgttttaatgccagaagactggaatgtgggagttgtaaggagccaagactggaaaggtgaaaggaaggcttgatgatggacggaggacctgttatgccaccctgaagaacttgaataaaggttttggagagccaggaagggttttaagcagctgctaaaaattgtagtatctttaattacattctccagaaaactgagtatcttctcagtggtgagcaatgtaaatgaaggaatgagctggcctggaacaaattatcatgtatagtcgcttggaaaggcaaaatgagaaagtggcccaggtggataaaactcagtagacttgaaggggcaagagaacccagttactctgggtgggagatggacatctaagaggagaaaaacacttgttcaggttcacagaggacccagagatatggcagaggaaaccctgaagtaattattaatgtaataatggagctaagttgagcagttttatgtcataaagcctgttactctacctccagttttttcatggtttttaaattaaagaaaaatacattataaaaatcatctaaacccagattagagtttagcttttatagttctatcttatggtgtcccttttcaattattcttttctgatctttctagtgaaccaaatattttgttgccatttattggttgatagccaaagtagcaactaaactggccttctactttaataacataaaactgtgcagcttgttcattcttcaacaccactgtcttcaaaatatttggacaaagggtgttggtgagaagacctggccactactcaccagctgggcattagaggtcataaaagctcacaacctcattgcttgcacaagaggtggcctctcatgtctattttccagaggaattcccttctaataaggaagccagttggtggtttgcctagtgccatctggagacctggaagtgtcacagaagtttgttaggccttttagatgttgactctttggactcgtctactgagaggtgatgaccttcatgggggtgaatgcagagagctatggcgttgggtttgactccttctggctttcaggcagaaatgcatgccattcaaccccctcccactcctttgcctatgcgctggccacttggccttcctgccatttggtggcatttatcctcttcaaattccttccttccacctgccagtttctaaccagatcttgccctgtctggctccattctgtatgttatgtgcccatttgatgaaaacagcatgaggcagggtcaacattgcatttctttctaagaacgaggacaaaatatgagtagcatccttccaatagttaacttttagccctttacttgtgtgaaggacttgttatcccagttgatagatgagaagacagatgaccataagtgcaagaaattcagagtttgatgtgaagcccagctctgggctccctgttgactattttgtcattgatgtatgtgaaaccatgtggaaatccaaaaggaaagttgtccatttttctgcttgcagtttaaattgaaaaaagattctactgggcatgatgcaaaacatttctacacatacacatttgtgtgttatagttgacagggccattttacttgcataaaaagatctttgaaaagcctcacagtaataatactttttatatctctaaatcaaaatggctcagttctgagaatttttacattttaggtacaaaatagaagtgggtttcaaatagctcttgattagtgtcattatttgggcatatgtttttaattggcaaaaaaaaaacagacttcagaaattggtcatttttattccatcaagttaacggtgagtggcttatttaataaaaacatgtctgtaatttaacacaagtagcacgtacagctgttcatttgtgtctttttgactgtgtgaagcatcttagacggttttactgaaagatagggtcaccgagaggggaaatctgtggacttaaatcttttttcattacctatcgccggccactaggttaggttagttgccgccagcaagcgcccttcatggctcgactagggaatgtggagagagctgagagaatcgaaatcctcgatttttttttctttgctgagagggacctgagagacattcactcatccctgcaaagaagcagctgcccgaatgcacatagccagttggtagtgacatgaatcgcgtacacagggctcctggtccagcgctccgagttctaaccactctggccacgtgtgcatcggggagttgtaaagtgagttatggaaataaaacaaggcgagaagcccagtcccgatcttcaggagcagcattctcgggagccagaggccgaggtggcgccccgggcaggcgccttaggctgggtgggtgcggagctggccccggcctttggctccagcatcttcacctcgctcgcctgcctccgaagttgcgaaggtgccgggaagaggaggggcctcgcctcgggcgcccgagtgattggctgcttagggcccckggcgaaggctgtgtggtccagccctggtggagaggggcggagcggccactgctccaaccaccgccgccaccgccacactcgcagccgccgcagcctcggccgccgggcaagtakctccgagcggctgcttcccggttgcctcgacgaagacagggggcgccgcgctccgcttgctccgcgcctgagccatgcccagcagccctgwgtaaccaccgagtcccggccggagccgaccgacccagtgtgcgccgtctttcggccgagctgagctttcgtgcacgcaactccctctgccccagccggccccgcgccaccatgccccgggcgactgcacttggggccctggtgtcactgctgctgctgctgccgctgcctcgcggcgccgggggactcggggagcgcccggacgccaccgcagactactcagagctggacggcgaggagggcacggagcagcagctggagcattaccacgacccttgcaaagccggtaggtgccgccgctggggaagtcccgcagaagtttgcctttgaaatgcaaatgaggtggtgggcaagcctgcactaccgtctatggggcgggtctcccctcccctcccctgagatccccggctcccccggaagacaatgcctccgaggaattgcttaaaaaccactccgaggctgggatgtcccggccccaggtttgcggtgcgcaccggggggcgacagctggcgcgttcccaaagcgaatcagagcgggtgccagaggccgagagggcgcccaggggccggggtgggtgccagggccgcctgacagcgagtgggcagcactggccaccgccagacgctccgggccggagcagaagagctggactgggcgcggcgctccgaggctcagatggagttcctggctccgatttcacagcatttttaagtttcgcgcaaagtttcccaagatctgtggttactcttgggagattttaaaaagaaaagcgtcacagcgggcaaaaggaaaggggtcgccgagggagaatgagcaagactcgaatagccggaaacttccctgtagcggtaccggcctgagggtcgctctgggcgggcggagatggaagccggcaggtgctctaatccctccaggaagcggcgccccaggacgtacgggcctttcgggcgcaatcgccgcccgggcgctgcagctcccgcttcctcggggccactgatcggctcgtgagtcctgaggggagcggcttccgagctggagtcgttgaagcgttagcctccgaagggccaagcgcatgttccagcaagctgatgagtgtggggcagttccagcacggacagaggggtgctcacgctcacgctcccagggagatgctgggctcagaggctcgcacagacgctcctggcccatggccagtgtcccgcgagtagtggtgtttatctccggctttgtggggccccgtttcacttggcggtcggcagagaagaatggggagggaagagcgcgacctccaccctcggcgaggcaggtgctccttcccggggctgtggccggccaggtctctgcggggcctgtgggccagtggttgccccttcacgccctggaaacctctatcagttccaggttactcatctctaaattggtggcagtaattataggaggactcaggtgatttgtgggaaaattctctgcaagtgaaatgatggcattgtcgttattttttattgtttctatcactgcagtggctcgggtctaggctgggggttgggagggtcagaactgggtaaagtctggggaagaccaggttactaggaggcaggaggagtttgtgagacttgagaatcttgtgaaggtttgagatcaaactagtcttgaggggcctggtcttagtaagggragtttcctgcagaatatctacctactgctgtatctcttggggcttctgagttaggaaggtgggcagaggagttggttcctggacaactggagaaaacctcagcaggtagcatgcctggcccaggtaccatgagttccttatgggacctaattcaaggccagggagaagaggctccagagcactattggaatggcagcctggccctgaaaagagggccactgaagctgggaaaataggtgtgggataaagggagtggctggaccacctcccccacttgtcagatcctagaccctgctgggtgtgacctggggactctgggaggcagtgtgggccgctgaggcccggagtggggaagtgattgatttgctcaggaatgtattgtgcatctccagtatgctgggtgctggtctgggcacttgtgaatccagatgtgaaagaggcatgccagctccccgtctcagccttggaggataaccctgaggcaggcttgcctgttacagcctcattttccccagtaattttagagaaaatgcaagataatcaggggcacgcatattctgtgattcttcacagacagaatgggatgcacaggcagggctggaaggcagaggatatggccagtgtggcttcagccagctgcaggcaccctcctcagactccttgaattctcccaactcattggcctctccctgggctacactgatgctaagagtggccagaagagggcgatgataaggacaacctgggggaaaaggtaacatctcagtccgcccatcctcttggaaattgcctgacctggagaacagctgtctggaaggccagcaagcagttcatcagtgtactgaagtctcagagaaaggacttgcctcttggctagcgggacactgcatttcctggttgcatatttaaggcaaacctttaggggcagcctcccattctatctcagtgaaatcctaactccctgactcttctggccagaagctctccttttaggacctgcctcagggctgcaaagctaaaacacctcccactgtcccttcttggtgtgggtctccattcctactgtggactcagaatgcagaggggagggtcttgaatctgttcctggcttttcaggatctgtgttaccgggacgactcccctcctctctgggcctcagttccttacctgcagaatgaaaawgtctgccttgttagaattacaaagtgacatgtccagagagcttgtgctcttggtcctcatcaaccgtcttgccctgggcctacttcataccttgcaagcacttcagtgtgagccccctggctgcttcctatccagtgttctatgagtctatgatctttggttctagcccaacctctcagaagctgaacaaactggtaattttaccatttctaattttaccatttcactacttttgcaatttttaataccatttttaccatttactctgccacttacaagctgtgtatccttgggcaaatcacttgatttctctgggcattagcttcctcatttgtaaatggggatgattcctgataaagtacttagaacagtgcttgaaatatagttagatactttttataaatggattttctagaaactgatggaaagaatatcttcatgctgaccttaaagcaggttttaagctggaaaatttaaatttgctaatagacaatctatttgatgctgtaaaaagggatgacttttaaatcaagtgacgggggagtggaagttagtctgtgaagccctcctggcctggggctggtgaggggcatggggcttctggggggtgttctctgtctggtcatccatagctctgccagttgtttttcttctgatgctgtcaatacagctaagggttcaactggcagtaaatcacaaggcattcttccaaccaccatgcctctgacagcaaagcttgggaggactgttcctgcctgcctgcctatcctcacccacaagttttaagctgatttcaagtcagaaggcctaggttcttatcttgaccctgccccgccttactcaccgtgtggccttgagcaagtcattttacctttccatgtctcagtctgctcatctacaaaatgggagtgggagcaaaaatgcttgccttgcagggtagacaaaaggccagttttatttacttatttatttatttatttatttacttttttgagacggagtctcgctctgtcgcccaggctggagtgcagtggcctgatctcggctcactgcaagctccgcctcccgggttcacgccattctcctgcctcagcctcccgagtagctgggactacaggcgcctgccactatgcccagctatttttttgtatttttagtagagacggggtttcaccgtgttatcctggatgatctcaatctcctgacctcgtgatctgcccgcctcggcctcccaaagtgctgggattacaggcgtgagccaccgtgcccggccaaggccagttttagttggattcttcagaaagaagagccttacacaaggactttggtgtagatagttcatgtggaaggtgatcccaggaagcagggttgagggagcaggaggaatgagacagggaggaaggaaatccaatgaagggagtggaatcaaggtagctgctttaggcaatgggcccctgaccccactgggagcgcctttgaggagcttacagaatgcctcccaaattatctgcccagagaataggaggctgcagcatttatccaaagcctgctgcccttcactgtctgctccttgctctagtttctattcctctgtaagaaagcattccagaccagtggggtagaacaacctctgttttattatgttcatgattctgttgattaggaatgtagaaaagacacagcaggggaggcttgtctttgttccatgatggctaagcctcagctaggaagacttacaggctggggtgactcaacaagtgggttctgaagttatctgaaggctcattcgctcatgtgtctggctgttgaggctgtctgttgcctgggacctgttggccagaacacttataggtggcttctccatgtggtctctctatgtgggtgtcctcgaagcatggcagctggattctaagtgcaagcatcccaagagaaccaaatggaaactgtgtgacctttgatggctttgcctcagagtcacacattatcacttccatcacggccacaagccctcccagattcaaggtgggagagcacagacccacctctccagtgggaggcatgtcaatatcatgttgttaaaagggcacatgaaatgagagatgtcattgcggccagttttggaaaagatgacttgccacattccccgaggcattaacttccctgaatatccaggaatagagggctctacagatttagaaaaagttctcaagcagaaaggtggggagacatgtggcagaggcatggaactgcccagaggtgagctgagggtatgtgactcaaaaattgtctacatgaggctcaaatgatatgaaaatgctgtatagcattttgggtttattaaatctaagggaactgcctgatagccagcttcacttttcagtggatggcttggtaaataccagggccttcttcacagctgtgggtcccatgttaggataggataaatatagctggtggtccctcttgtcttatggctcaggaaccagtagtgagggtaagcccacacttcagactttacttctgcctggaatttggtgtttcacctcactctgccattctctccaagacatcctaccgatcaggtttcattttggggctcaccaagagccctctctggggcagctgttgccagcagccctcatgttactgtcagcctagaaactgaagcagctctgggccagtgtgccagggactcctaaaagtgcccagagtggcattgggaagattgtagagacctgggcagtgctcctctggagtcgccaaccttcatggcagggcgggcatcctggtttttaagcagagatgaggctcacatggtgcctcctggaagcttgtctccctggcatgacccatccccagaatgtgagctgccatctctctggtactccacctgcccatcagactcccacaccatgggccacacctaggtaagggtggctgatatttttacatctttatttccattctaacttgttatgatgtccttgctgatgggcaggtgctgatttgatggaattaaratatttcagggcaatattggagttaaatgtttgtcttttttgtttctccagatgatacaggtgcagaatctagtccaccttctctacacaatttcacacaccaccatgcaatggggcagggtgtgagccagttaagagcacaggctctgatgcaggccagacctagattccaaatctgccacctaggcaagsctgtgtgaccttgagtatgttactcaacttccctgagcctcagggaaaaaaagaactagtaatatccacttttcaggattgctataaggattaaataatacaatgtttgtcaagtgctgagcacagtatctggcacaaggcaagtatataatgatatatacattatcagagtacagagcaggtgctcacagcacttcttgaactcttttgttgaaatgctgtagaggaaattgaatttttgcaataaatgagtaatttatttcatctagtatagttagggttagagattcttaatttcagacctgatcattgtggttaaacagagtctcaaaagtagtgaagggtgaattttatggcatgtgagttatatctcaataaagattttaagtaaatgcagatgagggcagggccaggggcagagctgggggaggcagctcatggccttagcccctgaggaacagttggctggctggcacagctgctcgagctgagaattcagctcagccaagcaggtgtggagtgtgtggccatccaatgccaagcagagcctagagttctcaatagtggccaggtctcacactggggtgccagagtctgggaaaggggggaccaggaaggaagacgtatcaggcccctcttggagggggctgctctgggagctgaatgacagcaagaacaccacccactgaccctcagcacagcccccagagcagacaagcagctgcaatggctgccattttgtatatgaggaaactgagcttcaggcctagattttctccctgaccttgctcatcctttgatgcctctgtggacagagcccatatttggtagacagaaaagtccacaacaacataatcaaaggtaggtctccaagtcttacatcagtggaacttgttttttccttttctctcccgcccagtagtgtagtgatcagtgcagcacacccttccctcagggtggcatgtgtgttgggagagcatcctttcctctgctgtcccacacagcgagaggagaggagtggggacaggcatgatgccaccgagccatccacacagccccagatatgcagtgcacctggcatgtgggcctggcatgggtgctgagggtctaagtgctggttagactcaaccctgcccttggggagcctcctacccagtgctaggctcagcctgctcagcagaagaggctcctagatggaagctgattatagacaggtcagcagggcatctcatgcagcagcacctcagctctggccatccagctgaccactggttctccagccattctcagggcactccccagcctggactatggttatttgagcacctggcccctccccagactgtggagaacaaagaccttgctgacatgttgtggttctgtacccatgctttggaattgggctgacttaggtttttcttctcagctttgtcactttccttttttctttttttttttttttttttttttttgagatggggtctcgctctgtcatccaggcctgagtgcagtggcacgatctcagctcgctacaacctccacttcccggattcaattgattgtcctgcctcagcctcctgagtagctgggattacagacgcccgccaccatgcctggctaatttttgtatttttagtagagacagggtttccccaggttggctaggctggtctcaaactcctgacttcatgatccacccgcctcagcctcccaaagtgttaggattacaggcacaagccaccgcgcccagcctcagctctgtcactttctaacggtgagacctggagcaagtccctcagccttcaaagcctcagtgtccgtttgtgtatcatgccgttaatagaaactctgattaacaggcttgtatatgaaggcacttggtaccatgcctagaaaacagaagcactcaataaatatgaaatatacagtgctagagttatgtggcccttgaagaacttgttatgccccaacaagtgtgtggagtgaactgaattgtatgaacagcactgctttccatacttctgagacagcctgtgggcaaagcagcrggtgctagaggcaaatttcctgggttcaaatactggctctaccactccacggctgtaggcaaacctgcctaggcttgctgggacactgtccttatctatgaatgtggttactaatatctacccacatagggttattatgaggatttagtgattaatacagagaaagcacttagaatcatgtctgaacatggtaagcatccagtaaatactatttttaaaattattgtcatcccacagaaatccagcaaggtttccaagtggcaggaaactaaatatctgaacaaccaaagtgatctggctttgtgtccccacctaaacctcatctggaattgtaatccccacgtgtcaagggagagacctggtgggagktgattggatcatgggggtggtttccttcatgctgttctcgtgatggtgagcgagttctcacaagacctgatggtttaaaagtggctgtttcctctgtgcattctctctctcctgttcccatgtaggatgtgcctgcttcccctttaccttccaccatgattgtaagtttcctgaggcttctccatcagactccatgcagaactgcgagtcaattaagcctcttttgcttataaattacccagtcgcaggtagtatcttttatttatttatttatttatttatttattttttatttttttgagacggagtctcgctctgtcgcccaggctggagtgcagcggtgcgatctcggctcactgaacgctctgcctcccaggttcacgccattctcctgcctcagcctcccgagtagctggcgctacaggsgcccgccaccacgcctggctaattttttgtatttttagtagagatgacacggtgaaacgtgttagccaggatggtctcaatctcctgacctcgtgatctgctcacttcggcctcccaaagtgctgggattacaggtgtgagccactgctcctggccctcaggcagtatctttacagtagtgtgagaatggactaatactcaaagcctggtgatttttaagggatttatgggattttaagggatttrtgttttctaatggtgccaattctgatagctcatctatactcagagactttttgtgtgtgtgcagtggtgggatcccagctcactgcaacctctgcctcctgggttcaagtgattcctgtgcctcagcctcctgagtagctgggattataggcaggcaccaccacatcagggtaatttttgtatttttagtagagatggagtttcgccatatcagccaggctggttttgaactcctggcctcaagtgatctgcccaccycagccacccaaagtgctgtgattacaggcctgagctaccatgcccagctatacccagagactttgacctaaaacttaaatcttccatgaatctcagtggcctcactgaggatggcattaggctaaggcatttggttccctgcaagccaaccagatgtctgagccctaccgaagaaaccagcccctggctatttggagacatataagtggctttgggcctgagcctccattcagctggtggcttctcccaacccctaggagttgatgggagcactcgcaggagatggcctgggctcacatgatctcaggggcattacaggccatggtcaggttgcttgcataggggagagcctgggctaagacctgcacacgacattgagacctctaatccctgttttcccctctacgccatgtgacctcttcaaccctggggcctccagctttgcctggctgcctccacccccagtgaacgagcttctccatgctgcccagtctgaaggtcacatttgtgtatatgttccctgagcaccaaagcccatgaccgtctccctatctttttctttatccttgtctaggaatctgacaaggaygagagaattctggctttccaagtactctgtcctaaagcatagggaagaataaatgaataataccaggtgtcaaaatgcacctgtccccgtctctgttcctctacccctcttccagaaggcccagggtcagtgcatgggtatcaggtcagttgagggtgatgggtccaaccactctcctcacctccacagggagaagacttcgatggccaatctttcccaaggaggcttggctgataaagagcagaagcagtgagcatcctgttgtagagattctttttggtatcacgcagcccatggctttaaacctgcctctgccccccttatttcctgtgtagttttgaccaagtctcttaatctctttgagcctcagtttcctcatttggaaaataacgatattgaaacccatcrtataatcttgtttgaggattaaatgaggcagtgaacacgaagtgtttagcaagcagtcattaactgctggctcttctgcttgctattattattattactcatagtattattccctattttagaatttccttataagtaacaacctcactggcctgtgaatgctaatctctccctctcagggctgctaagagttctcctgggatacatagcatgtggcaagtgataatttattgctccacagctcacttgctctcacccatgaagcagggagaggatgacacataaaccaaatgtgtagaagcaggtttctcatggtaccctctcagcctgctcataatacggttctgcctggatgcaaacatagcaacaggaacagagctttcctgctgattggttacagacctatctgtgatcacgccacctctaaccacttctgccaattaccaataaatattctcaagctcgcccgcatgagcacttgagtggagatgttcagccctgagtctttgcctgctctgccagctgggccacttatcttctgtctcatcctgcaatttgcacccagcctctttccctgcctcccacccaggttactggcctggagtcgatgtgagtcctgtgagctggcttcccacagcaacagcctcaagctaccttccttcttaactctttttcaggtcgcagggtcgcctctcctccctgtggagtcagggctggtttcctgtcctgtcctccttggctcactaaggactgggcctcatgggtgcagataccacactggtaccagagtccacccaggtccctaaaccagaaacccagttgctacctggacacctgacttccctcttcttctcaccccgcccaacacaagtgctgtcaattctgtttccaaattgagcccgtccacttctctccatccccactgccactggtccaagctcacacctgggctgctgcagtagtggctgaactggcctccttgacgctactcttgcctcccaaaatctgttttccacattgcagagtgatctttctcaaactcatgtgtgatcacgtttgcaagatcagacctgcttaggatcctttaatgtcaccccattgcacttgggataagagcaatcagcaggccccggggtgctctggtcrttgcttgtccctatgactcagcctccctccccttacctgccaggttccagctcacatcggttcttcttcctgcctggaaatgtctctggactctatgtgtggtcaactctgactcatcctccaggactcagcttacatgtcatttcccccatgaggccttcccagtccccagtctcaatcaggtcccctttcaagtttctcatcgcctttgtttttctgaaaagcactctttacratctgtaactgggtctattactgatgtgagtattattgttcaatgactgtctctgcattggacaatgagctccaaggagtataaacgagactgattttgcttcacagtcaggagcatagtgccagcacatggtgggtgcccaaccggtatttgtcaaatggaaaactcagtcaatgagataccagagggattcagaaagggtagcagtcaactcaaggaagacttcctggtgagggagttggtaagctctgaggcgggtctggaaggatgccttggatttgcagatgctgggatgcaagagaaggtatttcaggtagaatgaacagtgtcagcaaaggtgaggaatgtttgtgatgtgtctggagttggagatttactctggtttactttgcagaatggtaatgacaggattgaaataagcttggaacagtggaagtcaagctgaaacatttgaaacatatccctaaggaaatggggagctattgatagtttctcagcagaggactgttacagtgaagacctgtgatgcttaggatctgtagaagcaggaagcaggaggacctctcagagttcgagtcctggagcatgaggatgcaggctatggccttgagaatgggaagggagggaaagtgggaagagatagtggctctgtgggtgggaggggtccggagctgagatgtaccccaaggtcgtggttgaaacatgtatgagttcactcaaacatattcagcaggcactggggtgcccttgaggtggtggaaagggagataatggtttaacatgaaatgttttccttaactacacagctaattcccatccactggaaaacatttagaaaatgcatacagcaagtagaagtaaaaatgtccagtaatcccattgcctagaagtaattgttgtgaacattctgttgtatgatattcccacaccttttctaggcatgtttgcaacatttttcttctcctgaaaatgctgtacctactggcttgaacctgcttctgtttgaatttcacttagtaccatgaacctctctctatgacaataaagatgcttatgtaataaacattcttatacaaaaccaatttaagttgctttatacactgttgtatagatgcaccataatttatttaagcaatctcctattgttggacatacagatttttttctcaatctctcccctccctccctccctccgtccctccctcccttccttccttccttatcttgctttgtcacccagactggagtgcaatggcacaactactactcactgcagcctccgcctcccgggctcaggtgatcctcccacttaacctcctgagtacctgggactataggcacatgcaccacctaatttttgtatgtgtcgtagagacagggtttcgccattttgcctaggctggtcccgaactcctgacctcaggtgatccacccgccttggcctcccaatgtgctgggattacaggcatgaacctcartctttytgttttgcttttataaacaatgatgctggaatcatctctgtagctagatgtttatatacatcgtgagttatctctttagaataaatttctagaagtagaattgctgggtcaaaagtaccaatgcgtttaggccttctgattctccttttcaaacaacccttcaaaagttttttttgtttgttttttgtttttgtgttttgagacagggtctcactgtcacccaggctaaagtgcagtggcgcaatcacagctcactgcagccttgaactctagggctcaagtgatcctcccaccttggcctactgagtagctgggactataggtgtgcaccacaacaccgggctaatttttgtattttttttttttttggtagagatttttttttctttttctttttkttttttttttttaaatcatgttggccaggctgstctcaaactcctgggctcaagtgacttacctacttcagcctcccaaagtgctgggattacaggtgtgaggcatcgtacccagctaaaagatttttatacctttacactcccattaggattaatagtttatattctagttttaaaaaaccgttgctggttggagaaaagtatttttctatttcttcaacttgcacttgtattgtaatttgtatttttttcagtaattttgacccttttaaaatacgtttttgattgtttgtatttcttctgctaattgagattcctattcatgcaccttttcttctgttcctgctcatttttctaattagagaattgttaaaaacatttagtgggaacccttttcctactaaattaaggactttcattatttttctgtcatatttgccacaaacaaatttttggagagaggatttttaaaaagcagagggctcattctgcaccatatcattgactttcccatagagatgtttgtatggttgtatcagttcagattaagttaaactgctagtaacagacccaagttaatttgctgtgtccatcagggtccagttaggagactgaaaccacaccagtaatttgaacagtaattagaaaatgtaatataattatcaactaggaaaagggggttgactaccaaaagaggtaaagggaacactaaagaaaacaaaaatagcagatgcaaggagcaactactagggaaggaggaagccacccccacctccacccatcccgggctgaaattctgacttcttaagagagagtggctatggcccactggaactggggagttcactgagatactgaccagcagggaattacccagtggaaattggcaaaactctggagggttggtgccagtggttttcctgaacactgctggcagcccttcccatgggtgcaaggtgagaccactggaaccaggaagagcaatcccctcttctatttgcrgtatccttccaatgtcttttactgataaagcctaacatggtgtcaagtggtgaaggagcaatgtttayagggtccagttccagtgtcacaaagcaagacaaagaaggatagatttggagccaagaggcaatatattggtatctcggacattggcttaaacaagctagaagtctatttttttctcacatcaaaatctggaggtctccattctgggctgatatggcagttctgcttcagaaagtccttcaagatctaagatccaagctccttccagtctgccactccactctccctcagttgaggtccttgtcctcatggtcaagacggtatgcagagctcaaatcatcacgggcatggtttggatatggaaggggtggaaaagtaaaagagacaaagaatgtgtgagaaccagcttcttgggagctgccatttgtcacttgtgcttcatctcattggacagaacttagtcacttggccacagacagctatttgggagtctggaaaagctttattttggaggacctggagctaaaaatcaggggttctcttaaaatggaagaagggagagaagtattggtggacaatgagcaatctctgccacaataagctaaactggctggacctttatgaggaaaatgtagtcaaaatggcaacaggcccactaccatgactgaaagttatccagctacaccaagcaagatctttgagtcaaatcttctagaatgttaaagctggaaggaatcttaaggattatttattctaagcttttaatgtttcccgtgagaaccctgaaggcctgggaggggcagtaacttgtccaaggccatctgaatagctcttggcatggccgtaggtggatcccagtcctccttccctctccgcctagcgtgtctttccatcctctgcgacttagggtctcccatggccattgtcttcagaatgagtcctgcataattaaattgcaacttatggctctgcaaaagatcatttcacagtgaagctattagggcttatgagatgtgcctggtcctcaaatcaagcacataagatgtaaaattagagcccaagaagctttgggttattaggacctaaactgcatcctctctccattacctaatggagcccgtgtgarctcatgctgtgggaacgcagcaggcatgagatagcagtaagtcatattctgcccaattaagcagtgaaaggtgttggcataggccaaagtagtcatccctattaccagccagaatcccatcttcctatttggctatggaaataatggaaagattttcttagcaaagctctataagtcagagtcccagcaggaaacaaaatttatcccagatgtttcagatgaagagaccttcacgaaggggccaattagagatgcagggttaagggaacaaacaggagaggtgagacacacagagatgagcccattatccctgtggtgaggggcaggggagggagcagtgctactggagctggaactgggtaggaggggaagttgcggagggatgtgtctatggctagacctgtagcatctagcagggaagaaatgcacagcctctctcctcttccctagggtctgccaagatctcttcctggttgaaagcaaccagaagctggaggaaacccgaggggaaactggaggatgccgtccacagaagcacgcttcctggacacagagcagagtggagagggtgaagaataagtgtacaaagtataacgttagtcgtagttcaggccttgccccagctattacctggactgaaatatttttagtatctgtatttttttgttgttgctgttgttttgttttgtttttgttttttgagacagagtctcattctgttgcccagactggagtgcgatcttagcttactgcaacctctgcctcccaggttcaagcaattctcctgcctcagcttcccgagtagctgggattacaggcgtgcaccacaacgctgggctaatttttgtattttttttttttttagcagagacagggtttcgctatgtttcccaggctagttttaaactcctgatctcaagtgatccaccggccttggcctcccaaagtgctgggattacaggcatgagccactgcacccggccatttttagtatccttacaatgtaatatgtgaatggcaaatgtgtggcacaggcaaccccctccccactccacacctcctgctaatggcagatattactaattgatcgtggctctctttcctatgggtccaagaagtcaccttacagtgctcaaagaagcaccacccattgagtggggtggcatgtgagatgaaacctatttggagctgtaaaacttaaacagccttgcagatatggccggcctgcccaaaccaatcttgtggctaatttttcttttttggaaattagctgagcaggtgtgtttgttgattcaactgagccctgctgggaaagccaagctgtgacatttctgtaatgtattgatgcaaccatattatgatatagatgaggaggcgaggcaggagactgtatctgctttaagcaaggtggtcgccagcccaggtaccagccagasccccttggctcatctgtcaagtaggatgatgccagccaaggcagagggcagggctgtgtgttctcttgagaagcagtcagctttcagagcggctgtggaggacctagctgtgtagggcgctctcctaggtcctgactgacctttaacatggagagttagaaaatggaaaacccttagctggaacaaatgggtaatggattatgaatgttaccagcatgctgtagggcataggtggcaaataggtctcaactcatgcaccatttctgtccatttctgttgaccctctgtaacactgtgttgagatggattcagagactgtgtccaggctcaatggacaggagagctgtgatcrattaggaatatctatcctgagcaagagtgggtaaggggaggcacatgcttgtctcttatttgccttttctggtgtaggaaaagcccatggttgggagtcccagacatggcttctagatgcaatattttaagcaagtcatttgaccttcttggaccccagtttcctcatatggaaaacaaggacattgcttagatgactttcaaattctctgtcttagaaattcttcagttttaaagttttccaagtcttcaatgtaaaacttgcaccaaatctgtttgatcccattaaaacatttacatctctccactcctctctgccgtatgcttgagcaactgagccatctattcctggagaaggccatctccccaggcaggagcagctggggaccctggagacaggaggcttctcatactaaacagaccctaccctttaatctcaaccaaaagatccaggaggcgtgattcacatctcgcctgtttcctctcctccaagagcccgaacctctcccctcctgttctgcaaacgcgcctgaatgcagagtcctgaaatttagggtcatggtttcaaagttcatggtcctgagaataaacaaaaaaactattgtggttgcatagagctgtagaccccattaacaccrtcccatgaatatttatagcgyggaactacaaaagaacatagaggccatattgtatttcctagaactttctttctaggggtcctttctctgtgggtcactttaatgtaagctttgcttatttagttgcacactttaagccgattaactttttactaaaaaaaccctccctgtttgtttgtacatacactcccttgacaaagattcacagaaaactgctttaaacctgttaaatccctccgctggaaacttgcaatgaactaaatgcatctgtgggtaggatttccctgtaacgctccccgcctctggcccctccaccccacctcagcctgtttcctgagaggaattccaatggtttgaattctacatatttagttcctccaataacctgggcttatctctaggtgactatcttatggaacatctatgaagtcttcctcacttcctgagtgaggaagttattggagtggcttgttattggagtggacaaacagcaggccccaagcaaataccctatgtttctctaaaagaaaatgtagtgaaatcaaacgtaaggtcagtgaccatggactccattggtttccaaactgcagtgtccatgtgagtcacctgagtgggtggggcagggcatgaattaaagtgcgtattcctgggtgctgacttcagagattctgatttcatagatctgggttggggcctggggatccgcatgtcaacactctcctttgacacttctgatgtaagtggtttgtgggccatgcctccagaaacactgagctggttcagctgtctcattgtgtgagagaagaaaacgcttcaaaggggaagcacacagcttccagtacagactgtggagatgcagacctcgtctcttcccccgtgtagaccatgcttcatgtcccaagatacagagccactgcagaatatttgtgattaggtccaygggtaggaagctgactgracaataaaccatgccttagtgtagccctgaggtctaagtgtagaaaygaaaatcaggaagtgtcctggttgatgaaggtgagatgaggtaaggtgggcctgcaggccactctcctcggataaaacccgggtgtttgttggtttggagcaagccctggggcagggcagggcatatggccaggatggaccaggaaggtcagggggctgccctgggcctgccattctctgagagccagggaacagagtcttggggatagtgcagttggtgataggaggtggcagcggagtggaggggtctccctctgactggctggctgctgcctggctcgaagtctccccagctctgcagaccccaactcaggggccgttcaccacccctaaaatccccccaccagactcttggaatcttcagtgcggaggggtgtgaggactcctccaggcccaacccctcctgcactctgtcccttgaaagcagccgcccgggctgtccccggctggccaggctggtggctcctctgttggcagagcacttcctgctgaccctgaggtcagtcctcaccttgaatcccaatgctgggaccagcatcctgtgcagggcagtgaaccgagctctgagtcttggagccaaaaggtctgagttcaagccctgtccccttcttacggattgtcaacttgggctagtcgttaactttctgaagtctcactttcccccataagattgggctggtggccttcctgccttcttctaggccttctgcaaggaggtatttgttcactcacggattcggggatgagaatgttctgaaggtcagtgccaggccctgygctggatgctggtgttttgggtgtggggggtgtttgcaggagaggaggatgtgtgcatggaaggggtagcatactgtaaagtgctataccagaatgagggactcctgattaccctctccaccctgggtgctctaacagcctcaggatcccgttccccaattctcagcctccctttttgcccatgctgagcctctcagatcccctggcctcctgtcytgccttaccctcactgtctacagcagtccgcatggctgggccccccactccagctggcttgccctcactgcacccctcctgctcctgccctgacagtgccttgctctttctcaccccagggcctttgcacatgctgtccctttagccagcatgccctttcctcttgttatccacctgccaaactgcagctcactcatcatcctcccactcatcccctttgtgaggctttcctgattctacatttccaaggctgtaagttagtcattcctcctctccatgcttccatcttacaaagggagccaaagacgcatggcagttaagagttagaattgagagggggcctggaggaagttgcctaaatctctctgtgcctacagtcctcacctgacactgggtatgatgatgcacattgcacgggtttgctgtcctgagggctagaggagcgagaggagcctgcayggtgtgggtgctgcagaaccatcagtccctttctcttcagtgcactggtcctgagaggagatctaaaacaccagatttggaagaaatagagattggtgttcaaagatcaatggggacgtgatggaagggcgtgagctccctgtctctggatagagtgttggacccagtgacctgtatggccccttcaagtcctagaagtttgtcattcctggaggactgtggagcagtgcaacagtctccaaaatgtgttccttaggtcaggagacccagtgaaaggagatctcagaagcaactatgttgggaaatgccgcattcccagtctttctcttggagagccrtgatatttgttagaattgtaaarggtctgggaagtcctgyggtaaagaaggtggtttaacagcatttcttagtaacttttagaatgtggaactttggggagaattggataagagatctgatttttgtttgtttgtttaagacggagttttgctcttgttgcccaggctggagtgcattggagcgatcttggctcactgcaacctctgcctcctgggttcaagcrattttactgcctcagcctcccraatagctgggattacaggtgcccgccaccatgcccagctaattttagtatttttagtagagacgggttttcaccatgttggtcaggctggtctcaaacccctgacctcaggtgacccacccacctcggcctcccraagtgctgggattagaggcgtgagccacggcgcctagcagggatctgattttggaattagagagacttgtattgactcagaaaacctgtgcagcttcttcctgcctgcatgaccttggccaattcctacctccctcatggccttttttttttttttcctctcccttctatagaaaggggacaaaatggcctcctcttgaaactggtgagaggacggattgtggtaatatgtagagggcattcggcctggtcccagggacacagtgagtgctgcttgcttctgctgtcaatggagaaaagatagccagggcaagatctgtgctgtgcaaatcctgggtgggagctgcagagatgagccttgccctgcaaggctcagatcatggttatcttttgcagcccccaaaatcaggcacacacatggcatcagatggggaacataacagaacttcagaaactgtgaggtactttacaggtacttactgtcattactgcagtggcccggagctggctgttacctccttgcgacgcccaactgtgcacatcttttcccaactccatgttcagtgacctgaaatcagccacagtgggagcatttacacagggaaatcagcaaacaccacaaaccaaggctctcccctaccccagccaattgttaaatagcagcacaccactgacggattagatatcattagaaagcgtgtctttaaagctagaccttttacatttccaaatttattacataacagctttaaaactgtatttgactaatttataaagatttcaatttttgatttccaaaaaacatttttcctattgcacttcataatctattcctgaaacatttactagccagagcttcataaggaaacactaccacctggtgatgagtccctcagttgcaggttgaaggtctagtggggtcagycaagactggagctgagggcattttcgtggatgtgctttttttcttttcttttcttttctttttttttttttttgagacagagttttgctcttgttgctcaggctagagygcaatggtgcaatctcagctcactgcaacctccgcctcctggattcaagcgattttcctgcctcagcctcccgagtagccaggattacagatgcccgccaccacgcccagctaattttttgtatttttagtagagatggggtttcaccgttttggccaggctggtcttgaactcctaacctcaggcgatccgcctgccccagcctcccaaagttctaggattataggcgaaagccaccgcgcccagccrgatgtgcattttaaatgcttcctgcggcccatatgttcaagctctacatctctgtgaggaattgccctgcctaccctcttcactacagccatgtcgaacacagagaggtggaggggagcccatgaccccagggtcatagttggaaacagagtccctggtgccttcggtcagtgcttctcaaactccagggtgcacccgatttccttgagggatgttgttaacatgcagattttgactgagcaggtctgaggtgggctctgaaattctgtatttctgttgagctccaagataatgttgatgctgctggtctatggattacaccttgaatagctgggattggtagtggaagaggtgatgggaatactttgaaagtcttctctttgcctttcagtaagaattcaatagctttgtgtgtcgaatccatagacataactcatttgcttctaagtatagttcagtccacttgttgatttaattttttatttatttgaaattaattttggtgtatagtataaggttcaaagccaactgacttttcctcaaatagctaacccatttgcttcaacgtcattcattgcttagttccctacttttcacaaatgtgcaagacctgttttatcctatgtaagttttcttagataaaacctaagggctgctttcaaaygattctacattgcaggctgtctaatgaagccagtcctcctttggtactctttttctccgctgttctcacctgattgtgcagattaacattaatatcatcttgccagtaataaaaaaaattgggattttgattgaagtgtattaaacgcacacattcatttggaaagagttaacggttctttactatagtctttcttaccagaaacatgtctcgtcagtcactttttatagcttttagtagaattttacatttcctgacttagtaacacatttttgtcatcaaggttgttcctagctatattattttaatttttttccaattgtttttatttttttttgagacagagtctcactctgtcacccaggctggagtgcagtggtgcaaatctcaggtcactgtaacctccacctcctgggttcaagtgattctcctgcctcagcctcccaagtagctgggactacaggcgcgcacaaccacrcctggctaatttttgtatttttagtagagacaggtgtcaccatgttggccaggctggtctcgaactcctgacctcacgtaatccacctgccttggcctcccaaagtgctaggattacaggcrtgagccactgcacccggctgagatatgttattttgaatagaatttttacattattttattttataagtaacatatagttgtttgtattgtatcatttacaatttgtattatttatgttatgcttatatatagctagccacatgtggcaatttaaacttaaattaattaaaaggaaataaaatgtaaaattcagttcctcaatcatataatcacatttcagtgcccaataaccacatgtggttagcgggtaccatgttgatgggatcgctttctttctttctctctctctctctttcttctttctttcgacaaggttttgctctgttgcccaggctggagtggactgacaccatcatggctcactgcagcctcaacctcccggattcaagtgatcctcctgcctcagcctcccatgtacctggggccactggtgtgtgccaccatgcccagctaatgttttgattttttggtagagacaggggtctcacgttgttgcccaggctggtctcaaactcccgtgctcaggtgatgttcccaccttggcctcccaaagtgctgggattacaggtgagccactgcacctggcttrggatcacttcagtttattcttttaggttatctaggagagcagctgctttgataccaaactcctggtttctctcctgcagcagcattaccctgatttccttcttaatgaggaaggcaaggatggcaaatgtgtgccatgagggttgccctatgcactcatgcccatggcacacatcacaattagtcacagcgctctttgctgttcctgggctatgttggttttgaacttaccccttagtgccctgctcttctctctgaagacacacatttcatgtaatggaaggacctctgctatgaagaacgcattgtgtcaggagtctaggttcccacagcagcctttggtttatttagagtatcaagggcagtttcttcttccttccacgcaggggtttccatccytggctcccagatacatgtgggccctgctggttcagacaccattgttatgagtggtcctggacttgagtcttcactctgccaaatgactcactatgtgaccttgaatgaatcactcagaccccctgcagaacatgctgctgtctatggaaggcggtggtggcttggagactccagctgacattctggacctgtgttctggggtgcagccactcttgcttgaaggctgtatctgtgagcctaaggggcagcgctgactcatgctatgggctgtgtcccctctgagtgaagggcacgtggccttcttggactgtctttgatccacaggaactgtccatgggatcctggggcaagatctgtagaacacaagggaagagtctgcaggaccgcagtgtgggagcccgggctggcgtgggaaggggctctctgggccttgaggtgggctaggatccagtcccacaccatgggggcttcccgcaggtgctgcggaagggccaggccatgccctcttgcagctgttgtcggtaagggctgccctgggctgggcacgcaagcgctaagtcagtgcctcccaaagggatcaaacctgtaaaaacgtctcttagctcactacacatcacactgatgtgggccatggccggtgacctcagtgcctgcagggtgcagctcctccatctcatatttgctgagtggggcctggtgccagttctgtgctgagcatggatccgcattatctcagctgatgctcgcaacaaccccatgtggaagatattatgactctttattcacacttggaagatgaagaaactgaggcttagagaggtaaagttatttgtccaaggcttcccaggcaggacgtgagctgggggctatctgattcggttccttcaccgtcagccactgggcccatactgcaccgtgtgatgactttccttggcgagtataaaatgggatttcacaagtgaaatgtacatgggagcctgttgtcrtggcgtttagactctggcacaatctgggaagttgagtagatgctaagagcttaggaagccgctgcgggactgggaagaaccctggcttgggggttctggctctgctgcttgctggccctgtgaccccaggcgagtcattctcttttctgagtctcaggttcttaatcggtaaaagtggaacgagaccaatatgcgttgatgcaaaaactaaaagaagcgatgcctgtgtacaatccagtgttaactgtaaagcattacagagaacatgatctcctctccctcccccaactccacctacttcaacccccacccctacccctgccaatgcctggcgtgtgctgcctcagtaagtgttagatgagtatagcagcatgatttagcccccgctgtctggttaatattgtctggttgagaccatttgtcctaaaggaatacagagaaaggaaagagtgtgtcggggtgggagggcaaatastggtgatggaagctgagttgarttttgcagggtggggtcttctggatgaggacaggtgggggagggagagagacaggaaccaggaggagcaaagtggaggttggagaggtaccactcttcrctgcatgcttgccacaggccaggcctggcactggctgcttaacagacctcatgttgtttaattctcacacacttctaccaggtaggcacctctatttccagatgaggaaaccatggctcagagagaccaagtgagttacccgaggtcacacagctcttcagtgatggcactgggattggaacccaggtctttctggcttaaaagtacatgcttttaatgagcctgcctccccaggtgaacaataygaagactgcaggcagaaagtgccttcgtaaaggattyccctgcaagggaatcagcctggggctcccaccctttggtgtcaggaggacgcctgagcactggacatgaggagatggagacsaagccagctgagcaggcccaggggacagtgtgggaggagtttcccagcagccctgtgactttgggaaggggctgctgcagagcggcccccgctgctctgccctgcttggcccctctgccatgctccgccttcaaactgtggtgtgcaggggcattggacttcccaggggtgctctctacagatggttcaagggagtgaacttccaggttctgaagcatgcatctgggattctatactaagacagcaggaggatgctgggcacgtggcccttcctgcacttcatgggagagaggcttacctgtcacccatctggaatcccactgtgtacaaaacccccgagtgtcaaaggaaaaatgagaaatggttggttatagagcagccttcttcgatgaggagycagagtgtcttagacctgcagctcttctgtctcttctcatctataggaatttctattaagggaaatgcttggggcagggaggaatattttgatttcagaacaactgaagtagggtagttaatgatagtgattctcttaagtataactagaatgctccctggacctctaaatttttcaaactatatggataaaacccaggatgaacatttttcttgttttctttcggtttcagcatgctattccaaaaggtagttaaacctattttaccaaaccatatcatgaaacatttattccacgtatagtcaatcctcgtcttataaaatacttattattttcttttcatgagcaaaatamgtatttaaacttatcgtgaaaaatctgaagtgtcaggctaacaaagggatatgtagcttttcaaaatgattcaggaacaygtgagcacagaagttggaagaccactatgtaacttccttggcttgggtggttttcccagtgcccgttcatctgttcccttctcccacccccctgcttctctctttcttctcttagaatgtttgagaagtattcctgattgcctgccattgccattgccataattgacatcggacactttttctttgggggaaaaatggcrctgcaccgtggactgtcttgtgccaaatcttcagggaagtgggaaaccgaagggctcagcgcaggcagccggaaaccatctttgaccaaaccaaccttgtcacacatttcaagggagttctagatgacagtcagatttcaaggaattgtcagatagacttccttgtacaaagtttgggtccccaagaaaagctttaaattgagagacagttattgtattcagtcaacactttttattttctaattttttattctagccatccaaatggctgtgaagtggtacttcattgtggttttgatttgcatttccctaatgactgatgcttttgagcatcttttcatgtgttggccatttatatcttttccttacagatgtgttttttcaaatcctttgcttagttttaattgggttgcctttttgttgttgaattgtaagagttcattttatattctggattctaggctcttataagatatatgacttgcacaaattttctcccattctgtaatttgtcttttcactttcttgataatgtcctccttttctgataatgtcacaatgcacaaaaatttataaatttgattaaatctaatttatttattttttcttttgttgctcatgcttttgatgttatatctacgccattgccaaatcaagataatgaagatttatgctgatgtttcctcctaatagttttttggttttagctcctacatttaggtcaytgattcacttggagttaaattttgtatatggcttgaagtaggaattcaactttattcttttgcacatttgtttcttttaaaagcctctggtggcttgtggctaaataaaaaagggagatggagatctgggaaactccgacctagaaatataaaaatgaatgctgtgaggagcatgagtctcaattcatagatttcacaatatggacagcgtggatggatgacatgggtttcaaagtttcgaaagctatatttgacctctgtggggaaatcgcctactatgtgccaagaacagggagaagcatgaggcagtttatagattttgtaatatggacagcttggatggattacttgggtttcaaatttcaaattatatttgatctctgcagggaaagcatctatgtgtcaagtgcagggcttggttcttcattgctccataaattttatttttcttccttcaatagattgcatctactgaagaaagattatatctattgaagaaaaaaaagaaagccatggtgtgtgtgtgtgtgtgtgtgtgtgtgtgtgtgtgtgtgtacttatgtgtacatgatctcatttaattttctcaacaggtttccagaataggcaatattatctctatagatgaatcatttgtggctcagtgaggttgagtaatatgtgcgaggttgccaaagccagaatatgaatacagatcattttgcaaaggctgtatgtgtcaatcattataatctagattatgatacaggaataaataatccttaagtatccatgctttataaccacagaagtttttgtctcatgttacatgttcagcctggatcatatcatcttcactctatgtctcagcctgatagagcgggctgtttccggaatatcctttgtcttatggctttgggaaaagagaacatggcaaaccatgtgctgggtcttacaggttctgcttggaagtgacacatgtcacttcccctcactttcattagccagaaaaaaatcatggtgggccaggcgaagtggctcatgcctataatcccagcactttgggaggccgaggcaggmggatgacttgaggtcaggagttccagaccagcctggccaacatggtgaaaccccatctctactaaaaatacaaaaatattagccagcatggtggcgcatgcctgtaatcccagctacatgggaggtagaggaacgagaatcgcttgaatctgggaggcagagattacagtgagctgagatcgtgccactgcactccagcctgggcaacagagagagactccatctcaaagaataaataaataaaataaatcacatggtgaagcctgacatctgagagagggggaagtataatttgtacccaggagaagcagcaaaaatgatgaacaataatagactctgtcacaggcctcctcccctcttgtaacaaatacttgctttccttctcctcccgtatatacaacatacttacctttccccaaagtcctgtccagtcatggtaccaggctccaagtccaagatcttgtgatcatctctatactaagtcaggatgtgactcctcttcatccaaagactagtgaactttaaaacaatcatatacttccccaccccaccaccaaaatacatactcaatataccatgatagataagggacaggataaccataacaaacacttccatttggaaagaggaagactgggaggcacaacagtcactgatccataacagttctgaaatcaggctggacacatgttgcaagaggcgcctaggatggggaasgttccttcatgaggccctgatgccacctcctgccagtagctctccattcattttccctgtgtggctttgagctccacactctgggaggtcctgcccttccttttcccttattcttagccacatctggagagggcatcagagaatatgcccttcatgggggcagctttttcagcctgtttctttcccatacaaggatggaggcccaagggtcattttgtgtcattttaagtgtcaaacattagcagcctcttataggccatgctaatgactttttttggtcctacgcttttctacaacattaatcatcttcttatctgtttggttcagctgtgtgtgccatagccacatacagttattttctaaacatgtctatctctctccagacttaattattgctaccttgcacttatgaagcttctgcgagagaaacacattcttagttttctttatctgaacaattctttctcaactgaaaggatttaccaggtaccatcttggttggttcttgctacaaggttgaattttttttctttaacagacatcttgagtataatttacatgctgtgtaattcacttattgtaagtgtacatgcgattttagtaaatttataattgtgtaaccataactacaatccagttctagagcatttccagcaacccccaaatttcygcatgttcatttacagtcgatccttgtttctgcccccagtcctaaacaattacaaatatttctacttctataaattagccttttgtagacatttcatatcaattgaatcatataatatgtagtgtttggcaacagttatttcatttcgtatgatgtttttgagattcatacacgttggagcctgtgtctatagtttgttccttttaattgctacatagttctgttgtatagatatgccacgttgtgttcatccattcaacagctgatggacatgtaagttgtttcaagattagggctattagaaagaaggctgccataaacctttgagcatgtctttgtatgaacatgtgttttcatttcttttggaaagatccctaggagttgaattgctgggtctcacgataaatttaagttttcaggttttttcgttttttttttttttgagacgtagtctcgctctgtcgcccaggctggagtgcagtggcgcgatctcggctcactgcaagctccgccgcccgggttcacgccattctcctgcctcagcctctggagtagctgggactacaggcgcccgccaccatgcccagctaatttttttctatttttaatagagacagagtttcaccgtgttagccaggatggtctckatctcctgacctcgtgatccgcctgcctcagcctcccaaagtgctgggattacaggcgtgagccaccgcacctggctaagttactttttagagaaccttccagttttccataaaggctgttcttgacactacaatgctgaattttcatcaacctctgttactcgaagttctcagctttctttttttctgtagttatgaggataggttagctcttccaactttctaagaccctgaagttttggactctctattctttgtcattcttataaaaattgtcattttcgagcctgtttctttcttgtagaaccttgtcaaacatagttaataacaaccaagkcatgctatcagcattcttagtccatgtcttcatttgaaaccatagcgcattcagttcatcatctgccttccgagtgaaggcaggcaacactttgactraatacttcgtcaccgtcactgcataacatagagatgacttcctttcagcctctagtaacagtttccttgacacctggcccaaaggcaatggatttttgttacagaacatactatttctgatagcaatttctgtattagtgaggataaagagactgtgctccagtaatgaatgcccatgaatctcagaagattatgaaaacaacatcacacctgtaatcccagtgttttgagaggccgaggcaggagaattatttgagactgcacaacatagcgagaccctgtctgtacaaaaaaaattataaaattagccaggcgtggtgtcacatgcctggagtcctagctacttgggcagctgaggtgggaggattgcttgagcccaggctttcaaggttgcagtaagctatgatcgtgacactgcactccagactgggctacagagcaagactctgtctctctttaaaaaaaaaaaatccatcccccaacaaaaaaaacagtgttttcattttttaatccatgctgcatatccatcctgataagccacactgtgctatacatcatctttattccagaacctagggtgatccccatgaacccagatgaaccccatctggaacattgcttgtcttctgggacagggcaaagaggatgcagtgaatcatgcactagctcttaaagcttctgctcacactgaattagagcaggctgtgtggccaatcctgacaccaatggggcagtgagctataatctttccccagggaagggcaacaaaaattatgagcaacagtataatttatcacattattcgttttcttctacatcttggggaccataaagaagaaagaagcagctgtctttttgtggtagttttgctcagagctgcctagagcgaggacaagacaggtgacctttcaaaataccttacagacttaggatttggattttcatggtggttggcacagccccaggctgcacagaactaatacctgcygttcytctgcctccaccagccctatctcttaggctcaaggagaaattttactggatgggctgtcttttccaaagtttaccacccaacacccaatgccctttggggcattagtgaatccatttttcttgacttctagcataaattcacccacttatgtgtttccttcccagctgtcttttggggagacattgccttagatgaagatgacttgaagctgtttcacattsacawagccagagactggaccaagcagacagtgggggcaacaggacacagcacaggtaggtactgcttcctcccttctcctgcccagatgggagggatgagggacttcagcagggrgagatgtggwccacgagtcatcggtgtttgacttgctagtctaatgcycccctatttgtggaaaatcagaggggtcacttctccttctccactggagccagtggagctggggcttccaagtttgctgattcrtctaagaaaatctccatttgcctctttatcagagggttcaggctggagctcggcatttgttcttaggactctggcctcggggttcagcactttccagattggagagtcaagtgaaatgtaaacagaaaaccataacacctcatagcaagtgtgtgagaaaccaagagcagtgggaagacagagagtgagtggagaagcctgcctggtgtcatgtgaatgggcacttgtgtgtggtgtcttgaagggtgagtaggagtcctgagtaggaaaaaagggctcttcaggtggaaggagagtcttttgcaaaggcagaaagtatggggggactctccttatttgaggaacagaggtaaggtacaagtcactggagggcagccctttggggtgggctgtggcaggagatgtgtctggagaagttagctggggtagacagtgaagggcttgcctgttgaactcatgagcttgggctttgcccactgggctgtaggggttctggtgaacaggagcatgacttgctcatcttgaaatcaggggtgccttgatggagtctcctctcccactgctctctgcagcccaccaggtgcccttggggtgctgggttcctggctgcctgcttgggcagcttcactatgctgattgcagtggggatggtgctggggggagggttgtatcaggcaacccctcttccaggctsctcatgtatgtggtgacatccaggaagatctctggaacctggagggaaatgtgtgggcatgtgcccagggcaggggcacctcccacggttcatgaggaaccagagcagctacagggacctgccttcaaagctccctgcargggttggtggatgagggctgacattgccaggaggtcacggggacctcatcgccagtggctgggaggaaggtggggcaattatgtactttaggatttctttttggtgtcttgtttcatgagtgtcatttcttaggatttttgaggtctcgtataaggtttgaaattctattcacattttaaatggagttttcaattatttttaataccaatatattcagaactttacttaagctctwactaaaggaagcatctttgcataattctaccactccatctaatcacacttttctccccagctcttacctggaggcctggagaagctgacctgactgtaatcttgtatgtgtagttaaaatagytttaaaacttttttgatggtgttacttaaaaatagtgaacttcatgtatctcaaacatacagcatgatgaacttttacatatgtacacgcccatgggaccaccacccacaccaagataaggaacattccagaccccagagactcctcacatccctcccagttaatacgtgtcccaaagtagccactggtctgacctctatcaccccagactccttttacctgcatggagtcgtacagtctgtattacygtgtctggtttcttttgtgcagcctgtgactgaaattcactcacattgccgtgttgctctttttcattgttatgcagtattctattgtatgaacggactctggtttatttgttcttcagttgacagacatgtgggcagtttgtggtttgggctacgataaataaagctgctgcrgtcattcttggacrtagtgttttggtgaacacgagcactcatttccactgggcctgtgcccrggagtgggggtgctgggtcatagggcacacacagttcagcgttagtaggtactgtcgtagagttctccaaagtggttgtaccactttacgctctaagtgggtgcatactcatttagaagacaggagtggtgtctgtgcaggatccagtaaggctttgagtcttggtctccccggtttgggtctcactggcttgacgccggcccaccatcaagaatgctcagggttgcctttctcagctgtcctgctgtccttgggggcccaaggttggcagatgggagtgagagaccccaaagagaggcagggcagtggccagccaccacrccagctgcatacccggctgctagagggttgtgttgagggaaggctgcctgaggatgctgtggtggaggaagcccagcagccctgccttctccctcatgccacttgctcaaggtggacatgacctaagaatttggaggcctgtcttctcccttctctccagtgagctgatagagctgatagagcacagagcctacatcctgcctggatttagatcccccagagtctgggccaggaccttgtacccagaaggtgctggccaacatcagcagagaggagatggaggcagatgaagatggcagaccctggagccgtctcccagggccttagagatccagagcctcagcagggctttgctcccagaagggtggtgagagtgctgaccgtggtcacaggctttgggtcagactgcctggacttgcatccttaagctgggcctcagtttcttcatctgtcaaatgcaaatagcaataatccttacctcagagtaatgctgcgaggatgaaaagaaagaatatgtgcaaagtgcttagcacagtgcctggcacataacaaatgcttaatacatttcatctgcttcctcctcattattattaatatttgcagagagaagactgacctgggagggtttacgattaaagtggagagtggggagctgggcattcacccctgtggtcccagctacttgagaggctgaggtgggaggatcrcttgagcctgggagatcgaggctgcagtgagcaagatcacgccactgcactccagcctgggcgacagagcaagactctgtctcaaaaaaaaaaaaaattaaaattaaaattaaaacaagtggagaatgagggaaatttgctgtgtacatagggaatgtggggccttaggaatgaggcctttgaaatatatatcatacttggtgtttcttccttcccaagcttgatatttttttttctagtgtgtttttatggcaaagtgatttttatcctgatcatttttctctgaggtccaatagtactttgcgtctacctagaatagtatgaatagttattttatcgtcagaatgggaatattttttattgtttttgttgattaaactaatgctgcttgttgtaaaaaaaaaaaaaaaaaaaaagtccagtagctcataattgtataaagtggaagatgaaaatcccctgttatcccagccccaaagatccctggcattaccagtttgctggattctttccagacttaatgtgctcaggctgtgtgtgtgcatgtttgcrtgtgtgtgtgtgtgtgtgtgtgtgtgtgtgtgtaacataaaagggattagggattttactcaatgtgctttggtgttgtctgmattttttacttaacactttatcatggacatcttstcatgcagcacgttgtggtctctcttattttaacggcagtagtgattcaatgtgcaactctgccatgatttacctaactaagccattatagataaatgtgaagattgtttcccattttttttctgtatttttttttcctcttagaagcaatgtttctataaataactttctgcatgtatctttaaacatttgttttaattttaaaaatcacaggccaggtgcggtgactcacacctgtaatccgagcactttgggaggccgaggcaggcggatcacttgaggtcaggagttcaagaccagcctggccaacatggtgaaaccctgtctctactaaaaaatacaaaaattagccgggcatggtggtgggtgcctatagtcccagctactttggaggctgaggcaggagaattgctggaacccgggaggtggaggttgctagtacgatttcactagccaagatcgtaccactgcactacatctgagygacagagtgagactccgtctcaacaacaacaacaacaacaacaataaaatatatatatatatatatayatataaaattaaaaaggaaccacacctttatcctcttttcctacttccaaatgtgtgggaagatgtattcttagatgcaagttaatctcatttccaagctttggtaagtgcctctgtgtattagtctatttttactctgctgataaaggtgtacccgagactgggcaatttacaaaagagagagggttaattggactcaccgttccacgtggctggggagtcctcacaatcatggtggaaggcaaggaggagcaagtcacatcttgtgtggatggcggcaggcaaggagagcttgtgcagggaaactcccatttttaaacccgtcagatctcgtgagacccacttactatcatgagaacagcatgggaaagacccgtcccataattcaatcatctccctttgggtccctcccacaacacttggaattacgggagctgtaagatgagatttgggtggggacacagagccatcctgtttcttttgttggagggtagggagagggctcaaggggagaggtctgaggtccctggagggagacatggggggaagggcccagaaccctgcagtgcaaccccagaggcctcctttgcctgtttatcctgtgatcttggcactgcttttttggctgcagaaggaaaccatgtcagttgccctagaggtgacccagtcagcctcatttgctagatgtgcccaaatttattcagtagcagaatcaggactagaacccaagtttgtcaactccagggttgctgtgtcttctactttaccaacctgcccatcatattgccagctagaggagctgagaacaagagtgcaggtggttattcctttgttgtcacttgtaaagtaggctggagtctttctgtgccaatggtgaggcaagaccttatgcctgggttggcttaagagcccacttagtgcactgcagtgtccacaaaaagccactgacagctttaggattcacagcagggagcatgtcttctgttcacttggggccacgagctgtgttgatttcatgccaatttgtcttcctgcctctagtctctcttactccgttctgcttctagcttatctttctggcaaccttgtgaccactgtagtgggtcctcccaaaacccatgtctacctggaacctcagaatgtaatcttatttgcaaatagaatctttgcagatctaattagttaaggatcttgagatgagatcctcctggatttagggtggatcctaaatctattgactgacatgcttataggaaaagaagaggacagacagagaaggccatgtgaagacagaggcagagattgaagtgatgcagccacaagccaagaacaccagggttgccaggagccaccgcaagctaagcagagacaaaggtggattctcccctagagcatttggggagaatgctgccaacacctggccttcagacttctagcctccaggattgtgagagaatagagttctgttgtaagccactcagttgtagattgcatggcagtcctaggaaacgaatactgctgtgctgtttagagccttcaatagctcccccttgcttattagaaacattccttggtcggactcttaaggcccttcatgctatgtccacaacctgtgtatccagcctctcttcccactcctggtcctctagccaaatgcaatgatgtgcctgtgcaggcccccagtttccttccttacagcctctgttctagctgctccctctgctcaaagtccccattctacacataaggaaatgaagacccccagaaaggttggatgacccattcaagcctctttatccatctctacccagctgcatttgtgatgcctctttgctctgcatgcctcccagcttggggagatggcctgggtagatggtgctattaaaattggccacattttgtgcttgggatggagagaactgctatttctcccccattctccgatgggcccattcccttgtcatggggctgctggaggatgtggcagccgcattttggatgtgtgtgggggcaargcggcaagaaaggattcttcagggaaagaaagtcttctgtgtgcattttatttgcagtgagaagaatgggagtcctgggcaggcattggccacgctgttctatgaatggggcccttgaattaacattacagagtttcctaaagctgctaatcggattagctgtgtagtgaaggaagtacttagtgggagacacacacagacacacacacaggcgcgcatacactttccgaccctcttgcacccttttcgatacgagagtggctgaacctgacagccccattcctgagttcttagacacctctcctgttagccacaggagatgtggaggagaagcctgtgtggctgatgctttgaactttctgtttgtttgtttgttccccaaagagtccaggaagtctgcgttgggcacatccatctttgtaaatgtacctgaaaaggaaatctggatctgatttcttgatgtttgtaatgaggactttaaaaggggaaatggttttaattacttattggctcggatggaagttgatgtttcccgcctcatctattctgagccacggggccatgtccatctctatttaagaaatcaaccttgctctaaatcctcacttcctaaactcctgccatctgtgtaggatgtctgcataaccccaacagtttaggtattgggtttaaaataatacattagcaggagagactctgagacatgtcccctctctgggccctgtctctgaatcatggggacgctttcttttttcattgtatttattttattttttgagacagagtctctctctgttgcccaggctggaatgcagtggcatgatctctggttcaagcaattctcctgcctcagcctcttgagtagctgggatttcaggcgcccatcaccatgcccagctaatttttgtacttttagtagagacagggtttcaccacgttggccaggctggtctcgaactcctgatctcaagtgattcacctgcctcagcctcccaaagttctgggattacagggattagccaacacgcccaggcttggattctttctttacccacagaccctttggttcctagagttcctatctgtactctgtccatgactttgagtggcacacattactctcacctggtctcagtgttcccatctgattggggggggctgatggaaccacattctaacttccttcaagccagtttgagctctggatttgagtgctggtgtttcaggctaaagaaaagaggggaaccaaaggctatcaggcattacagggctaaaggtaggcattgaacaccagtgcatacccargagatacccaatgtccagaatcagagaacttggatttagggtttctgggctctgctttccaaggtttgaggctctaaaaagagatccaacatgtttctgttcccagcatatttttaactttgaagcttttttttctttttttcttttttttgagacaggattttgctgtgtcactcaggctggagtgcagtggtgcactgcagcctcaacctcctgggttcaagccatcctctcacctcagcctcctgagtagctggaaccacaggcacatgtcacygtgcctggctaatttttgtattttttgtggagacgagatgtcatgttgtttcccaggctggtcttgaactcctgggctcaagcaatcctcctgcctcagcctcccaaagtattgggattataagtgcgagccactgcactcagcccaactttgaggctcttgagagagcttatagatggggctgtgatttttcagcctctgcccctgtgcagacattccccaagctttgtagacatggcttcctcatttcactagttttatttgttggggtaggagtgctactgactgccaagtgtccaaatgagaatgggtcagtggggggctccctatgatatcctacagaagggacgatgtctcgattttgtgaatgaacgtcaggctggactcttgctgggccagttcattggattcaagtytgtcttctctcacgtcatgcattgccaagtgccatctctgagaaatctcagggcctctgctgccagggccacaggtttggaaatctgaagagtcacaggggcccatcagggagctctcttacacatccctgtctttcctctgtctcctccaaagctaggtgaggagggggtccagagaagaaggtcctggtggcctcttttctctaagtatgttgtgcgtgacattttgagattcacagactcctttgagaatctgacgaacattatgaaccttctcgtaggtacacacacacacgcacgcacacagacacacacacaatcgtgcttgcagttttcagattgagatccatggatctcaagttacgaaattctgaccccagtcctgtctttggtgtgcctccccactgttggagctgcgaccatgggcatcaggaccttggagggctgcagtgtgggaagacgtgggtgtcggagcccagcaggcctgagtttgcgtctctggctctgtactgattckctgtgggactcagggcaactcattccttatttgtaagatggaataatagtacctgcctcacagcgaggattaaataagtgtgacacgtaaaacacttattccagcgtctgacaccaaaaataataacagtaatacccgcagggttggccctttgctggctctcttgtcttctcttctctatgcgacccccaacttctgtgtcccaaatcccatgcttcctaagtgtccaagtctcttggaattcttcattttagtactcttccggaacctgcaggggactctggagcagggcctgtatcagtgtgctctatcagatgcttggatttggattccaaccagcacatgggaaatctctgaatcaatctccaacataaagacttcccaagtggccgggtgcggtggctcacgcctgtaatcccagcactttaggaggccaaggcaggtggattgcttgaggtcaggagttccagaccagcctgatcaacatagtgaaaccccatctctactgaaaatacaaaaaaaaattagccaagtgtggtggcaaacacctgtaatcccagctactcagggggctgaggcaggagaatcactagaacctggcaggcagaggctgcagtgagctgagatcgcacaacttgcactccagcctgggcaacagagcaaaactttgtctcccccctcaaaaaaaaagacttcccaagttgtcctgagccacactctggggtcatcacaaagttggccagagagggatctgagaatggattcaatgctggttcctctttagtagtaacagtgaaagaatgagaacaagtaccatttgttatgtcaattatgggctaaatgctttatagacatgattttatttaatcttcacacaacagttctatgtggtaggtactattagtacgtgtaggtgtggaaatgaattttcagagaggtaagtaagctgttggtgagcryacagctaatcattggcagagccaagattaggactctagtctttgaagtgtcagaggccctgtgtttagctcctacactccattgcttctagaaacagacactggcatcacttctaaccctgttcccttgagctgctgackacttaggctctccatcactcccctagagaggtgctgggggtgcacaggatgtgttttgcaggcttatgggtgctaaacctcatcctgccygctattatttattcagcatctgcccgacccatcaaccagtctgtcaacagcagtgacagtctggcctttcttcttttattccagcatcaggctgggcacatcagtggtgtcagacaaacacgtgtgaactgtggatggagccaggaggctcaagactgcctgatggccttgcctgctctcctgctcccccatgaggctgtcaggggtaggatggattgtttgaatgtgtgatgcctctgacccccggctggggatgggtaccagcagcaagagaaattctcaggctcagggatggagctgggcaggcccacatcaccttgcagagagtgtctggaaaggagaccctttagccatgtggtcattagcttctctttacagggccctttgtacagattctcagatggaaaatgtggtccttaggtctgcaagccggggagagcttgctggggtctctgtggactttcagtctttctttctcagacctttgggggtgtccagctggccctcatcatcaccctgccccgcccacaagagttcttggctcccaccggtcagaacttgatcttcacatggtgccctcctagcctgtcattccccacactcttccctgggatcgaccccacagctctgctgcctctctgatgccaaattcatgattagaattgctttctctctatctctccttccttatgtaaaatatgctaattgaggacctcttctgtgctcagcaccaaggatacagcagtaaccactttttctcccaccattaaggagattgtgtttttaagatgggagtgatgattgtcgtgctctgggagcactggaggaatgggtcagattggagggtgggatctgggatcaaagcccccactgggttgggggagccactgccctctcatggcaggcttcccccacacctacggggaaggccccaggtgacagctgtcacccaggcgggaggctggtggtgggggtccagcctgggtgcacagggccccaccagaggcagagcagaggcacagrcacagggaggctggggtgtgtgggccagagacccaggcaaatcccatcagaaaggctgtaagcaggcttcttcttccatgctgggagctcaaaagaacaaggcaagagcgactggttcttgtaggaagtaaggattagggaggaaagcagagagctggcctgagagaataagatggctgcaagagtcagaaataatacagaaatccacaagtcaatatcggagcccaggtcagagtcagaccggagggaagggtagtgtgctgctgagactctcgtgtgttgagtccaaacccctgaaatccctctgtcagaggacagggctggccccagagccagggctgggctcagccygcagaaagcaatcagcaggtgctagctggaaaggagggggatgtcagcacaggaaccaggcgcagcctggcagttattccacccatgaagttttgaatttagtgagatgatttgagatgataaggaggcatctgataacgtgcacatctgctctttgggaaggaaaaagaatgcagcataaggagttgatcatctcatcctccagggcctcattcaggggctgacttataccttggattgaagccagagttcactgagaacttgaagtgttgggaaaagcaaattcacctttaagttaattttcattacgagcgtgtttgtcaggatttggagaagctgggctgggactccacctggggccacggtggggtgcagggccaggtggggcaagggtggtgcctcctcttgagtgtccatccagggagtgggtatcctcatgaaccatgaacctgaragcctgaatcaaaattgggagatgagcttaagaaattgggacaaacaagagtttagtacctgacgttctagccaaggctctttagttgtgagatacagaatcccactcaagatagctcaaatagaggagcgtcttttaagagtatattctcgtggccctataagaacagaggcagagtagaactggcctcttggggactggactaggaattggagagaaaggagcaaggctgatctctcttctcaggggccacgaagtacctctcatttttgttttgtctcctcttcttgcacctgcccctcatggccagcctgctggagcctctgtcatgatcccttggctgcagtgtcccctactgaatgcctccggcagctacctatgtaaggcactgtgggagttctgagaatggaagagatctctaagggagggggttataaaatgagcgaagcagaaggctgacaaggcgtgctggggagggaggacrtggaaatgaagtaataatgggagcagatggtaggtccacgtctgtggcgcaagagaatgaatgaatgagggagaagcttctggtttggggaggtgatgggcgagtgaactgacccccggggtagcccagcttccttttgagttcacctggctttaaggaccaagcctgggagtaccacccccacatggccatttataatgctgttgtcatgggaaaatactttgagttctcaccagccatcttaatacatggaacttggggacacagtctcatgagtgctggggatcacgtgtatcatatgtatcagttgaggattcagtctttggcctctcagctttgaccaacagaaagactgtgtctcagcctctcaagcatcccccttttggtttttcttaatctgattccactcttccttttttaaactgtgtatgtatttttgtttgtatttattgaatggagttctatgtttcttgttcttaaatagtagttgatatctaaagcagaatgaaatgaaataaaccctactaaaggctttttacttatgtagcctccaatacattttcgcagtatagtgtcatatatagaaaaaatgtttcttaccatgacttataagaacactgtggtgaattcttgttgacaaaataaaagatcttttatggccaggcatggtggctcacagctgtaatcccagcactttgggaggctgaggcagaaggatcacgtgaggccaggagtttgagaccagcctggggaacatagcaagactctgtcttgacaaaaataaaaagtaaaagtaaatagccaggtgtggtggcatatatctgtaatcccagctacttgggaggctgaggtgggaggagtgcttgagcccgggatttccaggctgtatggtgagctatgattgtgcttgagcctgggatttccaggctgcggtgagccactgctctgcagcctgggtgacaaagcaagatgctgtttctaaaaaaatacctcccccaaatccctaaatttttraacttagcatcttagtttttgtaaagctatatatatttgctcttgtatttcctaacctctttttagatgggtctactttgttacagctggaaactgacctttgttgcaaatgcatttgctgctcaaacatgttcttactgggcatgataatgaactaaactaattttttataaaaccagtgccaccattcttagggctacctatgacatgacagaccttgaagatgttacttcaccttgggggacctcggtttcctcatctataaaatggagtgctggactctaagcttcctgaggtccaagaatgagtcctttggttcttttgccaaattccctgagtgtaatggggactggatacatggtgtctgctgcatacattactgattagataaccacaacgtctgggttctccttcctttgatgcctcgtggaacttcagaatagtctgcttagatcatatctagccaggaaccttgcagagacccactagtgggctcccagaggtgttgacagtgatgtggctgtgagcttcctttatcccttcttagaaaacaacagacagcagtgggctggagagaggaggtgaagaaagcccaggctgcatgaagggtgtgaaactgagcacccgacaagtaggcctggccataagggctgaggacacaacctgaagagcctcagtgggacgctgctgatgtgagtgggatgaggctccccatcctggtacccagtgcatgatggcccagacaaagctgcatttctgccggagctgtttataccaaggtctgtaggttgttatttctgtggtttccaaggagatccagagagagaaggtgatgatggtagtggagttgccattggaatcttcttccatgttctggtcatcctatttctctttggtcctctttaaggagccttgtttgcccacaaacactgaggaaaggcccagctggccttggcactgagctggtggacttggtcccacccacctctagctcccgctactacttgctttctgctccccaggttctctgtctcttctttcatccctggaccttagctgccattgtccaaggaatccctctcttctctgacattgtcatcacctataggcatgactttcccattccccttcaagcgagaggtcctgtgtggtcaaccagccagccaaatcttgtctgcagatgtgttttgtttgttttgtagtgcttacatctttttaatttactgccaacatttaaaaatcagatttctcataaaaatccagaactctggcttctcttgaaaagctggaagatttggccacaccggtccagtaatcccacatggcaacgatcaacagagttgcgtaacaacaggttgcactccatggtgagccgcagtccccaccactccctattcatcttcacacccaaccccgttcacttcagtgctccctgcctgcctgtccccctgccaactctaggtatttgagcatgcatacggggccagtgggtaagaggcaccaccttgggtcctaattcaggtcccctgacattggtcaaggctgtttttccccttcctcattaaaggaggaggatcctagagcttcagctattgctgggtagtctggaagaagatccttcttctggtgcctcttttcttccttttcttgagggttcagtctctatcacctgttgtaatatagatgctcatgtcctgggcactggatgggactggggtaggatgggacacagaaaaggcaaacagaggacacactcagtgttttgcatgggatggtttatggccctgcacatgtgctagcatcagacagattcttcctgctccagtcaatcagtgaggtgggaccacattagtagatattaacttctctaaaacaaacgggccattgcattttactgacaaatgccagcccccaggaaagcactggttaccttaacctctatttaccgacattgtctcttaaagttaaggtcactgctctgcagttcttcttgaacagagctgacatctgtcccgcaaaggtcaaggacagggggtggagttccttgctactctttctgcctctctcctccagttccctgagagaggactggagttggtctcttcctttctttgatctcctgagttccttgctactctttctatgacctaatgagtmtggcttgccttctgagacatctgtaaatcttcattggatctattgcatttatgcaaagaccatgtgataaaatcctaagatttttttgtaaggacaaatcaggtagtgagaaagacttaatccctgagtgtaggcaaccctttctgcttttcagagctcagatttaaattcagtgttcagtcctcaaactgtataactttattttggggtatatttatttgcatttctgtttacatttaagaatttttatttctatttgaaaacatgtattatggatatgtcttctcttaaaaggaattgcaagcttgtttgaaagcaggtggtgtagacactattgatacagaagcagtatcatgttaagcactgtgcaagacccttggtggaatataccatttctgcctccagggagcttacagttgttggattaattgccatctgggcactctgcttcctgccccgggctggcacgtgctaagtgagtaatccatccctgtctgtactgctgccgctcacaaggccaacattctagggtgtaggggagccagagttgtgactgctcacagattgaatctttccatgttctggcagtttcttcttctttttttaatgtttaattaatttatttatttatttttgagatggaatctggctctgccacccagactggagtgcagtggcacaatctcggctcactgcaacctccacctcctgggatmacgtgattctcttgccccagcttcccaagtagctgggattacaggtgcacaccaccacacctggctaatttttgtattttcagtagagatggggtttcaccatgttggccagactggtcttgaactcctgactcaagtaatcctactcctgactcaagcagtcctcctgcctcagcctcccaaagtgttgggattacaggtgtcagccaccgtacctggcctgttctggcagcttctacagaaaaggtctccattcagcaggctctcggctcctgcctcaaagctctatgctcctccagtgccstgagagagggcttgggtgttttgttcctctcttcgtttctttctttgaattcctggttggctctgggtcctgatctccacttcactgccccagttcagccctgacaggactcagctctgctgccctggctggtccacttattagtagatgactgttttccatttattagtttttactcatttggtcaaactgaaaaactaatgaggccaggtgacaggttcacttcccatgtggggccgtgagctgcgtctgccctgctagatggcatcctgtatgtgtagacgaaggtcccaagggagctggagctgggtgcactggtggcccagcatgcccttgtcacagccactgaggatcacccccagtgtccccctccccctgcctgggagcctggcaaaggcattttgcatttgggtggtgcttgaagccccctcacaactctaatttgtgtcagttgtggaaccgaacaggatccttctgccctttcacagcagaggacatggagacccagaggagtccctggtttgcctgaggtccygaagtctggtccatcatgctgggagaacacaggtcatgagccccagcttcaggtccttcccgatacctgactacctgctgctgatgggccaggaccggcccctttctcaggggctctcctttattactctgaaatgaacgttgggtcttgagagctggcttcgtttgctgcgttcgtttgctttcctgctgtgacgcagtgggaagctgcaggctcaawgcctcggaagacatgaccgtaagaagcccatcagtgctggcttcgggaaccacatgggggtccttgggcccatcaaatcgaacacctctcccttctgttttctttagtgaggtacagttgatcctcacagattttatattcgtgaatttgcctacttgcaaacatttatttgtaaccctaaaaatcaatattcatggcacttttttggttattcacagacatgtgcaaagcaacgaaaaatttgagtctcccaatttgcatgttcccagctgaggccggatgatctgccttcttgtttcaactcacatactgtaaacaagtgtccttcttgtgctatatttagtgccatattttaagcatttttgtgctttttgttggtgattttgctatttaacatggcccccaagtatagtgctgaagtgctgastagcggtgttcctaattgcaagayggctgtgatgtgccttatggagaaagtccctctgttagataaatttcattcaggcatgagttataaatatagtgctgttggctgggaatccaatgttaatgacctaatgatagatattaaattaggtgtctttaaacagaaacacacataaaacaaggttatgtatctatcggttgatgaaaatgttgtgaccagtatagtatagagcactacatgttgtgcagtatatagtagacagtactgtactttatactagagtgtatattgatctcctgggagcaatggttaggtgttcactagtttagtgaacttggacttcccagcctccagaactataagaaatcaatttctgtcatttatcagccactgatatttactcacaacaactttagagaacataactacttcaagtaatgagaattgacagtgtcttatttctgcaggacaaaagtacctcactgaatattctgcactgtctggaggttttcatcctccatctctgctcctgttagaacactaggggaaggaacaatgaggcaaaaggctgggcagggaggcagaccctctcagctgtgctaaacaccacagtgaccacaggccaaggactttacctcattgagcctcagtctcctcatctgtaaaatggggataacaataataataacttacagataataatacctcacaataataatggcccacacagatgcagtgagaattaactgagataatatatgcaagtactggccaatccaattcagtccacttcacctggacatattttgtaagcgtctgctgtgaacaccgtgtgggtggagatgcagaggatgttgctccagttcttaaggagtagagcgtcttataggggtgatagatggggtcacacagaattatactatgggactgatatggtgagtgtcaggagctccttgggggtggtgactgtatctgattcgcttttgtctctctggcacctgggatggtgcctggcacagagaggtgccctatggaagcttgtcaaatgagggaattaatgcatgagcacaaggccttggaagagatgtaaaagaagcacagaggacagagatggcttcatggaagagattgaggtgggccttgaaggattttcatcagggttgcagtgcaggggagtcattgcaggtggaaggcagaggctaaacaaaggcatggaggtgagaatttggcagtgagaactgagcagcacaggaagtgtagagtccagggtggttggcaggagggtgagtcctgggagttggggagagaagttggaaaggcgtgctgggatcagattcaggcagagcttgggctgaggccttgtgcctcccctctgtaggctgccctcatccgcacctccatgtgtggaagatctttgccactcccctcctgcctttccatccagatcagtcaacccttctctgggcagcctccggatgcccacattgcttcctctttctcccacactggaccatggactctgcctgaggtatgtgaattcttatgtattggtgcattcccagtgcctagtcctgtgatgggcacattttagatgcataataaacttgctgaataaactgctcacacaatgaaaagtccacttccaccagactcttcatgattgagccataccattaaattttttattttgctaatttaatagctggaaagtggtatcttgtttttgcttttatcttcatttctcaaggctaaacgtcttctatatgattatctactctcttagttggtttgggctgcggtaacagaatgtcatagactaggtggctgataaatgacagaaattgatttctcacagttctggaggctgggaagtccaagatcaaggtgctggcaggttcagtttctgggtagcgcctgcttcctggttcatagatggtatcttcttgtggtgttttcacatggcagaagggatgagagagttctctggggtctcttttataagggcattgtattagtctgttctcacattgctataaggaactacctgagactgggcgatttatgaagaaaagaggtttaattgactcatagttccacaggctgtacaggaagygtggctggggagtcctcaggaaacttacaaggaaggcgaagagaaaacaggcacatcttcacatggtggcaggagagagcgaaagaagggggaaatgctacacacttttaaacaatcagatcttgtgagaactcactcactatcatgagaacagcaagggggaagtctgcccccatgatccaatcacaccccaccaggcccctcctccaacaccggacattacaatttgacatgagatttgggaagggacacaaagccaaaccatatcaggcatgagcccattcatgaggactgatccctcatgacctctcaaaggtcccacctccagataccatcacattggagggttacaatttcaacatatgaattttgagggggcacaaaaacattcagtctatatatagcatctactaaattagaatttcttctgtgaagtgtttgccaatttcccctctccatacgtctattggatacaaagtttttctcattgatttgcatgggcaaattatataatatggatagtaatcatttattatcttcaatgcaggtattttcccttatatgagtggtttgttttcattttggggaattactcaacacatacaaaggttttgaaattttatacaaacttttaaggcttttgaagttaaatatgtcaaaccaaattttcttaaacttctaaacttaaaaaaattattcttactgaagctttgggaaataatttattttttggtagagtttttccatatggtttatttgtacttgaaatttctttcttayactttctttcaatccatttgggttttattttggggtaggactgataccccccagttctaaataataatctcagtacyrtctatttcatattttccctgtgtctgtgatgtctcctctatcagagagtgtgtttttatatatagagttagcatttatatccagcaatccatgtgtcttttcattttagctgctatatatatatatatatatatatwtatattttttttttttttttttttttttttttttttgaaacaggatcttgctctgtcactcaggctggagtgcagtggcacaattttggttgactgcaacctccgcctcacagattcacgtgattcttctttgcctcagcctcccgagtagctgggattacaggggtgccggctgatttttgtattttcagtggagacggggtttcaccatgttggccagactggtctcaaactcctgatctcaagtgatctgcctgcctcaacctcccaaagttctgggattacaggtgtgagcgtgatctgcctgcctcaacctccctaarttctgggattacaggtgtgagcaactgcatccggccttatatgttttaatatttggtgggtacatccttcttcattgcccttgctcttgattttttgaaacttcttgaagagtttcactcatttattcttcttgatgaatttgaggaacattttctacaaaaacatgagaggattccagcaaaatcctcttagaatttaggtcatgattgcattaaacccataacttcgtttggggaaaatgacacattcatagcatttaccccttccattgaggaacatggaatctctctctgttacttatttattattttcataaattgcgataaaaatgcataattctcctcttgcagttatacacatttcctattaaagttattccaagtctcatgttgatcactctgattgggctctcttttttccttgttttttctttgtttttaaatttttttgtagagacaagggtcttgtaatgttgcccaggctggtgttgaactcttggcctcaagtaatcctcccaccttgacctcccaaagtgctggaattataggtgtgagccactgctcctggccaaattttcctttctattgacagatttcttttttctttcttttttgacagagtcttgctctgttgcccaggctggagtgcagtggcacgatttcggcttactgcaacctctgcctcctgggttcaagcaattctcccacctcagactccctagtagctgggactacaggtgtgagccaccacgactggctgattttttttttttttttttttttttttttttttttgagacgaagtctcgctcttgtcccccaggctggagtgcaatggcgcaatctcggctcactgcaacctcctcctcccaggttcaagcgattctcctgcctcagcctcccgagtagctgggattacaggcgcccaccaccaagccyggcgaatttttgtatttttagcagagacagcgtttctccatgttgggtaggctggtctcgaactcgtgacctcaggtgatctgcctgcctcggcttcccaaagtgctgggattataggcgtgagccactgtacctggcggacaaattttaatgtgaaraatggccaagtgggtgcctttgtcaggtctctgagagtagaggaaggctttcccttcatctcctcccatccagcagggtagtggttgtctcatcacctaagcagctctcctccccgtctccacacctcagaacatcatggtttcctgcctggcgagcagcatccatgtcctgctggcctyacatcctacagcctcccttttccctattcccctccccaccaatcctcccaccccacctcctgcagccaccacctcttataggccaggcaccgtcccagagctggggagacatcagcaaaggagatggagcttgcattttagaaggtgttggggagacagacaataaaaacataagcgaataaatgagatcattgccgatgmtgtttagtgggcatgaaggaaacaaatggaggctgagaagtttattctagaatcttcctcttaggcttttagcctccagtccaatttttggccttcagcatctctgggaagaatttaactggtgtcccgctgtgcacccagatccctgctgtcccttcctcttcaccctcagccatggaggctgtggtctgatctccccatcctaccccccaagcatttctgtggctccatagccactatacccgactccttcctgcttcagaaagcaccccgcttagaaacttctggaagtctgcatgaacgagaggccccttaagaatcccctgagagcccttgaggaaaaggagtttccctctacaatttcactgaaccaaaaagagccaggccccagtggctgttcggctgacagttgtttctgtgaaggaaggagcagctacttccttcctatctgccttcccttccctctctccctttcctccgactaaatgaaaccagaatgtgctctgaacaccctgctgaagtctggaccatggggtaggacagagacaagctgtcattcagccaggtgagttccgggcagtcctatatagagggaggctggggtgcagcaggctggggcctgggaagagctttccctgaggaggcagggaggctggttcagctgtggtcctggccacagcmtaggctgcagtgtggtcaccaagatacaggaggttgaggccttccaaggggacccaaaaataatcatcagtaaggctatgtctgggtccctacaatgtgccagacatagcattaggtgctgctcacaacctgaaaagttagcacctattattcccatttgtatggatgagaaaattkaggctcagagaaattaggtatctttccaaaaccactggggtcagaaaagctgtgctaccaaattggacgtgttgtttccctcctatgttctatcctaactgactccctcccatccccgtttgttgaaaaccttcttgtccttaatgctgcctccagcaagctcccctggggaccaggctgggagtacgagttccttcaccaggttgcttgcactgttctttgtgccttgtgtctcctgcaggtgggcagtgcctgggtcacagctgtgtctcccacataccctggcacattgtggatctgatttgatttgaggcaggtggtaagccctggccagaggtctgcaccttggatgrctccgagggcatccagtggttctgagctcagcccgaattgaaggggccctcctttatgtctggaggggacaattttctattcctgaggaaggacctgctcagtcttcaaggacttctggtctgattcctggtttggcggctgagaggtctgactgtcagtgcccttagggcagctccctggtggaatggagttaccctggggaggcagagagcgggttaccagggacagcttctctgtggactcaggcctcatgtgtcatctgtcttcttctccttgccagctcctctcttctcctcttcctcagaggccctgcccctgtctcctgggaacttcacacctcagaatacacacatgtgtctgtgagccttcagaatcgtccctgagatatgcactctgaaagatctccttgtgaaggtgaccttttgtcttgcccagggagcaaggagctaggattttcctgacctttcctactgggatatttgctatcgaggattgaggctggaatacctagccttgtattataaaggctatcggtagagtcagatgggtctgggattgaatctgggttttgcctcttactaccttcttactacctaatcctcacttctctcatttgtaactaaagctagtgatagactctacctcacaggactgtgctaagaactaaatgaggaaatgctcataaggtagcaagcacagtccttggcacatacaaaataaccaataaacacggtcagtttcctcagtgaagctctagcctgcaatttggaagccattatgttactggaaaggggtgccgatccagaccccaagagagggttcttggatcttgcacaagaaagaatttgaggtgaatccataaagtgaaaccaagtttattaggaaagtaaaggaatgaaagaatggctactccataggcagagaagcccaaaagggctgctggttgcccattcttatgattatttcttgataatatgctaaacaaggggtggattattcatgcctccccgttttagatcatatagggtaacttcatgatgttgccatggcatttgtaaattatcacggtgctggtgggagtgtagcagtgaggacgaccagaggtcactcttgtggccatcttggttttggtaggtttgggccggcttctttcccacaacctgttttatcagcaaggtctttatgacctgtatcttgtgctgacctcctatctcatcctgtgactaagaacaccttaaccttctgggaatgcagcccagtaggcctcagccttattttacccatcccctatttgagatggagttgctctgattcaaacgcctctgacaattacccagtgtatcttggccaatcagctccactgtcccagggataacaggatgactccatataacctagtcacytgagtcctttcttagattatatctttaataaattatttatttatttaattttwttttttttgaggcggagtctcactctgtcacccaggctggaatgcagtggtgcgatcatggctcactgcaagctctgcctcccaggttcacgccagcctcccaagtagctgggactataggcacccgccaccatgcctggctaatttatctttagttaatttttttactgctatttgatatctcacattgttatgggcaagcaccatatggggaaaggtttaaagaaataccatgcctggggaacagtgggatgccttcctttcactgtcaatgactgtccaygggttctcagactgaacttggttttgttaaatctgctttgaggagaacttgaacttcttcctcagcttgtggtgcttcaggtataaaatatggcttattgtttcaatctattctgctccttcagacttcagaacagttagagtcaataaggataataataatagctatgatcactaactcaatgagtgctgattacaggccaggcattgttttctgccttgcatgtattcgctctctcaatcttcataacaaccctatgaggagggatggtttgatatacaacaataaataatgggtacagccaagaagccaaggccataagagatttaatagatatggaccaggtagacaaggatacctggagtccaggggccaggggagaactggaggtttgatgccaggtgaacaacagaggtactctaagagcatgcctaaggggaaggtctggcagtcactcatccaacaaccagagaacagggagaatgcagacgcaggcatgcaggaggagaggagggtccaacaccaagcaaaatggacttctggctgaaggcactggaaacagctcaaatttgcatgagggcctctgcctgggggcaggagcaaattctgagacttcatcagccagtgccaggacccaggcaggagccagtgatcttgactagagaatgggagatgggatctcagaagagccctcccagcactgtctgagagaaagcactggcaggtcccatctcattccccctcaaaagcttttctttcctccatcttgccaaggtgaggactcggaattttttctttctgtgatcagagcagaaaagcagaaaaaaaaagattggattacaacttttccatctgcataaacacaactatgtttctttctcatcagaaaaaggtttccctgacaactgtgtgtatatgtgtgtgtgtgtgtgtgtgtgtgtgtgcaggcgcacactacaaaatgcaggcatagtgtatgatgtaatctagttcttttaaaaaataagcctctgtttcctgattataaagtaatatgttgaacaaaatttggaaattacaaaagtatataagaaaataaaattcaccccagagycaccaccagagataatcacaatggacagtgtggtgatttccatccagcattttttcggcatgttttttgcctatttttttaaagaaaagatggaatcatactggattctattgaatttatactgaatttatattgaattatatttcctaacctgttttttgacttataatccgagcactttctcacctagtaaacttccttctaaaacagtttaaaaggttacgtagtgttctattatgtcataatttatttcaccacccctgttgggggtgtagttgctatagccttttttattatacaaaatgttgagatgaacatcctttgacttcattgccaattaattccttaatacaggtatctagaagtcatattattgcctgttttatttatttttattttatttttttgagacagagtctcatttcatcatccaggctggagtgcagtggtgtgatctcagctcactgccacctccacctcctgggctcaaatgtttctcctgcctcagcctcctaagtagctgtaattacaggtgcgcgccaccacgcctggctaatttttgtattcttagtagagacggggtttcgccatgttgagcaggttggtcttgaactcctgacctcacgtgatccgcccgcctctgcctcccgaagtgctgggattacaggtgtgggccactgcacccagccttattgcctgttttaaaagattttgattagtcctgtgaaattacctcatgaagtgttaccaatttatagtcctccttcaccaggagtgtataagcattcccattttattatacacttgccaatattaaatcatttcacaaacaaaatctggcaatggtcttttaactcattttcccgttctcttctgtagcatatgaaatttggcacggatataaaagttacttggcattgaatcacttaagattacacattgattgctttagtgctgtagcgattgccttgttcattcctgaatcaaccttttaaaagggctttgccttttaatttttttctaatgaataatgaatacttcaccygattgatgtgtcttgcaggtaattttccaacaaagttgtgcagatgtttcattcattcattcattgcccttccccgggatgcttgctcaggccacacctgtacccgtctagggtagagggcaggctttgtgagcatggattctggagtcagacgggccctctttgaaatgcacattcaatcattgactagctgggtgaccttgaacaacttattcatgagcctcagttttctcctccttaaaagaggaataacagtacttatttacrggattgctgtgcagattacatgtgacctaaaggcccagcaaattaagaaggcctaagacatggtcagaaaggtaagagtcaagggccttgctctagctggccgtgagctggacctgtgtccctcgcaggtgacagttcctatcttgctcgccagccccagctccagccacgttggactcttacttcccctcctcaggacttttttccttgcagtttttgtttgtttgttttttgctagaatactgtccccagatggatatccatctctcatcacttagctcaaatgtcaccgactctgagagaccctcctaggactcccatcccccactgctctgacatacaactctgttttaatttcctcaaagtgcttaatcccacgaaatgatctcattatttattgttaatttccwtcccctccatcagaatgcaggcaccaagagggcaggcactgcctgcaggaatccagcacagtgctgcccaaagcaggtgctccaccaaggcgtactgaatgaatggagtaggaataaggtgatttttaggatcttgtgctggatatatatttttttctttttcttaaagtaaagcactgcagttttatgatagatttagctctcgtgggtcaaagctgtaaatacagtattaaaaaatgagtaaacatgagagctaaggctgccgtcctgcaaggtttctttagtatgtaatgtctatgaagggctttgatatcagaccgatatggagagaatctcaaattctccacccaatggcggtgtgtccctagtgatgtcttaactgctctaagcctcagttaccctgcatataaaatgggaataatacccaccttagaaaattggcttggggattaaatagagaacatatgtgaagtacctgcaaacaattggcatttaaagttaaatgctggcagttaaaaaatggtaggtattctcatgttcaagagaaccaaggaccaagtaatgttagtctttaagaataagagatgaaaggaataattaatatagagttttgtttatgaatgatattaatgaatatgaattcatagtcactgttgttcagatgggcaatattaatctatggcacaaggctttacccctagggctttggaaaagcccatctctttctgcctagatgtctttgggtgtatacagttaatatttcattaattatggtggaggggcgttgtgtgtacatcaatgtctcatatgatgcatctaattaaggcactttttgttgagagcggaagaaaattgggctttcccaaagaaaagcagcttgctcccaaagttgctaacagattgcttcttaattgaacttgggaggtgaattatatggtgaattagaaaaaagaacagctctgaatttagtgaattgttccataaaggaaactgtgggattgaattgcaaatgctggatagaaacatttcagccgggcccatgcatcacgggccgctgacctctgctgtgtttcagtgagagcttgaacaggccgggagctctcttttcaaggcctggagggcattctttcccagagaccagctgtaagcctgggtttcttatgcaaaggagacgtctgaataaacctctgtgactaatgaaatctacaaggtctttgcatatcctctcaccgaagaggtaattaagcaaagatcaaatatggggatatatatgtatttttttcaaactttttttttgtcttgcaatcacacccaaggaaaaatacatccccataccctgaaarctctcccctcccagccctcagtctttgtctgcatcaggctgtttctctcttccttgttctatggtgcctgcagctgcagttatagccagagccacacctgtcgtactcatttgccagtttttattgaaacggagaaacgcttttcatcgatttcgatgtgagacatggcttttgctagtgttcaaagtgtctgtctccaagtccatgtcttccgttcctggtgagctcaggaggagagaggttgggagtaagaaaatagtacaaggtgaggcttcctcttacagggtgctctgagtggcaaatctaaaccttggctgtaccatagaatcacctggggaactctttaaactccccattcccaggccatgccccagaccaattaaataagaacctccggcgggggtgggacccagacgccagtatttttttaaaggcttcccaggtgattcaaatcgcagccaaagttgagagccattgtttgaagaatagttgcctccttctctccataaaagctgataaggacaatttttttccaacagttgagttagaaatgattgatttctctttttaarcactgcctacgtgactcgtatgtccatccatccatccatccatccatccatccatccatccatccakgcattcattcacccacctacccatccatccatcccttcatccatccgttctgtattttactcagtacctgccatgtgccaggtctggtgctgggtattcattgttagacataacaaaatcccttccttcaagatgtgaaaagctaaatcatgggggattcagctgagtaaatggatcccagtaccttgtggagagggtggtgaataaggccaggggctgtgggaacagagagaatgacttttaccccaagaggagcaggggggcggatactcagaggaagtggtgtctacatggagacttgaaggaccagtagggtttggccagatgaagaggtgggtgtggttgaggaaagtgtgcaataagaggaaaatagaaagccaaggcactctaagtcacttattgcagctgagcacagagtggcagtggagggagtaggagaggaggcttgaggtaccttgtggagcaggctggcagggccatatcactaagggtctcatcagtggtgttaggaggtggaatctatcccaagggcaggggggagccatggaagggttttcatcaggagatgaaatgtggccaagccacattaactccaggtaggtccccggtagacagtgctggaagcatgagatttgcttcctttctgagataaaagacagaaccttccatctcttgttgataaggacaggggagggctctatattcttaactgccatggctccagccttatctcaagctgagctagacccatgacttcatatgtcttcttacagacctcctggatgggcaatgccttgtatcccctgggaataagcagcctctaccaggcacctcccttgttctcttcgttctttctgtgactgaggctgaagagaaggagtacaggcttgggggtcagacaggacccacctccagccatcacctttactaactctctctgcttcctcaagacaagcaagtcatttcacctcttggagctttgtttcctaatctgttcatggtccgtttgttattgggtcttcatgagactgcacatataaaactgaaggtgaggraaagcacttggcactgttcttagcacatggtttgcactataattgggacttagtaaacactaattctttcccccctccatcactggggggcacttggtctccccactcctattcactacatattatccctgtcatatacaaaaccagtgcagttacaaagccctttcctgtcctctggatcccatctagttcactcagaataaaagccaaaatcctgaatggcctgcaaggccccatatgagcagattctccagaccctccactgcctgctgacctcatcatctccttgtctcttcctcactcattccattccagtygtacccacctcccccyggccaagcacactcccaccccagggcctttgcacttgctgttcccatagtttgaaatgcttctctccagatatccacctacatcctccagacctaaatatctggttcgctatttgtttgtcattttttcccctacccttcatcagaatataatttccatgaagtcaaggtacagtttcttctgcatcatatcccaagcagcagacacagcgtctggcctgtagcaggtgttggatagatayttgttgaatgaacgaatgcccaaacaaacccattacctcatttggtccttgcaatagtccatttgacagatgaaaaatactaacacccgagttccccaccacagttgcacagctgagtgaggctgagctagacccagagcgtcggctccagctcgcctccacaccacaggtggtacatttgtctgctgctgagagatttcataccatcaggaattcccctgacctttagcccgagaggaaatgatattgctgcaactggatgaatacccagagggccaggagctggcagcgaacacccggcagctgcagggagtgtgtgagtggattccgggttggccaggaggcagcggaacgagcaggatgcaggcgcggagcctcccatctccgcctggctgtagtgggaccttctctacaggagacctggcagctgcagccactgcccaggtcatggtcacagagagggaaagtgatggcctgcatgtgaggagttgggagcgggaccacgtggctgtctccagggtcatacaggcctaggggttgggttcgtggtgccatgtgagccttggttgagcagygtgggaagcctttatctgtggggccagggaagaccaccgggtgtctgaccaggagactgtgtcccgagcccttagcttccctgatgggctgggcaaccctgggttaaacattttgtgcctcagttctctcctctggaaaatgggattacacataaagtgttctgataagggttaaaggggagactgggaaactgacttgtaagctgtaagtttctaaataaatgcaagaaataatatttttgtttaaaaatagattgtcctttggttgctttgatgtggtttcgtgtgtgtaatagtctctcctggacatagtctttgtcctcaaatctgctccctggtgtcactacccacccagttattcaaattccaagggcaggtggcattggtggcccctgtctttcctcagatcraatccactagccctacctgcgagctctgcctatgactgttccctaacacgacaggtcccagcacctccactgcagtgtctggtccacrccaccaccctgtctcactcggacacttgcaaggctcctaactgttcaccccgcttctgcttttgtctgcctgtgtcccagggcaatcttggtaaaacacagataaaaacacattcctctcatgctttaaaccctctgcagggttcctgtaacaaagagaataaagtcacaaaacacagcctggttggcaaggccgtgtgggcctgcctccctctctggccctgttcccacttgcccactgcggctgtccctctcatgacaagcccagtccccgtctaggctccttctggatccttcccctgcggaggatcctctggccagatctccacatggccagatcattcctgcctttcagatctcactgccatcccacctacctgaggcccctctccaaccaccagataagcagctcctcccatcacgttctatcacacattggttttgatcttcttcagagcattttccaaacctgcaatgatctcattcatgaatttacttacctgcggtttatggtccagctttccaattagaatggacacctcttgagagcaggawctcacctgcctcgttcactgctggatccatggtgcctggaattgcacctggcccatagtaggtcaaacagatatttggtgattggccacattcctggtagagacaaatgttaacacagtttataaatgatggctactagcaaacacgtacaagcatcactgtccttcgtaaacagagtgtctatggartctaatttataaggtcaacacagtaggttcctacacggaggcttaccccacagaggaaacccgaatactaagagagtgcacagggtaacaaaggcagcagtcacaggacgcattgagtattcggcagcactgggcacatctccctgtgttctgcaccaagcrgactccaggcccagagaggatcctatttgcatttggcctttcttatggaggtggggggcgcgtgaggaagctgattttggggttgcctggtaactttgtaaatttgattctgggtgctcttgaaatgatccaggagagttatactttatattaatttgcgactgatgtgtgtggttattaaacaaagcaggttygtttttgccctcacatctagaatagtgtggggccatgtggtaagggctcagttgatttgtggaacgaagcttacgaatccgtggtgattctgatcctccccaggtgaccaggtttgctccctcatcccttggtgctgatgcagagaaggctgatgtgtcctcatgcctctttcttctccattcctctaggtgggcttgaagagcaggcatctgagagcagcccagacaccacagccatggacactggcaccaaggaagctggaaagggtaatgtgagccctcaccaggtctttgggtaccttgttttctttcagttgtggaaaaatacacgtgacataagacttaccattttaaagcataccctttagtggcattaagtacattcacaawgctatgtaaccattacccctattgagttccagaactttttcatcaccctcaaagcagactctgtactcatgaagcagtcactcccattctcccttccctagtccatggccttggatagctcttatggaatcttttcctatctcactggctgagatggactagaagcactgaagtctgtggacgtgagcggggctggcgtgctgctggcgaaagggatggaagggcggcatttggtggtcaggaacagcatagctctcagataaactctgctctcttggctggacttttctgccttgtrcatggatygtgagttgaagcccctgaagacctgggaggggcaaataatgtggctttgagaactgagtgtctgagagaatgaatgggtgagggaggcaaagaagaaaaataaaactggagtggggattgtgggggaggtgtagactagagactccatggtctactaagtgggaagcaggtgaggtgctggttggctgtgggcaggkagccaggagcctgcccagaagcactgccactgcctgtctatatgcagatgctcagacctaagtgtggtctgctggttgtttaagagtttctagctcggagatcactggacacatctattgtggagaagcttctcctgttcagaagcagtgctggaggagaggggctgctggacttcccgtctggcctgcatcctgcaggaatcatgattcacagtcagcagtggtatttcttctacacaaacttcacagcaaagcaaaagaaaaatttttttttttgaggtggagtctcgctctgtcgcccaggctggagtgcagtggtgcgatctcagctcactgcaagctccgcctcctgggttcacgccattctcctgcctcagcctcccgagtagctgggactacaggcgcccgccaccgtgcccggctaatgttttgtatttttagtagagacggggtttcaccgtgttagccaggatggtctcggtctgctgacctcgtgatctgcccgcctcggcctcccaaagtgctgggattacaggcgtgagccaccgyacctggccaaggaataatttttaaatgccagaatcttatgtctcacggacgcctatgtaggaatgaaatagaaatcattatttattttgtgtttcagctttcatgctattttacatttttacatatatacttgcatatatgtaattttacacaaatgcataaatgtgataatatcatcatacttttaaaagtgttatcttctttttcttttctctttaatgtggccacctcctttcaggttcttttttccacatatcaaccctctacgctttcccaggttatgcatgctagtgactttgtatacagccttcatatttttctccatgcacatacattgatatatatacagagatatatgtatataagcatacatctaaacataaatacagatacaggctttgtcattgttttaaaacatagaatcatatttgatacacattttttctgcatcatgctttcgtcatcaatacctcatgggcacaacccctccaaggcactagttataacttaaatgtattcttttgagtagatattactgatatggatggatcataatttattcagtgttttccttatccattagcattcagttcacttcaagcttttgccgtgatgaataatgactgcagtaaacgtttctgaacatatatccgtacatatttagtgtgcttgtaatagatgttgctaggttgtgtttcaaaaggtgtaacaattcacatttccatagcaacttataagtgtactcctttcccatattcttactagcagtagggagaactcattatcagtgtttttaacaagtaagctgtggcttattgatatttaatttgtactcctctgactgctggtgccgttgaacattttttcctatgtttgtcagtgggaatcgcctcttcctgtcctgtgcccattttcctrttgggttgctgatcttcctcttcaatctgacttcttttagagagaggcagatcctttagtcacccatgtaactaatctgcatttgtttcttagctatacagcttgttgtttgggctatgtgcaggacttgctttcagatccgcgtttttctgctttgcttatttaaggatattttgacttataagtttttgggctccccagacatctggtactcaatggtccttcactttgccacaaatgatcagcacttagtggtaaaaatggagcatgtgtgaatgaatccagcagagtttgtcatcacactgcagtgacaaagatgccacactcatttttcttccttatttatgtgatttattgttgcataaagaccacacccaaacttagtgacttcaaacaatagtttgttattttcatgattctgggggttgactgggttcagtagggtggttctttggctgatgccatctggggtcactcacttgactgaatttatctagcaggtggactgggctggaaggtccaaaaaaactttagctacacctccagtgccccagtgtgcctccttgtggccctgctctccatgcagactgtcaccattcagttgtctaatcagaaacttttcatagcatggtgattggcttcccagagggaaggaacagaagttgccagtccatttaaggcctggactcaaaacttcaagaatgctacttctgctacgttctgttaacaaaataagccaaacgaccagaccagattcaaggagagagaaatagattctactccttcacgagagaagtggcatgacctcacagggataaggggacttggcggccatatttggagactatctaccaccttccccccttgcctctgctccccagcaatagatattgtcagagtttttgatatttactagttcgttgggtgtaaaatgacccaactataaacttggacagtcagacacacttgggtttgaatcccagctcacccacttagtagctrtgactttggataagttatttaactgcttgtatgaggtttagagggaattagaaataatatttatgtaaagcacatagccaggtgtctggaacttaaaagaggctcaaggaatgtagctcttccacctccacctccaggaattatattatccagcattgaaagtgcatcatctacctctggactgggattccacagctgtgcaacagctgcatagaaacacaattacagaggacaggaaggaagacggcggctgtggcccattaaaattctgcctctggtggggttgtgcacagcacccacactgcaacaaaaaatcttgggcttttcagggagggtgatgatagcagtgccctagtctgcagttcccccaaatggccctggtttgttcgaagcggataaggaatgtgcaggctaggccagtccctycactctgcattacagcagcagacaagcatgtctttaagcatccagggcagtcctgaagaggaaggaaatctcgaagtgaggtgagggcaggccgttctaaccagtcyctccatccttcccatcccaaccctcaggatgctgtcggcgccagcgctggatgcctcttgcttttatttgaatgaaagataagacaygtygtgtcaatctcaggttccctttaatcacaacttgccccccttccaccacccccaggaaaagagaccgcccaggcaggagaaaggatctgagggaagcgcccagtttcggcagcaggtttatttcctggcattwtgtggctcccctcagccctgacggtggggatttgtgcctccagctttggggagggggaaagggctgaaatgctcactcaacatcccctccggcagaccctttggtcagaaggctctccctcctctggagatgagagctcagcatgcatttcagggctgataatgggattaatgaaatggagtgtgcaactgctccatgaatgaagctgtgactgttttgatagagcctgatttccagaaccatattcatgaaagagaatggacctttcactttcagtaacatttcctaggggctttgtgtgaaagcaaataataatggaatctggttgaaccagaggacaggcatcccacaaacttgggtgcaaaacagcactcgacgctggaattcctaacatcacttacgtcagtttacttgggtgtaacaactgagccccacgaacttcaggccttcctttttagcctgtctcaaatgcagactytcgtagccattgtggcagctcacactgagcccttactcaccgcaggcatttgacattcattacctgggtcaccaccgccctgcagcaggaagtgaggctccgaaggggaagtgatttgtccaaagccatgtaggtagcaaatggcagcatttatcttgagcttaagtccccctgaccccaaaccccttgatcttaacctttgggctgtatcagtggttcccaaacttcactgagctttgtaatcacctggggagctttagaaactgcaggtgccttgactccactctaaggccaattgattctcagtctcagagcagggaggcagacaccagaattttttaaaagctccccagttgaatctaatgtgcagccaggtttgagaaccactgtgcagaatggtctagtctcccctttacttagcggccttcagcctttcgagattgctgcaggtgaggtgcaaattcacccatcacctttggggtgagggttatgcagatggctgggctgtcagcgtgtttacttcccgtgtgggaatgaccaattgcctaatctaaaaattgcacttcctcactggagaaggctgcctcaggcctggttctgtttatgacatggctgtgccttcagctggaaatagaagattgaaaagcaacaaccgctttgctctttcagagaggacagggctcgctcccagagccagagaatttaaatgggctttatcccccctcaaccctacccccagcgtgttaaatcctgtcagacgccctgagctcctcttcaaatgcaggactcttggccataataaataattacatccttctatttggactccgattccagatagtagtaatccaagaaaatccaataatgacagttgcattaagatccttcttccaggctaagcagaacatctgtttagacatatttttaatcggcaaatgcttcctgtgttgagtccttagcaaattaaatttctcactggaccaaaggggaagctgtcattcaataacccatttctggaaattacaccctagcttctttccaggtgcacttaagattttcccatgctgacttggctgcataaaacagacccttataataccaggtcacatgtatatgcagcacagcttgtcagagaaacacggagtatcttagtgttatttctttgaatagagaagtatttttgcccattctccaaaggagagttggcgacagaggaaaattaagagacttgttgaaaaccatatgggaaatgagtaacaaacttccacttgctacattgctgcctgtgattacttaagactggataattctcaggatgtaaacattaagggcttcagtgttgccaacattttggagaggtttccaacacagagttgtttggactgttgggctgtttatttttagaatagctcatcccttctttaattcatacattcaaaatataaaaatattgaatgctcaccaccagtcaggcaccatgcagggtgtggagaataaagtggagaacaagctggcaacatttcttgccctcatggagcttccagtctaccagaaaaattcacatttgacatcttgatgcaatttgtagtttagggctggaatagcaaattagaatatcttccgtagagggcaggtaggtcatctaaaaggtgaagtaagctgaataggacaatgtgaagggggagagagattctagcaaacagaacatgtgctctgactatggagagcaggtgcttctaaactccagctggttgtactatgatggaagatgggcctgctgttgccaaatctttcagtttttaaagaaaaactagaaaatctggattcttatgtgaaatcccttgatttttaaaagttggctcgtacagggagatttttaaaaaaacatagtgtgggccaaaagtgtccaggccaaacagaaacacatctgcgggttgggtttatcccagcactgcaagtgtatgacttctgttctagaaattctggtggtaagataattattttcaggtttaacagtgtattacataccaactttctgggtctggaaatatgaccaactagatgagtaggaacccgttatacaagtagaggaacactgaaaaaaatattaccttttcaccaccccaagtgaaaaatacagagttgagttcaaaggaaagaaaggtgaatggccatgatcagaagcgaataaggaacataactcacagaaggaagcctcagatgttggtgatgttagcagcagcaaatccatacaggtctgcagcaatttgattcttgcctcctcggaggaaagaattcagccaaggggcataaggcagagagagagagagacccaggcaagttttagagcaggagtgaaagtttattgaaaagttttagacacctgtaatcccagcactttgggaggccaaatagggtggatcacttgaggccaggagttcaaaaccagcctggccaacatagtgaaaccctatctctactaaaaacacaaaaatcagctaggcatggttgcacatgtctgtaaccccagctactcgggaggctgaggcaggagaatctcttgaacttgggagatggaggttgcagtgagccgagattgcactgcactccagcctgggcgacagagcaagactcaaaagcatttccaggagggagaaatgagatgtacgaaataccagtgagcaagggaatggatggatatgaaggcagatatcaatctgtattgcaaacaaacacaaataagccatcaataatggtgactaatttggggtcttgaaaggaagcaaataataacatgaaaaattggagggtgtcttacaaattaaaatattttaaaaaccctgtatttcttagaacaaggctgtggtttctggcttcagatctgtcttctttttttttttttttttttttttttttgggatggagtcttgctctgtcnnnnnnnnnnnnnnnnnnnnnnnnnnnnnnnnnnnnnnnnnnnnnnnnnnnnnnnnnnnnnnnnnnnnnnnnnnnnnnnnnnnnnnnnnnnnnnnnnnnnnnnnnnnnnnnnnnnnnnnnnnnnnnnnnnnnnnnnnnnnnnnnnnnnnnnnnnnnnnnnnnnttagtcaggatggtctcgatctccctgaccttcatgatcctccctgcctcggcctccccaaaagtgttgggattacagggatgagccaccacacccagcccagatctgtcttcttagttcactaattctttatactttaaaaagtcaagtatgaatgttaaacatgaaaggcaatattaaagaatagaaagcacataatggaaataaaaagtaaatatagaaaaatttcttaatctaataagaaagcaggaaaggagaataaaagaaggaaaagaaaacaaaagaataaaagaaagcataaaacaaaaggaagggaataagtccaggtatatcagttataaaataaatgtaattcatctgttagaagattctcaggttgaacaacaagaaaaaaaatctagctgtttgccgcttgtaagagacacccctaaggctgggcgtggtggcccactcctgtaatcccagcactttggggggccgaggcaggcagatcacaaggtcaggagatcgagaccatcctggctaacatggtgaaaccccatctctactaaaaatacaaaaaattagccaggcgtggtggcaggtgcctgtagtcccagctatgtgggaggctgaggcaggagaatggcatgaacctgggaggtggagcttgcagtgagccgagatcrcaccactgcactccagcctgggcaacagagtgagactccgtctcaaaaaaaagagacaaccctaaaaccgaattaaacttacatgcagaaatccttaaaaaaaattagcaaatgaaatccaacaatgtacaaaaaagaattatacagcataacccagtgggatttattccaggtatgcaaggctgattcaacatttgaaaatcagtctatagaacccgctaaatcaacaagctagtaaagaagaatcctattatcacagcaattgatgaagaaaacacatttaacaaaatctaacacctattcacgataaaaactcaacaaattaggaatagagaggaattatcttaacttgatacagagtgtctagaaaaaaacytacagcttacattatactcaatggtcgaaagaccaaacaccttttcccaagaccaagaacaaggcaaggatgtctgctttcgtactgtcattcagcgtagttctggaagttccagacactgcagtaaagcacgaaaaacaaagaaaaggcaaacaagttggaaaggaaaaaataaaactgtccctgtttgtaaatgacatgtttgtctacatagaagatcctaagaaatctattaaggaaaaagaaaagcccaaaaacctcctagaaccaatcaatgagttcaacaaaatttcagaaatacaaggccagcacatttctatattggaaatataaaattctataatggctcacatttctatattctaacaatgaacatacagaaaccaaaattaaaaatacaatgccatatacgcaatcactccaaagaagatgaaatacttggatatacagttaacaaaattcgtacaggatttgtgtgatgaaaattaaacaatgctgctgaaaaaaatcaagacagacctaaatcagtggagagatatgctgcatccctggtttggaagatgcatagagtagaggtgccaagttctctccagattgttctataggtttaatgcaatttctatctcaacatggttttttattttcattttttgcaggcatagacaagcttattctaaaatttatatggaaagacaactaaaacaattatgaaaaagaagactgaaggggtgtaatcactctaccccatataaggcttactctgtagctacagtaatcaagatggtatggcattggcagagtgataaacatgtagaccaatggaatagagaacccagaaatagacccaattactatatgagccagtaattccctctttgatatgtgtcccagagaaatgaaaacttacctttacacaaaaatccgtacatgaatgttcataatggctttatttgtaatagcaggaaacaatccagatatccttcaacaggtgaatgggtaaacaaactgtggttcatccataccatggactactactcagcaataaaaataaactattcatacaggcaacaacttagatgaatctccagggaattatgctgagtgagaagagcataattattatccctattatatgctgtatgattctatttatatgatattcatcaaatgacagaattttagaaatggaaacagactggtggttgccagaattttggaatggatggaggaaaggggaaagaggggtagatattgttataaaataacaacatgggggatacttatggtgttgaaactgttcagtatcatgaatgtggtggtagatacacaaaactgtaagtgtgataaaattgtcttacacacatacacacacaaatgagtacaagtaatgctggagatatctgagtgaaatcagtggcttgtatcaatgcccatatcctagttgtgttattgtactgtagttttgcaaaatgttaccattagaggaaatgaaatatctgaaaggaaggtacatgaaatctctgtattatttattacaacttcatgtgaatctacaattatctaaataaaaatttcaatttataaaaagctactttatataccagaaaatataatattgaacctcaatattatgataattgcaaagcttgatgtattgtttgttgtgggaaatgcaattaactcagagaataacacccattcaatgactcactttaacaaaaataattatagaaaaatattgaaaatggatagaaaaaagctatatgaggcaaacactaaccaaaattaaaaaatgtatagcaggccaggtgcggtggtgcatgcctgtaatcccagctttctgggaggtcaaggtgggcagatcgctttagctcaggagtttgagaccagtctgggcaacatgatgaaaccaactctctacaaaaagtataaaaattagccgggggtggtggcgtatgcctgtggtcccagctacttgggagggtgaggggggaggatggcttgaacccaggaggcagaggttgcagtgagctgagatcatgccactgcactccagcctgggtgacagagccagaccctgactcagaaaaaaaaaaaggtatagcaatatttatatcagacaaaacaatcattattatgaatgcatgttattattataaaaaggattattaatgataaaagaaaaatttatctggaatgtttaacaattctaaacttgtcttacttaaccaacatggccttgaacaatctagagcaaaaattaaggatagagaaaatgacaattcatagtcttagttctggaggttttccttaaagcacttttcttagtaactgatacattaagaagccaaaaatttttgtaagtggaatatttgaacaacatatgaaacccatcaattagacatcacacattattataagaaaacatggaacatttataaaaatcagtcttgtattagcttaycaaggaaggcctaaatatcaaagaattgatactttagagcaagggctagccrtcaatgatatcagtaggccaaatccaacctgctgtttttgcaaataaagttttattggcacacagccatgtccatttattgacatattatctgtggctgctttcacagtacaatggcagagttgagtagttgtaacaaagaatatatgacacataaagcttaaaatatttactatatggccttttatggaaaaattgctaacccctaccatgaagaataggttattagaacacagtgcagtgttagaaatcaataacacacacacagaaacaaatgtttagaaattaaaacccatactttgaaataattcagaggtcaaagaagaaagtctaaatggaacttaaagaatgtatcaatatctaacattgaaaatgtacatttcaaaatgtgagacacaggaaaacaagacgtcagagagaaatttagccttgaaaatgttaatatttataagaaagatgtaaaattaatgcaccaagtattcaactcgagaagctaggaaaggatggccagttgattttggacaagagcaccaagacaattccatggagaaaaactagtcttttctacaaatggtcctaggacagttagatgtttacatactaaagagtgaagttggagccctacctcacaccatatacaaaaattaactaaaaatggatcaaagacctagatataagagctaaaactataaaactgtcagaataaaacatacgtataaatctttgtgatcttgaattaggctatggtttcttagatatgacaccaaaagcacaagcaacaaaagaagatcatagataaattggacttcattaaaaacatttgtgcttcaaaggacactattataaaagtgaaaagacaacctacagaatggaagaaagatttggaaattatatatctgacaagagcctggtatttagaatatataaagactaattataacacaacaataaaagagcctcatgcctgtaatcccagcactttgggaggccgaggcrggcagatcacgaggtcaggagatcgagaccatcctggctaacatggtgaaaccccatctctactaaaaatacaaaaaattagctgggtgtggtggtgggcacctgtagtcccagctactcaggaggctgaggcaggagaatggcatgaacccgggaggcagaggttgcagtgagccgagatcgtgccactgtactccagcctgggcaacagagcaagactccgtctcaaaaaaaaaaaaaagaaaaaaaaaaggaaatgaataaataatttgaatagatatttctctgaagaagatacacaaatgaccaccaagtacgtggaagagatgttcaacatcattagtcattggggaaatgaaaatcaaaaccaaaatgagattccgcttcacaccattaggatgactataataaaaaagattgacaatcacaagtgttgacgaggatgtggagacattggaaccctggtgtatttctggtgagaatgtaaaatggtgccactgttttgaaaaacagtctggtagtttctcaaaaggttcaacatagagttaccatatgacccagcaattccaccccaggcatgtacccaagagaaatgaaaaaactatgtccacaaaaatgtgtatatgaatgttcatagaagcgttattcctaacagccaaaaagtggaaataacctaaatgtccacccactgaagaacagataaacaaaatgtggtatgtgcatacaatggaatactactcagccataaaatgaagaactgattcatactacaacatgagtgatccttgaaaacatgccaagtgaaagaagccagacacaaaaggccacatgtggtgtgattccatctctaggaaatgtccagaataggcaaattcatagaaacaaagttgattactggttgccaaggtctcgggaaagggagagatggggagtgactgttaatgagtacaaagtttctctttggaatgatgaaaatactgtagaattagataatggtgatggtttcacaactttgtgaaaatactaaaagccactgaatggtatactttaaaaggctaaatagggtgtgtgaattctatctcaatttttttaaataagagagaaaagaagctaggaaggaaatgtcaggataaaacaagtgaaaatagaaggaagtaataaagtaaataacattaatgtaataaagaaaagtgaaaagaattggccaggcacggtggcttacacctgtaatcccagcactttgggaggcctaggcgggtggataacttgaggtcaggagttcgagaccagcctggtcaacatgatgaaaccccatctctagtaaaatacaaaaattagccaggcatgatggcttccgcctgttataccaactactcgggaggctgaagcaggagaatcgcttgaacccgggaggtggaagttgcagtgagccgagattgcgccactgcaacctgggtgatagagtgagactctgtctcaataaacaaacaaacaaacaaaaacaaagaaaagagtctgcaaaaacaaaacctgatttttaggggaaaaagtataaaaactagagtgaaaatgctccaagttagaataatgagggattctaagcaagccaactgaaaacaaaattttaaattatctgactggtgaatgaaatgcatgcggattcagtgactggtgtccatggatttcagcgttctattccacctacctacctctgccattgtgggaggcccaacgcgtggactcagaaccttccatcgaacctccttgtgtttgccacactcctgtcttaagggtacagatgccaagagttgggggttttatgagggtctgcttttcccacggtttttcttataaataatttttccagtttcacagacaggttcactctccttgttgtactggccaaattatttcaaaatatgcaacactgaccatattggatcaaggcaagagattgacccagtttgttccccaaatgcttgtgactctgagcagaaagtgcaccccaacctcagccccacccaaagagctgtgaggtatccctgcccatttgattctgtggccccatgtgacctctctcaaggcctcagacaagccaaacccactcccatcatagcccggtacatttactacatgtactcttaccccatctggaaaactgccacccagggcttccaaaccctgaactgatgaaatagcccctttggaacatgttttaacaccccctttttggaattgtggataatacaacctcagccataattcacaggaggaaccaaagggcaaaatcaatattaacctgactgtgttgcagatggccgggagaataccacactcctgcacagccctgggaccttgcatgccgcagccaagaccttctctccccgggtccgaagagccacaacctcaaggacagagaggatatggcctggaggagtcatcccctacgtcattggagggaacttcactggtcagtagccacagacaaggtcygctttgggtcagggtgctttgtctccctgggttgagagagtccttctaggaaggacccgggtgggatggagcagatgttagggaccacagcaggcctacagatgatgcccccctcttgccggcaagtcctggcccaccagtcctggggaaattgcagtctctgttggagctatgtcctcaaagttggttaccttgctccccgatgcttcatgtggggagtgacctggaaggaccttgacggataagtgggktttgcatgatgactgtttraggacaagccctccgcatagaagaaagtccctgagcaactgcacatggttggcttccctgtcctctgcctggatgagcgtcctggactcagaggtcccctgccaccacctacaagcagtgttccactcagtgaccaaagggaccagtggacatggctcgactccctgggtccaaatctcagctccagcacttgccagcaaaatgccctggggaaattagcctctctgtgcctcagttccctcttctgtaaatggggatgataatatcttctaccccatctggttgttttgagaatcaaatgggttactatagataaagcgcttagagtggtgcctggcacacagtaattagtatgtatctgatattaatattatctttaaaatatgtgaatcatccccagcttcccattgccactagaatgaaattcctgaccatgggcctgtaatgccctccctcaagtaccccactgtccctctcctgcctggcctttgaccctctctacccttctcccatccttcatccctaagctctggcctcaccagccatgtgcccatcccaagacgtgcccccctcataggcccctgagcaytcacacttgaacttgccttctgtctcccttggaggccctttccccaggtctttgcatggctgtcttcttcttatcatttgagtcttatgtcaagggacacatcacaggaaggccttctgccctccccccaccagcgcctccctgtccccagaccctgctttataacattggcagcacttaccgtgacctgaactctttacttctatttctgtttcatttatttttgtctctgtctaagctctgtgggagcagcagtcttttttctgtctcatttctgcttccgtatctccaacacctagagcagggcgcggcacatcctaggcaggtagcaaatatgcccactgcgtacctgcggccaatgtcaatggaaagcctgagtgacaagccataccgagagactttcctgggctctcagtgcaacttataagtccttcccctccctgtggctctgtgacctctactctgagaggtggctgatgaaggcagattccctgaggatttgccaaagccactgagaatcgctgatgagtaagttagggaacggtgaagacctcagcagcagggcagcggaattcctgcagttccctttcgctcccgcagcattaacccacggcttcctagtgccaggtgcttaattagggattggtggtaaaaaagatgactaagatttcatcctgccttcaaggaggtctgttctmacagcagagaaaggtgagtgcctaaagaaaaaaaatagaaattataaaccactacagacttttgttccttggtatcctaactgtgttctttcagatctggtgtgcttttctgaccaaagatttatattactttcatcaaagttaactaattttatatataggaattttgttgacacaagtatttcatgttattagataattagtagggttgctatttttggtgagcgattgagctataaacaatttgaacaaaaaatgtcaagatgtcagaaaaaaaatggacagttaagttattctattttttgttgttgttgtttgtttcttctttctttcttttatttttttgagacagggtcttactctgttgcccaggctgcagtgcagtggcatgatcacgtctcactgcagcctcaaccttccaggctcaagcgatcctcccacttcagcctcctgagtagctgagactacaggcgtgtgccaccaagcccagctaattttttcttcttaagtgtttgtagagacagggtttcaccatgttgcccaggctggtctcaaactcctgagcttaagggatccacctgccttggccttccaaagtgctgggattacagacatgaatcaccatgcccagctgttattctttattctatatgaatgtttttggggacaacaatatgataccatccccacatcctgcagacaatgatgggagcctcccccagtgctgttgtgctagtccatttgtgttgctctaaaggaatacctgaggctgggtagtttctaaggaaaagaagtttgttttggctcacggctctgtaggctgtctgagaagcatggtggcagcatatctgctcctggtgaggcctcaggaagcttgcaatcatggcggaaggcaacaggaagccagaacatcacatggtgggagggagcaagagagaggtggggtaggtaccacacacttttaaacaaccaaatctctcatgaactcagagcgagagctcattcaccaaggggatggcactaagcccttcttgagggacccatccccatgacccaaacacctcccaccaggcccacctccaacactgggattatgtttcaaaacgagatctgaaggggacaaacatccaagtgatgtcagctgttttgttttgcttgtaatttttgtttttgttttgcaatgagggccctgtagaactcagacctccaactcccaccatccttcatacttcccagacaactattttttcctagatccttctcattgcttctaggaaaatttaaacagtcttccttctagattttgaaaagaactgactgactatacgtaactgtcagcctggagttttattattcagcaaatttccactcaaggaaataccaagacaggttcagagaaagtatgaagttcacctattttcaaaggcctggaagaaaaattaggctcaaggattccccacaagacactgaaaccccgtgcaaaagtacacagatgtacatgcaaatagaaattttaaagtgcatgggagcacccccctacaggtctaaaagaaaatgagggggcgaagtgcagtgctggtgagctggagttgactcccccctacttcaaaagcctgcagtttccaaatcgaaaaacctggataaggttttgtaaaagtttggaaaatactttcaatacaaaggaaaatttgggaagcccaggatattttgaaaatctatttttaccctcccttccaatccacaaactcctactctctaggttttggcagctcagaaaagttacgttgtgtttttagcaagggaaatcctgattcctgaaaattcctggagtatttctattctgaacaagcttttttttttttttgaaaatatttaattgacaaataaaaattgtatatattcaaggtatacaacgtgaagatttgatatattatgtctcgatcaccataatcaaattaattagcacatccatcaccacccatgcttacattgggggctggtgaggacacaaaatctgttcttttatcaaatttcaagtaaacaatacagtattattaacaatctttttttttaattgttggaacatcctttgtcttaactcagcatgctttaaagcatctaaggaggctgggtgccgtggctcatgcatgtaatcccagcactttgggaggctgaggctggcggatcacctgaggtcaggagtcaagactagcctgaccaacatggagaaaccccatctctactaaaaatacaaaattagccgggygtggtggcacatgcctataatttcagctactggggaggctgaggcaggagaatcgcttgaacccaggaggcagaagttgcagtgagccgagatcgcactattgcactccagcctgggcaacaaaggcaaaactccgtcttgaaagaaaaaaaaaagcatctaaagaaaatatggacccatcattgaagtcgagtgcttgccctgttgtttcagggagccagagggccatttttaagcaggccatgagacactgggagaagcacacctgtgtgaccttcatagaaaggacggatgaggaaagctttattgtattcagttacagaacctgtgggtaagtaaacgaaagcgaggccacctctgcagaatcagtcggatggctcatgagtgttgaattttctctgtaaacctaagtatttccaatgagctgttatttagaggagtccagggtttgctagaaactttctgcccttggtgaaattacaatccagtggcaaagctgatgggccaagaggaagattccaggagactccatgaagaccaggggtactggcactagaagagcaacagaaggaactggtggtgtgtcatgtgaagacttaaggcagtggttcttaacctcttggggtttgtgtccccatttagaatctgatgaagcggtgggctttccttcttcaagaatagatgaatatgtatgtaaaattttrcatttaatttgagggattctacaggtttacaaacttccttcagaaaacataatatgtaataaaatgactggcttatgactaaagttatctgttatgtcaataaatatgtatgatatactttcctactgaaaagcttctcatgttggatcaaaaacccaaacccggccaggagcggtgagtcacgcctgtaatcccagcagtttgggaggctgaggtgggcagatcaccttaggtcgggagttccagaccagcctgaccaacaatggtgaaaccccatctctactaaaaatacaaaattagccaggtgtggtggcacatgcctgtaatcccagctacctgggaggctgagacaggagaatcgcttggagctgggaggcagagattgcagtgagccgagatcccgccattgcactccagcctgggcaacaagagcaaaactgcatctcagaaagaaaacaaaacaaaacaacaacaacaaaaaaaaccaaacccaactacatggtctatacataagatgattactgaataaaacaacctagagaggtttaaaagtaaaaggaaagaagccatacaggtaaatgctaacaaaaagaaagctgggatcacaattttagtcattgactaggttttcattgttttgttgtttttgtttttaaagtcagaaaatgttaaaagctgagwcactttataatgagaaagggtataagggacagtgagaatataactgtcataagtcttcatgcaccaaatagcatagcatcaagagtcataaaacaagccccagggaattcaaggggaaattgacagaaatgctcagtagcacgagacttaattcatttctgtcagcccaagtaagtcagtgtcacgttgaccaaaaaataagtagagattcacagaggatttgaaaaatacagttaatagagttgattctataggtctatcagattctataacctcataacacatttttttaaatggcccatctattaagcattaagaacatcttaacaaattcttaaaggcagaaatagcattaagatattttctgattgcaaagcagtgaaactggacataacataataacaaaaatagaataaacattagctggtaagttaaaagtccccccatgcttccatttttatggctcttaggtcataaaaacagcaagattaaaattgcagaatgtctaggtaatgaaagccctatggttcaaaataaaagagatatagctaaagctatgtctggacaaaagcccacagacttaagtatccacatcacccgttgacaatagtgacaatgaaatattcaattcaaagaagctagtaaaaataaatacttacaacccaccaccatcaccacaacaaaataaacctaaggagagcacaaggaaacagacaaggtgaaacattacagrgctaacaaattcaagagtaaattatttgaataaacaaacaaacagaaaacaacagataaaccacttgttagtttaattgagacaaaatatgattacatagaaatacataagattagaaatgaaaatgggagaaatagccacagattcagcagaatcacaaaggagtagtttgcaaaactctagggcaagaagtgtgaaaatgtggataatgtgaaagtcttcaaggtaaaaataaagtactggtacagaccaagaactttgaatgaaattgaagaacggagggaaaaagccatctcccacaaagcaccagacccagagtttcacaggtgaattctttcaaaacttcaaaaacagattattctggtatacttaaactttttagagcatagagaaagatgaacgctttcaaattacttttgaggaactgttatggcattgctaccttgaaatgaaaaggatggcaccaaataaatagagaaagaaaggaaaacatgataaaaaagataagaaagaaaaaattatagactcatctcacatgtgaatagccatgcaaaatcctaaataaaatgttagcacatagaattcggcagcagaagaaaagaagaggagrctgccaaatacatttatctagggaatacaagattagttcaacattaggaaatctattctcaagattgattggtcaaagaagagaagctatattcatatctcaatagatgctaaaaggcacctgtacaatacaacatgcagtttttgttttaaaaaagtaaccaaggtagcacagaaatagatgtcaaggatagattcttgcattatatatatgtaagtataaatatacatttatataaataacttccaaccaaaagccaatatcatgtttatcgatgatacttctagaagcatttaattttagttaaaatcatgaacaagtttaagatgtttagggttaccacaattatttagcattgttttggaattgctaattaatataaattagacaagagaaagaaagaaaaactgtgaatattggcaggaacaaggcaatgtttgcactgatgggaggtaawgtgactgtgtgcctagaaaccccagaatatcaattgaaaagctgttagaaacacaaggagactctattaagtgaccacaaaattaattaattaacaagaataggtgactgcttttctttatacatgaaatagtttgatacacttttatgatgggaaaaaatcacaactttaatagaaacataatagatactatatctaagactaaacataaatgtgccagacctataggaagaaaatgctaaaactccaaggaacctaaaaaaaaaaagtaaaaatagaaagcatattgcttcctgatgtagggatactcaacatagtaaagatgtcagaactccctaaaataagctgtacattcatgcctttctgatttaaacaccaacatttatagatatatacgtacatgtgtatgtatgcatacatatttttagaacttgaacaaatgatactagagtttatctggaggaacaaccatgtagaaataatgagagagagagagagagagagagagagagagagaaaacagtaatgacagaggtagctatctaatggtctaaccaaacaygcagaatattaaaatgcaaaaggaagataataacaaaacagtttggaacttaagggaaaaatagatatatacaaaaaagggtccaaaatgaatatacctatacacaaatttgggtaacattttaaatgagtgggagaaagatcaattagtcaattgggatatttgaatattgggataatttagataactctctgtgaaaaaaaaaaaagctggactcctacctcacttcttataccrataactattctagctagatcaaagatgtaagtattaaagaaaaaaatggaagaaagaaagaaaaaatcgaagagtataggaaggaaacaagagtagattttatttataatcttgaaatatggatgacctttctaagcagcacataagaaaatgaatacattttgtaatactaacattaaaaacttttataatgcaaaaaaaacaaaacaatacataaaaacaaagtcaaatgagaactaacaaagtgagcaaaatacttgcaacactcttgactagtttccctaatttacaaagggttcttaaatatcaatcataaaaaaatggacaacccaaaagaaaacagggaaaagaggtgatcacataattcacagaaaaaaaaatgtcgcttaaaatatgtgaaaaactatccagcctcaatgcagtgaaatcccattttttacctatccaattggcaaaatagtttgataaaaccagtgttggccaggatgagggaaataggacttaaacatttgtttaagcttctgtgagtaaacagtaggtgtatatatttgttgggtacccgagatgttttgatacaggcatgcaacgtgaaataatcacatcatggagaatggggtatccctcccctcaagcatttatcctttgtcttacaaacaatccagttacactcttttagttgtttttaaatgtacaattracttattattgactatagtcactctgtttttttggtcaaatagtatatcttattcatgctttcatttttttttctttacccattaaccatctccaccttccccaccagtcccccactacccttccagcctccagtaaccatccttctagtctctatctgcatgagttcaattgttttaatttttagctaccacaaataagtgagaacatatgatgtttgtctttctgtgcctggygtatttcacttaacataatgatctccagttccattcctgttgttgcaaatgacaggatctcattcttttttaggctgaatagtacttcattgtgtacttgtacatattttctgtgtgtacacattttctttatccattcaactgctgatggacacttaggttgcttccaaatcttagctatcatgaacagtgctgcaacaaacatgagagtgtggatatctcttcaatagactgacttcctttctttcaggtaaagagaaaggggcttttaatatcttactagtgagtatataaacagacaacattttgggagtgcaatttgacagtatctatcaaaatttcaaatgcacatatccttttacccatgaatcccattggtagaaatttacactaccatttctttgtttcatttgctgttgtttttatttgttttgcttgtcatcctctcccccgaggccttgttaaaatagcaaaaactggagttacagccgagatgtacattaatagaagactgatgaaataaattttagtattacaaaaatgtatataagtattatttgaaaaaaatgattgtgcccagaagggagtcatctctaaggctcctctgataatgacaccaagttgcatgcattatagacactcatctgcctccttcccgtgactcttctccttttcattaaaaatggcccagcagggactccagcaccttgcaggtggaggggtagagtatggtatggactttatgtcagagagagaccgtatcttttgttggcttttcaagaagattcataaccacaaaaagctcaagaaccatttttggagggaatttctgcattgggtcattgggtgggaagttggacaatgagagcactttcacttctgaaattctgtttcttttcttttttttttttttttttgagacggtgtttcactcttgttatctaggctggagtgcagtggcgtgatcttggctcactgcaacctctgcctccggggttcaagcagttctcctgcctcaacctcccaagtagctgggattayaggcacacaccatcacatctggctaatttttrtattttcagtagagacagkgtttcaccatgttggccaggcaggtctcaaactcctgacctcaggtgatccgcccacctcggcctcccaaagttctgggattacaggcgtaagccactgcacccggcctgaaattctgttcttttacatgcacacacgcacacacatacagagtgggaggggggacttgcctcttgctctgaatgtcttctgacctgctgacctgggtattcctgcaattgtccagctgttgctcctatgttgggcgccgaggaggaggcccacaggccatatccattgggaagaactgtgacaagtttggcattgtggctcacgagctgggccatgtggttgggttttggcatgaacacacccggccagacagagaccaacatgtcaccatcatcagggaaaacatccagccaggtaaggaggcctgtgtggagtctggaaggcaccggtcgagaaggtggcaacctcagggacaggagggagggaaggaggggacttgctgggagctgagcaatgctaactgctgaatatggagcaatgactctgttgtacaggcccgtctcaccagtctgaccactgtccatctgtggcttcctgggaggtcatctgccatagcttgtaggttggagcagaagcaaaatgattttccatgttttaaaggacattgaaatctaactccatttcctgaaaggaacacagtcgaccagaacactgttacagcatcagagctgataagccaaaaaaaaaaaaaaaagagttctcctggctgcttttatgagttatttttgctgacttaggcaacatattttctgaaactgaaatacaattaggacatgaacacatgtaaaaacagtgtttctgcctagaaacattctgccccaaggcagataaagtgtctagattaaaaaaaaatactctcttatgtcaaataattttatatggaagttaatattgagcatgaaaagtagctagttgaagaataygattgccttacaaatgctttagagaatctgaattgtgagctatttaggattgaacttaactctctgattcattttcttttgtttcttcaaattgcaagatcagrtttttgtttgtttgttttgttttttttgtttgttttttgagacagagtctcactcttgctgcccaggctggagtgcagtggcgtgatcttggctcactgcaacctccgcctcctgggttcaagggattctcctgcctcagcctcctaagtagctgggattacaggcacccaccaccacgcccagctaatttttgtactttttttttttttttgagacagagtcttgctctgtcacccaggctggagtgcagtggtgcgatcttggctcactgyaagctccgtctccygggttcacrccattctcctgcctcagcctcccaagtagcagggactacaggcacccgccaccatgcccggctaatttttgtatttttagtagagacggtgtttcgccatgttggccaggctggtctcgaactcctgacctcaggcgatccacccgccttggcctcccaaagtgctggaattacaggtgtgagccatggcacctggcccagagttttttatttttattttttattttttgcgggggcaagcaagttgataactaatctgtctgcaaacttactttaagaggtttgagtggcatttggggataggtcttgggtggtggggttgggagaacacagggcttgctggaggtttcaaatttctaattattaaaaacaacaagarccactacaagccctgttatttgactgattgggccaagagagccctgggaagttgttatgggccctccttctccttcctctgcctcctttyaggtgcctgacttggttttcaaagggcttaacacagtgttgtgtcacaggtcaggagtataatttcttaaaaatggaagctggggaagtgagctctctgggagagacatacgactttgacagcatcatgcactacgcccggaacaccttctcaaggtcggaatctatgcttatgcctcgtctgtgttttactgtgcctgcggcaggcttgggttggattcctgraggtctgcggagagtgggtctctgcatgctyctagcacggctggcctgtctgtccttgaaatacagtggcctctgcgctgcagtgaaatataatctaatcaggttcccgttaataagattgaatcccattgtgaagctagcattccatcatgccctaatgtcacaagcagcaaactggaaaagggaaattatcgagaggttggctgggataataacttagaggctctgtgtcaaatttccagtgggtggggggagtcttttgtagaagcatggtggtgctcaccaattctcctagcagaggtttggtttattggaaactaggckgtgtcaaggctgggagggctgtaaatcatcgattcattttagaggtgaagacaatgaggctccagccagctctcagatggacaggtagctgaggactggagtgagagcaaggatccaggttcccacctgcaggtcacagatgatggaagccgctgtattcaagtagggctgggccgtttatttatggctggcatgggcagggtctgttctgatgagcygttctgatgtgctgcgcctagcagacattaaagattttcaktattttccctgcttctagaccctgtaagtgctttgtgtgcagaagtttttccctacttgtcccagttttgtagttctttctagygttgagttaaaggagtcacagagaacaaatattttctctcttggtactttctcttcagtctcctgttaaaaccagctgtttgcttgtttatttatttagtcttcccccaaaaggatctgtggtgacttccaatatacacatgagataaaaatgataaataataggtgagaaaactgggggaaaggagaaggaaaaatatggctagaaagctaagttgaggcccagaataagtttagtgctcagagttatatgctgtgaggtcatgtacacttggttagagttggcagcaaatcctgccctgtgcttcctagcagtcacagcaaagagggaaataatccattccatgagtctccatgtccataaagatgaaaggaattcatttgctcagaaaacatatggctcttgggagtgaaagggacactgtttgccaggggctccttggttcttgggtaaggctgccaaaagcatcctgttgatgagtttgttgataggactatgggagaaatcctctaaatctcagcatcccaagttctcagggggtactgctcctctggccacacagctgcttaagtcatgatctctatcctgcacctagacatgagctatcatgggtggagttgtgttaaagctggcatcttcgacagcacttgggagtagcgtgaaattgagccttcctggcctctttgaccttctcctggctcttttccaaagatagtaaaagaaacatggtgtgatgaagagaccactgaactgagaggcagaagccgggttctagtcatagttctcctgtgaccccttgcctttgagggaggcagacagtaattaggggcagctgtgtgatggttaaatctccacctccacaggccttggtttccttgtgagagggttggactagatgttctctgagccccttccagctctaacctttcaagttgcaatttctcaatccgatgcagatgggtgaggggttgacagattatgatctcattcactgccatacaggaaatctgaagctggaagggcctcctcttccagattaggaaactgagacattgagggatccaccctgaggctgtgtgcagggaatctcaggacgccagtgcagtgtgcaaatatccaagggggaggcaatgcttgggtcttggggtgggctgattcacctgtttgggaaatggtgcagggaatagccaaaggcccaccccatcatccaggagttacaggctgctactagagaccaagtatcaattttgtcagggaatctatgtcaagttggcccaagggagaagctttttccttgggtcttgtttctgtagctgccataactcttcatattgctttttaatttatctattaataattattaatttatatattcatattaatttatatattcaatttatatattcatataatttatatattcaaatgaaatcaatattcatttaatttagctattaataattattattttataaattcatatattaatttatatatttatatatacatatatattcatatatatattcatatacattcatatgtatctgttgtattcccttctctggcagtagactgagatccttgaggacagagactatctcattctcttctagtccccagcacccaacatagtgcctggcacctagtaggtattcaatagacatttgctaaatgaataaattaatgaatgagttcaaaggggccaggaggacctgcaatgttggggaataggtgagggtagaaatttccattatgctcattacagttctttccatgtgctcaccaatgcgatggctactttagtaaggtgaatctgtaagtctgtaccatgtagggcatttgtgtgctgtagggactgcactgccttctcaccgcctgctccgtgccaggcactgcacaagctctggagccagaggccaggacaggatgcaggcagaggatcttccagcaccagcgtttcttcttgtctttctttttgaaatatatatatgtatttttttttctaggattgctagctcataataccatgccttttgtccctcaggggataaccatttctaatgctattgtcaatgtgaaccatcagcccagaccagtggaaatccatgggccaaacccatgaaataaaaattcctcatcaaaattccccagaatctctaggagggagatcagcaggggcagcacacaggaggatgggcagctaggagcagagcagctcgccgagggcaggcagcccctcctgctagtgttacattagctactgctgcagagcaattgacccccaagcttagtgacttaaaacagcagcttattatttttgatgatactgtgggttagttagtcaggcttgttcttctctggtctttcctgggatcactcacagcaacagtcatctgacagattgattgggctggggagtccagaatgaccagtcacacgcctggcacttggtgctgcctgttcatgcccctctgttctctctgggagccccttggttctccttcatgtggcgtctcatcctccagtaggctagaccaggctttacactgcatggggactcacagttccaagagagcaagcggggaagctgcaagcctcttaaggccccagctctggaacttgcatgacatcacttctgccacattctgttggtcaaagcaagccacaaggccagccccaaactcaagcaagtggagaaatagactccacctcttactgggaggtatggaagcttcacattgcagtaggatttggctattaggaggagtgactttttattttaacaatctgccactgctgccttgtcacctctgccccagagttcagaatggtttcagcaaatctgttttgttgcaggtggatgactgcattgtcctttctgccaactttttacctggattttcggaaaacaattttgttcactgggtttttactgggagcttttctatgagcattttgtcaatagtttccccgctcccaactccatgtcattacttctggtcacaaagaccctaaagctggcctgtacctcatgttggattctgtaaaagggcagaatagagcccatggaacatatgctgatctggggaggtgggcaaatgctataccctgctgatgggaaactcaatccttgtgtctctttacgattgagctgtctccttccaacttcattctctctagtttattgcagttcttctcccctcccccttggttggacccaggctgtggggagcggtctctttggaggttttgctgggcaaagatccaggagatgaggagacagttctcttgtacaggggcctctttgtttcagaactcagaactgacagttttattccctgaggcatctgctgaactctgtcttagtttagcagaatgtcaatgctaagagttgtcctacatgaaagagggaaggaacgtcaccgctgtggtttacacaggggacggctcttgtagtaaacagctggaagctcttgctggcagcttaggatacgcaagggaggacgtccagcaccaaagagcggtctgagtgtgagccaatgttgttcctgatgttttggtttttgaagtctgcaatgttcttagctctataatttaatgtatcataaggcctactgttccttgggcagcaggaaacactggctggaaggaggargattcccagaggtgagctcctggcctgcctctccatgactagctctgtgccctgggaaagtcacttaagctctgcaggctcagtcttctcccctgtagagtgagagctcttgtgataatggcacctgactcctagggtgttatgaagatgaaatgagttggtgcaaggaaagtgcccagtgcagggcctggcacatcggaaagtcctatgaatgatgagtaagtgcaagaacatggcctctatgccccaggcccgctggcaaagtcatctacgtgatgtggccaggtagcgtggggtgcttatagactgtgtgatccttatgcttgtgctgcagaattcctttctgcaagggaaccaagaaaataattacaaaaggacacacctttcgttagggcagaagtgcctgtttttggagtagctaatgattgaatttaggattttctgcagagtcatcacttgtggtttaaaatgtggtaaagtcagtgagggaggccaaggattccactaaagtttctctgcaggagtccagactcaaaaatgaggctatgggagctagagaaagacaggtcaagggttacatgttgggtacagagatgctgaacaggaaatcagcagatgatctatactcccacaggctaaggttggaaagtgagcttgaaatctgatttagaaaaaaaaagtctgcacaaaaacaaaaagataacaaagtgatgtaaccaggaagaaccaggggtaataggtattttctaatgtagtgcagaatttagggaaatagaaacagtgcttgagagagagagagagagagagagagagagagagagacagagagagacagagagagagagcatgcacagctaatagctaggtgacatatgtacattttcacttccattttggatgtaaataactattttgcaaagtttttaaaagacagtgctttatcctgattgcatatttaattcaagaagcattttttgaggtctgctgtgctgtagtttctaaggacagagataaaacacccagtctccctgcttgaggaacttacttttagcaaagaagacaaataccatcactccttaagaaaaacaatacagtatgataagaagagactacacaaatgattaagacccagagcagggaatgataaactccagatgggaggagtagaaaaggcttggggaagacttttaatagagaaagacatctgatggggttttggagaatgaataggagtttgcaaacagacaaaaaaacagagggcatgggcagcctagggagcggatagcatgtgcaagggcatatttgaggcctacaaggagctcagtgttgcttaaaataatgacatatgctttattcttgttaagtattcttttggttatgggattaaagagtcaggctggagaggaaggcagaagtcagtgagcaaacagcctagagatccaagtggtgactggaagttggtgaagcgttctaagcaaaaaaggcacgtgcctccccttgcattctgggatgattccattgcagcattgtggccaaggggagcagtagagtagaagtggctgagtctacagggagggaggccagttaagaagctactggaaagagttcaagaatggggtgttgatcacttgagctatggcaatggtctgggaacaaggaggagggtatgggttcaaggggtgcaaaaaaggtagagtggacaggacctggctcctggtttggtaggagagtatgagggagagggaggagctgagaatgccctcagattcaggctcaggagacaaggatcatggagtgagcaggagaaggatggaattgtgataaatttggttttgagcacgttggatataagaggcccataggacagcccaggggaggtgttacgaggcatctggggctcagcagaggatcctgggctggaaacagaggattagctgtgaggctgcagatgatggttaaaagccgtaggagcagatggaatatggagagagaggacagagggagagggcagaaacccaaggggcatcactgaaggggaagcagaagtggttcttgtctcactgctcagagagagccatggcctggacccagggagaagacagtgaggagggaggagggcatcggaggtcagtgctggagagagggcagacggagattggaagctgtctactggcagatgagtggtgaccgttgctgatggggtcagatcacaggtggattgagaagtgaatcagaggtgagcagttggggaatggagacaatactttatagaaacttggttaagaagggaaggaaaaaaacaaggtggtgactggaggagatgctgattcaaggagaggcctaacatccaggagaggccccagatagagggtctggaagcagaagaggaggctcagagctggcagcagacaaggcagcaggcgggatgtaaaccatgcccacaacagggccagcgctcagctggcaacctgatttccacttgtctagtttagaaatgaagctgtcattttagatttcagtcaaataggagtagaataagatgttagagatagaaggggctgccatgaccatctcaacaaatttcttattgtttagtggggtaamctgagacttagagaggctcagagaggggaagggtcttgtccaagcacacacaggcctagtgtagaaatctctagtccagggcttttttcactacttcttgttctctgcatttatctcattttccatctgatttccctcttaccagcagggcctccaaactgggaccaccaattcatcaacctgcacttgctgaccagcccctgagagtctcacattggaccagttcccaagctctccctggggtggctccaggacttaactacacacastacttcccaatgcacagctgcagggggcgccattcacaccgtggtctctccggggtctggacctgtcagggcttcatgaaaatgctcaggacacatccctaaggaagcccctgggctaccgcactagggcatatttttacacttggcagagtcatcttcccactggaaagcgagtaggcagctgatgagatggaatgtgaaaatgctagcatgagcgaaggaaacctcttcagtcatgccagcctgggagaggctggccagggggcaggaatgttgatggggttatgggcaagggaatgaagcctagaaatcccagcacagacagcctgatggccttgacttttctttttctgtcttttttccttcctgtagaggagttttcttagacaccatccttccccgtcaagatgacaatggcrtcaggccaaccattggccagcgcgtgcggctcagtcagggagacatagctcaagcccggaagctgtacaaatgcccaggtaactatgagccgtggggactgccagcacctccctagcatctccaaagcacagtccctatgctgggaaaacaacttgggggacctaaagggactattccttggcagctttaatttctggtgtccttctggtaggaggtgctaggcagtatagaaaggtgaaatggtgacatggtggcaggcagtgaagagaataataggtcttagagtccattggcaatttcatgagaggcttcagacttctctggcaaagcctttgtgtccagaaggggaagaaggcataacagaacaacagtaaataggggtgtaatgcagtgtgtgccccataacagtaagagcacctctcctttctctgggactaggggatgtgggtttgggaaaacaagaaccaagctggattttgcaggaagacaaagagtgagggagaatgcttttgggaggatggaagtcagtttcccaaatgctacaaggtggagggagtctcagtgctattaatgagcttgttgctttggtcttggggctttcctggccatcctaggtgctggtcagtggccaggagtctgccattgaagatgggacaatactgggattggagcaaatgcctgttccctggcccgtttggaagtgttccttccccttggatttgtcccgtttgtcttccatccccttggcttcagcatcatcatcatacacacaccgtctgagctcttctagacccctttcagctcttgagcctcaatgtaaagcactggttagggcagctgagtttttagtactgatggatcagaatccatttcagtggttttaggaggatagaaggaagttccattaccaatagcctttcccagacttccaaaccagacacagagtttgatcatgggatgaagtatttgaagtgaggaccgtcttagaaaatctgggctgtcacattacctyactaagcaggacccgagggatgcaaagggctgcgtggggcttgcttcctcaagaaactttagaaaatatgtccgtccagctattagtcatctgggggcgtgttagggctgaaatacaggacacacatatcatataaccttgctgaattgaacgggaaaccttatagcataccctgggaaatgccatcatatttattcagttataacatttatgctgctcacttcccaaaaggattcaaagcaaaatactgtggagccacatagtaatgtatctgttcttgcagaatgttgatgattattctaaaataatttccatggaacccttgggggtgttgactgccaggcataatcctcatgatgcctggcagttgttcagtaatgtgatattgaagccccgacatccaggatttcctgaggccgataatgggcagttctccacatatcccttcctgcagctccaaaaaatgtggagcttccagtagttccgagcagtaactgaaagctcagtcagtcgccatgcagaggttgaactgcatgtaaggaaaagatgcctaaggatgctggatctccacatgttagggttggccacataagaggaggggctctcagcaaaccagtgtctttgtctttggagtctgaatccccaggcattagagaaatacaaaacctgtagtttccaaggattcatayaggtacccttcatttgtgaggacaaattaggggaaatacttttcacatacataaagactaggttctagactcataaccaaccctcaaacattcaagggcagaatagcctgctatagaagattccagctccctgtgcctctgcatttttttgttttcttgactgctttatagttctttcagaagtgagtagcagaaaaggaagaggaaagatttaaactaacagctgaaataagtttcaaagcatttttttctttttgtcttacctacttccactttttttttttttttttgagacagagtctcactctgtcacccagactggagactggagtgcagtggtgcaatcttggctcactgcactctccacctcccagcctcccaggctcaagcgattcttctgcctcagcctcccaagtagctgggattacaggtgcacgccactaccacccagctaatttttgtatttttagtagagatggggtttccccatgttggccaggctggtctcgaactcctgacctcaaatgacccacccgccttggcctcccaaagtgctgagattacaggcgtgagccaccacgcctggcctctacttgcattttcatgttctctctgccaccgatattattattagcaataataatggcattatatatgaagcactcactacgtgccaagcactgagctgatccatttcatgtaatgcacacgatttcactaaccctctcaggtaggtcctgcccatcttacagataagaaaactaaggtccagcaagtctaggaaacttgcccaagccacacagctggccagagagctaagattcatgacctctaggccatgctcagtcctgagagcctcagaagaaattcctgggcgttcctttttgactcctaggtcctacttgtgcttttgttagccagaaaacatcaatctgcttgctacacttctcaccaacctgttccgagggctttggctggcaaaggggtatgtttgctccgctgccccgtgcgggagctgcttgggcggggagaggtgcatatgccacatcacagttgtgattttgcttgtgcagcgtgtggggagaccctgcaggacacaacgggaaacttttctgcacctsgtttcccaaatgggtacccatcttactcccactgcgtctggaggatctcggtcaccccaggggaaaaggtaggtgggaagcccccttggcaaatgggacggcactccttgagttgggtgaggtgggaggagttcttattgttaatagtaaaaataacagctgttcggttataagcacccactgtatgccaggcatggtgctgtttgctgtacgttcattatttctggacttctcaaccagtctcacccacacaaatgaaggctggcatgtactaaatatctgctgagttataaatcaagctcacagttccttccaaccttaacaaatacactattataatatcctagaatttagaattctgtgacacctcggattgctgctctggaagatggtgacacggggagccagcccacagctggctattcttccccccagcctccgtctcagcatttggggcttaaagaacatccctgttgacaccccagcccacttccctaagcatcttacactcctcttttgcaaacagccactccttggctgcccctccagcgggatggactggccaggcatgcagtctatactcaagaagatggatccagggcagaggcccttgcatgtcctggcaatgggctcagagctgtgtggacagggaattcctggattcctggagtgtggcgtaggacctgggcaagctctgggtggacacatccctttagtcttgaagattccgtgaccccctagagctgagcccagggcaaggatctctttcactctggtccaagggtggtatgttttcaaccctactgcagggcacgtactgttatatccattatctggataaggaatttgaggcttgaacattaaggaaagtgccaaaagtcaaggtaagatatagaactagaaactgagaactgaggttttgctctccaaagcttatctttttgctacatgtctctacaaatctgagtgttcttcaagttgcctcagactagatgcaactatcttagagaaaccctgttccctaggtctaggttaggggatacccccagtgtccccagagctctctataattatacctgttatagcatgtctcacggtatagtcactactggtttatttgacccccttctaaatcttaagctcattaaggttggagatcattcagccccagggccccagcactccacacagtctgtggcacagaatggtcacctgacaagtatttgttgaatggatatgtggatggatgaggggctgagtgaaaaacctgcagctaggggtggcagtggggtgtgatggaatttttcaggcacctgtagccaaccttcaggtatttctaatttataactttttaaaatgtccatctaaatgtcaagttaagcatagtgtgctaactagagacaaatgactaggaaccattgtgagcattttctgtagactggatactatccttagcatatcatgtggatcatctaatttagtcctctcatcaactttgtgaaataggtgctgttgccatacttatttacaggtaaggaattggacttgcccaaggcttctaagtttgttgcagagttgggatttgaacccaggcaattggactctgacagcctgaatgcttgactgtcatcttatattattacacaaaggggccaggctagtagatagacattttaacgtgcatttatatacatacatgaatgcacatgtgtgggcacacatgtatacatccttcctttggctctaagcatttaagacattaagtatggctgtcatcttgtatctgagatcccagacctgtctgccttgggtagatgtgaaatccatgtgcctgctggaggctaacaggagggaggcagaaagggggaagaggaagaggtctggtaatttctaaattattgaattgctctgcacagcagagggtgtgtgatatgtttgaactgtgtaaacttcatcaagccttaattattagtgctaactggggacagagagaatatacatcattgaaatttctgcaccaattatttccrtttctgcttcacccagctttccccagagctgcaagtaattagcaaacttgattgattcgagtatcacctcttgttcaccacctctttcccctatggtctttatggttcactaaygtacttaaaataattagcctgaataattatcccattcattcagatcatgaatgtgttaccaaggaagttgtwctaacatttcctttctgtaattttaaaaaagcaaaggctaaagaattattgtgcaaccagcttacaggtgttactaagctctaccacctgaatatgagcacggtgtgggataggacagaaatctaaggcacacccctgtcttaagactgtttattttgggtccccctccccccactcccagggaatctgatttaatggaaggaagggtgtttgcttggtatgagctttttcaaagcttcaaagttgattttaatgtgcaagtagggtcgaaaaacacagtctagtttgaaagaggagtgacagcgtgcgcacacacatgcacacacacgcacacacgtgtgcacacacacatgcatgcacatgctcacacatgcatgcacccacgcgtgcgcgcacacacactcaatgacagaaggtgagctgacctgttttttcctggcactgacttcgtttcctaggagatcgcagggctttgtggaagatgtgatttgtcctgagacgaaacattgggtgggatgggcccaagggaagggatgggcactcracactaatcaagatgggcagcttgcgaggtgtggttagtgttagttgtggtatgctaagtgtacactcaatgtggactacctggtattttaagttgctatttatcgagtgcctatggtgtgccaggcatagcaatatacactctatatatggtttctcgcacagtcccctcaatagcacagtgatgtgtgtattgtgttacagatgaggaaactagagggcaagtatttccccaagactccagagctagtagatggagctgagaagcaaatccagatctaggtagatctaaagacaccggctctagaatcattataagacagagggtggggcgttccaaagaggcaaagatcaatcgtgttcatcagggcaatcagacacaggctcgaggagggggacacttgagcaggcctgggaagggtttctctgacatgggactgtcagggaacactgggaaacaggttgcacaggacaggctctgggggtgtggaaagtaagcagaatttaattcatgagatgggggcacagagagccactgaggtttcctgaggggtttggtcaacatgatatatgggtggaagattgggaggggtctggtaaacatgagatatgagtggaatattgatctagaagccccagtgtgtagaaaaaatggggccacagcagggaggagtccaggaatcgtgtgggagcaatccaggagggggtgaggcaggaggagcgagatggggttagaggggagggatgcggatatcttaaaaagagctgcagcatggatgctgaacagatatgggggatcaacagtaaggatgaaggaaagataataccaaagcttggctccttgaccatcggggcaatggcatctcctacagtggaggaggctggaaaggaaatgctttgtttggaggtgctctcacctagtagggagcgggaasggcagaggagcaagagcagtggggagaagataggccagtgtggtgaaaaccagaaaggataagctctgggcagaggggtcatggggcacaaggccaaataacagtcctttagatttggtggggagggaatgggmacctttgaggaagccttccagcctaagggtttacttagagctagagggcccctggggctgtttgaatataaagaagtggctagtggaggggcagtgagtggagatgctggagagagaggaactgctgagagcaaagtcmtccggggttggaaaacgaatagagtcaggggtgcaggggctgggtcagsgctggagatgaggaagagtggagacgtgatggagcaggtgtgtggggcatgaggaaaggtgagcctgggccagacaagccactgcacctcaggacagtgggaggagccacaggcacctggtttagtggaacttgcgtgggggtgaaaggccaggggaaatctgaactctkctctgggccatctgccaggggagccccgagctggtgggctgcagggggaccagagccagttcacaggtacagcacctgtgtgctgaggcccagcccctgggaccacccagccctccccttccccctactaagtagtcacctatttggccatgggagcatccactacctgacctcagggatgtccagacagggctgccaagrtgctcctcatgacaatccctctcttttcagtgtttataccatagtgttctcattggcttggcccatctgcctttccccccttctctgggctccccaagggcaaaggaccctgtcttactgatctttctatctcaattggccagcacaggctgacactcagaaggtggtcaacaaacaatggtggagtgaatgaaagaatggactaactgtaggaaggtcattagacacaccacacctcaggagagtgaggtcatggctgaggggaggttgatcgcagagatgttcagatgcactcgggctaaccccagaccctttggaatgattgatgatgttataagatcttcttgtatctctgaacttcgctgaccccttacctccttccaaatcctccgtctccatgcgccctggccagtctttttaatgcatctcgctttctgtaaaccacctagtgacttcaaaagctcaagtgattccccagacagaaccgaaggacccatctccttctgtttactccccatcctgcttaaggtttattatttaatgtccttaggtttcctgtgagcatgcttttgagacaacactcctaccgtggtctgaaagttctgcatgctaaagggtaaygtgagaacaccagtatgcaagatatatcttcccaaactcctcaggctttgctgccaaaactcactttatggtaattctttacagatcgtattaaacttcacatccatggatttgtttaaaagccgactgtgctggtatgattacgtggaggtccgggatggttactggagaaaagccccccttttgggtaagttgactttagacaccgttaagagaggagtgatgggatgttccccgggatgctgttaatgtctggaaggtccaccttgacagcggtcacaggaaactctcaagggcctctgtcattgtaaaactctgagcactccatttggccacacatgttaaaagcttttaaaactgcgaataccctttgacccagcaattccactttttggaattcatcctagggaactaattaaggaagtgtgcaaagctctagctacagggatgttcactgaagcaggaaaaattgcaagcaatttaaatgttcaacagtagggtttggctgaataaattatgatccatctttttaatggaaaacttcccagccattaaaaatgaagttgtagttgactactgatatggaaaggtgttcatggtacactgttacacacaaaaaagtatgtgacaaaaatagaataagcagtaggattccattttgattaaaaaatacatttatgcattttatatatatatatataatgcaggcattgcaaatgtagatggcttcaaggataacatgtaaatgaaggagatgggatttgtgtaataaaataaggagtggtggggggagtgtggtgaactgaacaccaaatatcgtgtccaaaattattcaaaccaaaatgacttaaaacatgtgtacaggctgaattaactagaagacaccactttgtgatctgcaatataaatctcaagtaaaattataaatatacataaataacacactggttatttcagggtgatagagtattttttaaatgtattctgttgttcttggtttagctatattttccagtttttctatgatgagcgtgtattgttttggtgagatgaacagggcatgaactcacccatggaaagttagcttagagctttgagtgagacacagtgggcaggtggtgtaacaagaaagcttagttcaccccagagatgaaggggtggcctgcccctccacacctgtgggtatttctagtcaggtgggatgagagactgagaaaagaaataagacacagagacaaagtatagagaaacaacagtgggcccaggggaccggcactcagcacaccaaggacctgcatcggcaccggtctctgagttcactcagtttttattgattattattttcattatttcagcaaaaaggaatgtagtaggagagcagggtgataataaggagaaggtcagcaaaaaacatgtgagcaaaagaatctatgtcataattaagttcaagggaaggtactatgcctggatgtgcacgtaggccagatttatgtttctctccacccaaacatctcagtggagtaaagaataacaaggcagcattgctgcaaacatatcttgcctcccaccacagggcagtttttctcctatctcagaattgaacaaatgtacaatcgggttttataccgagacattcagttcccaggrgcaggcaggggacagtggtcttcctctatctcaactgcaagaggctttcctcttttactaatccacctcagcacagaccctttacgggtgtcgggctgggggacggtcaggtctttctcatcccacgaggccatatttcagactatcacatggggagacaataccccgctttcaagggcagaggtgcactgtgcccttggtttattgagactagagaatggcgatgacttttaccaagtatactgcttgtaaacattttgttaacaaggcatgtcctgcgcagccctagatcccttaaacctcgatttcatacaacacatgtttttgtgagctccaggttgggtcaaagtagctggggcaaagtgtctggggcaaagctacaaattaacaacatctcagcaaagcaattgtttaaagtacaggtcttttccaaaatggagtctcttatgtcttccctttctacatagacacagtaacagtctgatctctctttcttttccctacatctctcgtggatgacaggggaggttagccttgcctagaggaccagtggctgcagtgtctcgggagtagacactaggactcattcagcccaggaatggcagccgtggtggagctggtgagacaggcagaagtgaccaggagccagatgggagggtctcagctgagagtgtattgtcctcactcgtagaggggtctgtagggtgggctctggcttggacaagtctaagcgctcartgaggactttgtccttggcacatattcatgtgagcagaaagcccaacttgttatgctgcaactgacgagcctgagagtgagctggtatygggtggttggccaagatggagataggaaagaagggagagggctaaactgtggggtgtcactgctagaccgagccctgacttcatgccagattctggggagccaaggctgaggtaggtcagaagaggctggacagaggggttggctggactcaaggwagcctggcagacattaatctttcgtatgactgaggggtcccaggctgccrgcattagaagaagtcagtcaggtagtcagctgtccaggtagacaagcgaagaaagtgatccccaggccaagtacggacaggagcacgtctactgcaggaccagtggagtccgccccacagtggcagggcggaggatgcctgcctggatttctgtttcctgcctactatgagcaggcatggcgctctctagcagccagaaggagggtctggctttacaggtagcactgtttgcttgtggcaaaagacagagggctggattcccagtagcagaggttcccaaacctggctggacatcagaacctcctgggaagatttctatgaatacagattcctgggagaccgtgaattggaatccccacarattgggtcagagaatgatcctatttacctttatataaaagggcatgtgcccaaatctagtaccacaaatgtagaaaggaccacaaatatgcccatctaactgctgaaggtgattacctctgaggaaggaagcgcggaggtggtgggcagcttcaaattttgttttgtatacttctccattgtttgaatcttttgtaagaacacattcaggtatcattctataatgaaataataaaaagagctatgtgggaggagtttcgtgagaacatcggatcacagaccctgcaacctggcagagacattacagtcacttaatcccacacttttatgagaaaaccaagctccccaagtgtggactaactcaaagtccacacagttagtggctgagatcggaccagaattctgatgtcctggtgaaggggagaggtgactgctgaacccaaggggtgccagataaaatacattatttgttgtttatccraaattcaaatgtactgggcttccttgagttttgtttgctaaatctggcaactctctacccccacctcccaggaatgggatagatttaaaggcttaagaggaggaagctgtctgttactgaagttccccagagagggccaaggcacgttcctgagaatgggcacaggcagagagatttccaggagttcctttttcttgaatttgaaacaagattttctcattatagatcctggtatttgtggctacatttcattaatgaattgggacttttgccatttgttggtggtggtgatggtttttgttttgttttgttttttgttttgaggttttttttttttggctcatattttacccactttaackgtgtgtgtgcgtgtgtgtgtgtgtgtgtgtagagtgccagcgcctgtaaccgtcattcttcatttgcagttctcctttgccaactatttggcctgctctgatgtttccaaatgcagttgttagtgaacttttgtgtttggaacaagtgcattgtgtcggccgagctggtccctgggaggggtcagtgccatgaaatctgctgggaggaggcaggtcaatgcccctttggcaggagggagagcggattagggtggattgtgaaagtacgcatcttgctctgaaaactgtgcatcgcattttttcccagggcagtgtgtgaaaatccaggcataatggacgcataactttttatgaatgaaccctttatgactccccatggagcccacttgtagtgtcctcatctgcatttcctcttcttgatatccttattaaactcctcctctaaatccaggaaccggatttcagtgcaggaatctgacaccttttctctagtccagtttctctccagcctgcttagtctccttggaaggaggctatttttcgacacccaggttttcacctagtgattaaagggaaaagtcgattgagaacatttcatggctggttaaagatatcaaattggtttgtcagttttgggggtcacttatgatattgcacctaaagaggggaggaagttggctgcagagagagctcatccagtgatcttaaattctgtcctgtaaattggattccctcccttatttctgttagaggaattactctaacaatgcacttttgtatgcagaactgtctttgggyattctgtatcaccacaatgcacacaaaagccctttttccctctttccctgaaatagggagagggaagttcagaaaggccaggctggccgatcagtgtcgtgtggcccggctactcaggctccctagccaggggcagcctcccaaatgagcagaaatgatgcagtgagtcaaacagccaagactggcatttccacagaattgctttatggtttgaggctttgatcttcattcctacttgtctgtttccaaactgggaaatggggatgacatctacattactagagagtagatttgatgtctatctatccaaaattgtacaatgttcagaactgtgcctcagtcagtgaaggttttgtttttttttttttttttttttttgatggtagtagtggtgatgatgaagaaagtgatactgatgatgaaggtctcagactgctctggttcaaatcctgctcttacttacagctttgagagttaaattctctgactctcagttttctcgtctgtgaagtgggattaataatagtacctaattcagagagtattgggatgaaatgagataatccatgtaaagtgcttaggacagtgtctggcatagacatagtcaataaaaaaggggcttttattagaaccattatggtgaagatgagaacactgagacatcagttaagggacaaagtagaggattctagttaagagtgacaaagtgatttggggagagtgcttaggaataatttgtaatttgttctacgaagtctagttttgccaaggcagtaaaatatacctcaggctgcaattcctgcctcctgccgagtactcagcagagacaggctgtctaatggcccttgggtggtgcgtggttcatctcatctgcttaggtccttaggagacgaggcagtgaaagtctccctctcttttggaaacaagcctcagtggctgtgacagctgggttttaaaaggagaaacttggatttgaaacttgggctaggctaagaaggaattccttttgtgaaccggcactgtctaattgctccgtgtcctcattggtaagcagtacttccccaggcttgcctgtcattttccaaaaatcacttgacactaattggccgtgccagagaaaccattactgaaaatttaaaggcttctggtggattttttcttgccaaattcttggcaggagtttcatctcatctcacttaatattaatctccccaattccaaaaggctacaggtggtcagaattggaaggaagcagaggagattaacagcctttacccccatgtttccccaaaccatgtacaacacagctggcccttaggagatgcctacagtggcctttactcctcccctaacctcacctgctcatagcctcacgtggtttgtccactgcctaacatagcactggcagtaagagtacccgtgacatatctgtgaattggactttaaaaaaatattcagatataatttctggaccatacaattcaccatttaaagtataccagtcaatggtttttagcatgctcagagttgtgtcaccacaatcaattttagaatattttcatcacagccaggcgcggtggctcatgcctgtaaacccagcactttgggaagctgaggcgggcagatcatgaggtcaggagattgagaccatcctggctaacacggtgaaaccccatctctactaaaaatataaaaaattagctgggcatggtggcacgtgcctgtagtcccagctacttgggagggtgaggcaggagaatcccttgaacctgggaggcagaggctgcagtgagctgagatcacgccattgtgttccagcctgggtgacagagcaagactctgtctcaaaaaaaaaaaaaaaaaaaaagaatattttcatcactccaaaagaagacccatattcattagcagccacttcccattccccattgccccccaaagctaaatacattctccaagtgactcatgcaataggtgcttggtagaaccatggtcttccagtccaaatagaccgtggctggcctgtgttctgaaccattcagtaaagatgaacccatctccmacctcgccctgggctgccatcctgacgtggcagtagggattagatggccaagaatgaccaggtactgggaagaccaggcctctgtggaggctccagatttcagaccatgcacccaagtgtctaagaaaatacaaatgtattaattttttttctcgataacaaaagtttgtctatgatgatccccctttccatcaggtagtagggacttgattttggtcaatttgtgttttcagttttgktcaatttgtatgtcctggttgggggcatagtttatgccaaggcatggtggtggcggggggcatctatcctgccaccctgactggcattgctgggatgttctcatccctaaccaatgagtcctctatccagatacaggctactgggcttcctccttttatcaaccctaggccagttcagaatggtgcaggtctacattcccctagaagcttgggagacattctatggctcccctaatcctctcagctgtgggaaagtcacttccatccccctcttgggcctggaatcatgttgctgccatcctgccacactttgcctgaagagctctgcatgcctgtctcagggccaaatgtctggacaatcacatagacacttctatgctgaccttggcgggtgggcacaacaggggaatccagggtcttgctgccactctggactctgcccaaggactgaggacacagttttctgcttctcttagattcttaaacctacctgggatctctttctcaaggtgagatggggaatgggtccttttaggggctccctgctgctctcccgctagtcctgtcactcctccatcctaggaaccctcctacggctaccaggatggggaaaatatggtgcatccttccaaatctttgctattgcaactaggcttgtgaaatgtaaacgccaagatggttttatttctttgctgtgttttccctggcatcccttcccaagtcaaggaaagmagatgtctaatgcccccaaaagggaagggtatacatgcaacaggaaayaccaggaaaggaaatctgctctattctctcaccattcttcccctgcctcaccttcagagcctcagcaacacccctcggcaggggagaggctgcctgggctcttctctggatactttgatgggaattyggaattctcctgaagtcagcctgaaaaagaattaagtcacacattattgtgtgactcttccaatcccatcttttgatcctgtgtgtgctacaggataagttgtcccagccagggttattgctcacttcaaaccacgtgtgaagaacctcagcttcctcctagcctgaagccagtgccttcttgctgtccccagggctcctaactgcttctttttccactttccaggcaggttttgtggcgataagatcccggagcccctcgtctccacggacagccggctctgggtggagttccgcagcagcagcaacatcttgggcaagggcttctttgcagcgtacgaaggtttgtgcgaggtgaaagcagctgctyggtggcccctcataagctctgtccttcccaggcagcccactgtccctctcccagcccagacactccaggccagagccacaggggtgggggcagccaccacagggggcaagctgaggattccacagcccctcctgcaacattctggaagcagaggccagctgtgcccacttcagaagtagtgccatccttctgacgccatcccaytcaaccctcattccaggccagctgaggagtcggcttcccccatacaggacggtattggggggatctagaaccctgtggaaatgatagcagcctctgaattgctgtgtgagcctaagcaaagaatctgacctctctaggcctctgtttgtttcctttgtgaaaagaagactttgggcaacatcaaggaatttccaactgcgtttcttagaagggcctctgaggctaccctggtggctgagtagagggaaccaataggtctgggctctaggcagctgccaccaggtgatggtgcttctatttcttctatgtcttgagcttctctggctcattccccaccccaccgtaccctctaccaaaaaaaaaaaaaaaaaaagaaaggggaaaactaccagaaaattaccaagggtcctttggccttacattaccaagggtccttcggccttaaattattacaattttagagaggccaaagttttgtctttgtaaaataagtaatgtgcatgtgtgcgcatgtgtgcacgtgtgcgcgcacgggtcctttcctaccagcggtcctgtactctctaccttgaatcacctggggaacttcacggctacgcagcgctccccaacacccactggaatcagaacctctggggagtgtggccccagcttccacagtttgcaaactcccycaggcgattttgatgcacagcgaagttagagaaccactgctttatgtggttttttctttatatgaaaaaaattcagagttaaagacaaatgcaatcgtgcctttctggaggcgcggtgtttgtgggctggagatgaaaatgttggtgagcggagccacctagtggtggcaagcgctgttccccccgcctccccaaccttccttcctaagtaagatctgaccagggcccccgtcttcctctcctgatgtctctttctaaagctacctgcgggggagacatgaacaaagatgccggtcagattcaatctcccaactatccggatgactacagaccttccaaggaatgtgtctggaggattayggtttcagaggggtttcacgtgggacttaccttccaagcttttgaggtgagtgctgctcagaccggcttcccaaggaaacggcaacttttgctagacatcctccactctgtaaagatgggttttmatttttggctaaaaacaggaacctaagaggctattctcaagcccatagtgaattgtgcccggacatctgacatcaacatctatgcaggctttgaaatggggtttgacacctttctgagggcagtaagagaggttgagaataataatcaaagtgaaaattcaggatgggatccagggaagtttggtagaattgttcttctctatttatcctcttagactcttctcagtttgattcacccttgacttctgcaagtaaggagtgaactaggaagcagcatggagagacctgggacacacttgggtcctttggcctcttggttagattttgagagtgatatttgggttctcttcttaaatcaaaaaccttaaagcagaaccatctgccatccaccttgcctctgtttcttcctttagattgaaaggcacgacagctgtgcatatgactacctggaagtccgggatggccccacggaagagagtgccctgatcggccacttttgtggctatgagaagccggaggatgtgaaatcgagctccaacagactgtggatgaagtttgtgtccgatggctctatcaataaagcgggctttgcagccaattttttcaagggtatgaattagcagtttgtttccacttttaggcacaagaagaaatattgctccccctggcctaagacacacaaaaccatatggaagcttaccaccaaacaaggctccctgcagagaaaaggcagcgatgcatttcasagctgggtgtgagcccccagcagagttcccaactgatcaggagcaggctcagccttggcttccacacgatagaaagttctgtacttggaaattagatctaataagtttacaagggcaaactacacggtagtgaaactgagcatggaataacagcaaatatttggatagcagctatcattaattgatcacctactgtgtaccaagaactgtgtaaggtacttgacttacataatgtcatttaattccccaaataaccctgtgagttagatttggatcagggctgggcagggcttctcaggatcatgcaggtagttaagtggcagatcggggatctaattcagtcggcctaattcctaagctcaaactctttctacaacattgctactattccttgatgtgggccagagaggcaacccaggtgttcagctcctggaacatcagtgcccctagactacatgcttacccccacatgatcggggttgggaggagaataaggggtggcactctgggaacaaatttccktgttgccctggggayctgctgctctgtagggtcctgatggaaccaggcccagaatggcatgggcagaccgagctttcctggccccagaagagccagcttccaaccctcctttgaaygggcaggtcctccttctctgctgtcaggcccctgaaagccctgaagaccacaccctaagagggaagcatggctgctccccactgcattgggcctgggcgcccaggagcacagcagcagcccttgagtagagacattcagtcctctgctgctgtggccccttaatcagtgaccccacttccccagcccccctacaacttgtgcttgcccagagcctgctttctcctcttccctcctctcctaggactcctggctgagccagcacagaaatcccagtccctcccttgcttccattctcctcttctgccccatcttagaccttctcccaggttctacgtgaacagcctgggtgtcaaaagaacccacttctgcamtgtcacccagagcaggcagccattcgtccttactgaagcttcagttttcctctctgtaaaataggaagaaggacatctgcccattgtacctaagcaattgttgtgaagccccaaagaaaggacggctgtggaggcacttaaaagctggcaggtgacaaacaaggggtggggctgttattttttcctattttgaggtatcggggaagagcaaaacccaaacagcagcagaggagaatcatgatggcgctgaaggattggagacaaaactgagttgcttctttctcaagccaaaaaaaaaaagaaaaaaaaagccaggccatagcacttgtattttgaaagcaggtcagcttctgattgcacagggaagatatgacagccttagttgagatgcctggaaattcacagccccaatcccaccctggcccagcctgcacatgcctggtgtctcccagcctggggtggcccctgtctgacttggcagcagtgacaccggctgggtggcctcaagcaagttgcatgatttctccagttgcacagcttctgttgcacaagctccagtctctctacctggagagacaatgctgccaggtgattgcaaggctgtcatcaggagaaaatggaatagtgcaagtcaatacaccgagtgtagtgtttagtcccgttcattgtctttgctagggaaggaatctttgaagtggttattctttctggaaaaaccgatgcgacaatttcttctggctattgtgatggactggtttcctattcctgctgtagcaatttaccacaggcttggtggcttaaaacaatgcacacttattatcctacagttgtggaggtcagaagtctaacatgggtctcactgggataaaatcaaggggatggcagggctgcattccttcttgaggttctaagggagaatctatttctttgccttttccagcttctaggagctgcctgaattccttggctcatggtccccttccatggtcaaagccagtaatggccagtgtgtcattctcatgccacattctctctgctgcatcacagacctctgctccggtcagcacatctcctccttctgaccctaacttccttccasctctttgccttacacggacctggtgttgacattgagcccacccagataatccaggagaatctcctcatctccaagatccttcatttaaccacacctgcagagtccttctttcacctaattaagatccttaatttaaccacacttgcagaatcttacattaaggtaacagattcacagattgtagaggccaagctgtagacagctttggaaggccttattctgcctaccacatgtcatgaatgattatgaggttgtcattctaattctgtttattccagtccccttggccttctcctcccctgacttccaccccaggttctgtaagctgggtgctggggctccattccagggggataactggtaaccactgaccatccacaccttactgctggtgctgctggtgatcagcaatgcacaattttgagagtaccagctaaagctggagattaggcttgtcaggtttaggaaattaaaaaaaaaaaaacaggatgcccagttacatttgaactttagatacagaatgatttttttttagtatgtgtcccaaatatcacatactgtgctgagaagtgwttgatggtttatctgaaagtcaaatttaactggacctcctgatttttttatggaaaacttactggagatgccagtcaggrcaatggaaggtatttctctgatgctaaactggtttgtaagagaccgaggaagtgcctggacctgctcaagtaaccatgatagctggctccatttgctggttagaagacgccaccttctccctcctccccatctagcgtgcattcaacattcatcagtctatgtgttggtgctggggctggagacgccgaggaaagcacacaatgattgtcctcaagtgctcatggtggtgaaggagattagcagcaaatgcgcgatgacattgctgtgtgggtgtggaccttggtggaggctgtgagactcagtctgcgacggggcccaggttacccagtgtcctacttggagggcatttcaatttgcaaacatcttttcagatgcctgtcaaagtgtggactaaggcccacccaaagtaacttagtgcacagacccagcttgacttttttrtggttaaaacaactgcagagaacaacatttagaaaagaagaaatatacaacattgaccttgaccatgaatcttaaagtaggaatcaggattaacagaaacctcatctagacctattaaatcagggaaaggacatctactgaatgctggccacgtgccaggatctaggttatctcacttttcttcattacaatcccctggtaggaattattattgcccccgttttccagttgaggaagctgaattcctaacatggctgggctggaaytagaacctggatctgtaggattccacaatccgctctgtttccactaaggagacctgaaagccacagggaaggaaygtgaagggggtggaatttttccttagtgtttgtgatttgattctgacactggtcacctttctaccttcccrataccacagaggtataggcaaaagggctctggacgtggcaagtggagtttgaggtgctggtcccatgttccctactagctattcgctctcttgcagatcagctttccttcctacgaccggcccatacctgctttgctcctcactgtggtcccagtgcttggcacacagtaggctcagtaaatacctagtgagcaatgaaagaatggatagatcaatgaatgaatggggctcagtttccctgctggtggagtgggcatcctgctgcctgctctgcctcccttgcaagactctctggaagaagagtgggtgagcgaccacagcctcgtgcaacactgtccaacagaaatgggatgtgaggcacaaccagaagccacataggtgaccttgaatttgctggcagctgccttacaaaaaaggagaaaccagtgacattgatttcaatgatatttttatttattgtacaaaataatatcattttaatatgtaatcaatatacacaatattagtgagagatcttatgtttttcacactaagtcttggaaatccagcatgtgttttatactcatggcacatcgccacttggaccaactgcgtttcaggtgctcagtagccacatgtggctgggggctgccgtatcagacagcgcaggtcaggagactgtacccagccagcttccccagcccagccttttcccaacaaggccatcattcagatgctctgtgaacacaacgtacctagcacgtgtgtcagaacttctccagtgaaagaagctggaagaggagctcaaaggcccagcagaagagctggagcaagccaaagaagctcttgccttggtgccaattggcaggtgctctgcccagggcccagctggygcctgatcctggccagggtgccagttggcctctgtacctgattctggtgccagatggcagccttctcagagcatactggctggcagcaagcagagaaccttaacaattctggttactttgggagaaggcagcagcactcaagggctggcagggccattttggtcctatgccccccacataaagaattaaagaattcccaccttgatccctccatccccctatcccagtgctgataggtcaccatgaagggcttggtagggggactggcttccctcaagggatttcttcaaaagcctaagaatatgccctgccttccctttccttaactttctctgaacaatttttgggatcctgcctgagccatctcatcatctaactacttccttctttcgctaattccacctggaccatgagaagactccagagctcctgctatgctaagctgaatgctgcttccagtctcttctactgccacgctctcccagatttttctgggaggcttggccttggccttggcctctgcagcccagagcaagcacgagccagtgggcttggagcaggtgctgctttaccacagtgggaggccccatgcacctctgtgccatctagccaagctgaagcagggctgtaactggccaaacatctcacggctcttgctagagagagctcaggtgtaaaagcatgcctttcatctacctcccaaggccgagcaccttaccttctagtctctggaggaattatattttctttgcttttgccctaggtccatccaccgggctctctcccttcacctggctaagatggtgccaagagacttgctcctctgtgcacctctttcttgcctgtgtgtcctgcctayagccacagcatcttctggtatcagartctcctgcagaccccagccttggtcctttgtctatctgtctctcccaatgggctctttccttggtttccttctgcctcttccctaggtcccccagccagtgtcttgagttcttctgctgtgctgccctcctgcccgtccatcttcctycactggcccatccttgaagcattttccttctttctgttcttgccttgtctcccttccctcctcaggcctgcactgctccactcccacctggtccaggtatgcccagggaaccttatcttttcactgccccatcattgtgcctctctactcactggaaatttgaaagcaactctgctgctgtctatcatgatggcttctgtgtgccgatggtctgtatgccgggtacttcacatgcatcgttttcagtcrtcacaaccctaaaagtaaatattatcattctcactttaaagcaggagggaggctcagtgaggctaaatcacaagcagtcacccaatttattggaggaagatcggctggaggatccaccccaggtctgactcactttaaagcctggactctttccgctactttttatcaactattttcttctttctatgctttttagcaaatgtctaagaaaatactttcaatttggtaaggtgataaaaaaagtaactgcacacttgttactattttagcatacttattacttacatttatttgaggcgatgggcaacttcagctccctgcctggattgtctctctaaacgcaatctcccctaataagcaattaatttatataagtttttattgagcccaagagtacatcaccattagagttacccaagttcactgtccactatgtgaaatgatgggatatttacaaaccctcctttaccsagtgaaatgcaaccaggttgatgaggagtctgtgcatcacagacaaggacgactggaaggaaaggggtatatttgagttggaaaagggcagggtagagggaagctggatgattggagggtttgtgttttctgaggaccagtggactggaagttgtaaggagtcagacttttgacccaataaatacctttgaaaagtagtgagagtcctgtctctgggagttttcaagtagggtctgaagagccatctctccagaacgttactgaaaggattcctgcctgagagggcatgactgggtaactttccaggtctttaccaactcatagatgttcttaatttcttttagtttgtgtgtaaagagttatttcaagatttggtgaacaacttttkttgttgttgttgagacagagtcttgctccgttgcccaggctggagtgcagtggcgcaatctcagctcactgcaacctccacctcccaggtgcaagcgattctcctgcctcagcttcccgagtagctgggattacaggcatgcaccaccactcccggctaattttgtatttttagtagagacggggtttcaccatgttgcccaggctggtctcaaacttgtgaccttgtgatccacccgcctcagcctcccaaagtgctgtgattacaggcgtgagccaccgtgcctggccaacaactttatacttactgtgttcctaccttccgtggtgctgtggaccwgaactctccttcccgcttctccccatatcctttcttcttcctaggttcaacttttttgaaaaagatgtctcagtgttcagttgtcccttcactagactcctctctcgctctggtaggccacatcccacatgctctctttcagggctagatgtactatggctggcaacagataatcatatttttccttttatttctaacatgtgttttggtttttctttttttcagtggcgcttgggttaatgtgtctggggagtgtctctaatgacttccaggttcttcctctgagcagcaccgatggcatgctatgtgctgttatttagtcgccccaaacgcatcactaggcccttggtgctgaatcccatccaacgcccctgctaactcagcctcattatggcctcttcctgcaggttttcctgggagcatttgctaacctaagagcccgtgttttctgtaaccttgaatatctccctgtgcatacctctcttaagagtatttctaaaactcctaaataacagattctgtctctaatgtctagagaatactgacacatcttcatctagcaatgttttctttgtcttcaccctttatttaatatctctgagaagttgcatatttatgggggcaggggaagtcctcaattccatggttttaaaatggatgaagtctttggtatggaatgttttgagattttttgaagtctcaaatgaccgatgaccaaacacctcaaagaattcacttctccaggcctggycttctcttggcagagcctaccccagctaacaaggtgttcctgctcgtgttgtcagtgtcctgccttcactgtagctgctgcctggttttcagaggtggacatggcactctttgggaggtggtcaccaggagtggctcctgtttattagaggacacttgctggtgacactgggatatgcaagggttgggaasagccaggaggcttcctgacaatgtaaccggggtcaccttccttccccaccagaggtggatgagtgttcctggccagatcacggygggtgcgagcatcgctgtgtgaacacgctgggcagctacaagtgtgcctgtgaccctggctacgagctggmcgccgataagaagatgtgtgaaggttggtgtgggacctgccaagctagaatgagagggtatatgggacaagtctttggsgaagtggggcagagatggggcaaccagctggctgtgtaggaacgatgggcaatgggcagacatggtggaagacccacctacttcctagaaggagaaacagcctgacagctgtcacaaatgtcagaaaactgcccaaattacatagactctgccctagagactgaaatcaaggccatggtttttcttctatgattgtgtgaaattgacatgattattaaagtaggaaacaaaagcaaagaaaaactgtgagcactccagtgactcaaccgatagcacttttcatccatcctatttctacctggcttgtgttccatcttccttgtccacgtgcatgaatccgcttgttcatgcaagcttggtatggtgagtagcttgctgcaaacatttctaattctcctttggcccaagccatagggagcccccagctctgccactgggtgaaaggaaagcacaaatgcattcattgtttttaaaagcagtaaagatttatccccaattttgttccttcaaatattcagttgaaaccattagtyttgaacaaaggacactgaattaatcagttcaaattgtctaacattttaaaattattacagaacagcaaggctctattgctcctggtgggaaatcacagtcacctggagccaaagccaaatgaatcctgtttctgtttcccccgtgcagtggcctgtggcggtttcattaccaagctgaatgsaaccatcaccagccctgggtggccgaaggagtatcccacaaacaaaaactgtgtctggcaggtggtggcccccgctcagtaccggatctcccttcagtttgaagtgtttgaactggaaggcaatgacgtatgtctccatgctctaattgattggggactgtattgaggggtgactcagagctggaaaccagtgaggggctgggagggcagggagatggcttgtgttgactgaagctttggacagtcttaggacctgcgctagcagaatctgggggaatgttttctccagcagtttcagccgcacgccctctgcagatagagcacctccggccctcttgtcgctgatacatccaaggagaatcaggacaagagtggaagaggcagatattgggggtgggaggtgtcaggactgggctgtgagtctggggagctggtgtgcagctgaggcgaataaagggggtgagaatcagctagggacaaggatgctacagacagcctgtttcctctttcgggcagtgatcatggatgatcaagtcagttgaggtccaggcagcaccctacagctggagtgctagtcaggcatgcctacgtctgcaccttaggctggaaggacaccctggggcacacaagccattcctgagactcccctccccaycccagctgagctgggggtctcaccttgagaatagtactggtgtagctctcacctgatcaggcctttggggtactggaaggagacctcaatgctgatgaccccaatgcatggaggccatggcgcccatgagggtgtcaccccaaagtgaatattgtgcagaaaaaaataatccttgaaagcaattgataagaccccttagcagtgaagttctttttgagaaaaatcattgctacagcaaggaacatgaattctagtcctagctccaccactgctgagctatgtgacttcagacaaatgtctttccccctctgagcttgtttccctgcctgaaaatggagtcagattctgtcggtggtttgcaggattttcctcctcctcttcctcttgcttctccctcatcctcttctccttatttttcttctccttctagcagtggggccctttcttcaagtaaaatttcatgtggaagcctaatatataaaataaattaaagcaaggctacaattacggggatgcaggtttgggagccctgtgctcttgtgccaggcgatggcacccccacagagcctcagtgggagagccaggggtccccctgtgccctctggagctcattcaaataaccggcgtagcaagagtcaagggaccctcccccgccacacacggtagggtgaggcgctcaggaagcaggtgcagcagtgtgctgggggtctggggtggggacagggactctgggaagctccccatcatgctcccttgcaggtctgtaagtacgactttgtagaggtgcgcagcrgcctgtcccccgacgccaagctgcacggcaggttctgcggctctgagacgccggaggtcatcacctcgcagagcaacaacatgcgcgtggagttcaagtccgacaayaccgtctccaagcgcggcttcagggcccacttcttctcaggtatgcgggttcagaggtgaggctgatgcagygcgagtgaggcggctttgcagactccaggctctggggtccctggccccctcctctctctctttgcttgctcctgcatccctccaggtatggctgccttggagggggcgtgccagatccagggcttttatatatctattggtggctgtgttagtttcctagggctgccataacaaattaccacaaactggttggtttaacacaacagaatcttattcttacagttctgggggccagaattccaaaatccaggtgttcgcagggccatgctgcctcggaaagttctagggtagaatccctccctgcctcttcctagcctgtggtggctcccagcagtccttggcattccttgccttgtagctgcatcatcctgatctctgtctccatcttcacatgcccttccttcttctctgggtctctgtgtcccctccttttcctagaaggactccagtcattggatttagggttgatcctaaatccaagatgatttcatctcaagattcttaactaatagttctgcagagacactatttccaagtaagatcacattctaaggttccacattgtattagtctgttttcacaacatacctgagactgagtaattgataaagaaaaagaggtttaggccgggcgtggtggctcatgcctgtaatcccagcactttgggaggccgaggcgggcagatcactaggtcaggagttctagaccagcctggccaacatggtgaaacgccgtctctactaaaaatacaaaaaaaaaaaaaaaaattagccgggcgtggtggtgtgtgcctgtaatcccagctactcgtgaggctgaagcaggagaatcgcttgaacacaggaggtggaggttgcagtgagccaagatggtgccatggcattccagcctgggtgacagagcaagactccatctcggggcaaaaaataaaaaataaaaaataaagaaaaagaggtttaatggacttacagtttcacatggctggggaggcctcacaatcatggcagaaggcaaaggcatgtcttacatggctgcagacaatacagaatgagagccaagtgaagggggaaaccccttataaaatcatcagatctcgtgagacttattcaccaccacaagaacagtatgggggaaaccgcctccatgattcaattctctcccaccgggttcctcccacaacacgtgggaattatgggagctacaattcaagatgagatttgggtagggacactgccaaaccatatcacacatgaacaggaattttgggaagacactactaaacccactacagcagcacattggaccctacttctcaaactgaaggccatgaaccctcagggccagtacagcagctgtagaaaaagcccattctccttagcgtggcatgtggtgctggacactgccttggcccacctgttctgccagccacattccctctgcaggtgccctgtgctctgatcacgaataatccccccactgttcccccacaccatcaccttctactcctaaacccccatcccattctgtcttcataccctctgcctgtggcgttccctctccctggaatatccttcttccctccctccttaggaaactcctacttcaacctgaagacccacaatgccactttctgtaacattctctggcttcgtcttattcctctatcttagtccattttgtctggcttcgtcttattcctctatcttagtccattttgtgctgctatgacagagtaccacagactaggtaatttatagtgaacagaaatgtatttggcttatgaatctggaggctgggaagtccaaaatcaagggggaacatctggcaaatgccttcttgctgtgtcataacaaggtgaaaggcaccacatgggtgagaaagagcggcaagggggtcaaactcatcctttgtcaggacgccactcctgcaataatgagctctcatgacctaatcacatttaagggcctcatctctcaacactgttgcattggggattaagtttataacacatgaactttgggggacccattcaaaccgtagcaccctcttagcacattgattgttcttttaccagtgttcccatagcactctctccttcccttccattagggctcttgtcaccaggggccagctccatgggcctgtggcctgtgcaatagcacagagcctgttctcggaagggcccacactaatttaaggttctgttgtcatcatcttgaaattcatggccgggcatggtggctcatgcctgtaattccagcactttgggaggccaaggcgggtggatcacgaggtcaagagatcgagaccatcctgcccaacgtggtgaaaccccgtctctactaaaaatgcaaaaaataagctgggcgcgctggcgcatgtgtagtcccagctactcgggaggctgaggcaggagaatcgcttgagccagggaggcakaggttgggtgacagagcaagatgccgtctcaaaaaaaaaaagaaagaaattcataatagtgtttcaacaaagtgcaaatcttgcactgagccttgcaaactgtgtagcaggtcctgcatgtcacgtcatattagagggtgaactgtttacaagcaggaactgtactttggttatctttatagtcttaatgcttggcatagaaatgacccaattatttgttgattttatagatacccagagttccatctccatgcattttttttttggcagtctctcactgagcaagtcatgttttttgttttgagtgtctgctgtgggcacagtacactactaggctcagagctgctgccagggaaatgaccccaaccctggacaagcttacatgccagctagggagccaggaatacacaccctgctaagtcccagcctggagcactgtggggtgggctggtgcaacaagggctaatgtttgaagaagagaagcccatggttgcctggagcagtgggtgaagactttttgcaggatttggggtggtctaagccaggttttaaaggatggaagacatggaggtggagataggatgattagagagaaagtaatcagggtccccagtaggggaggcagtgtgagcacaggttaagttctcaacagagcacagagacagagatgagatgggcctgcatggagccctgacccatgctgggaagccaagggcacgagatgggccaagttggagaaggccaggtcatgagggaccttaaacgctgggctgaagagtagggacccgatgaaacaggaagggggactgtttgcaggttcttgagcaggggaagcctaaacttgtcatctgaccaagccatgccaggcagtgtagagctgggagggccaggcggctggaggaccagggcagcagggcagggggcaggagccacctcagaggaggatgtagcagagcctcacaggcagggcagctccacatttgcaataggaaactagagcacagggaagaggatcagagcaggggtgaggacctgtgagtcatctgcagaaggacttggaggaaggaagggagagaggtgggtcagtgctgggtgttgggcggcttcatctcttctgcattctttttttttttttttggagacagagtgtcgctcttgttgcccaggctggagtgcaatggcgcaatctccgctcaccgcaatctccgcctcctggcttcaagcgattctcctgcctcagcctcctgaggagctgggattacaggtgcttgccaccatgcctggctaatttgtgtctcgaactccggacctcaggtgatccacccgcctcggcctcccaaagtgctgggattacagacatgagccaccacgcctggcctctcttctgcattctttttttttttttttttttttttttttttttgagatagagtctcgctctgtcgcccaggctggagtgcagtggtgcaatctccgctcactgcaagctccgcctcctgggttcatgccattctcctgcctcagcctcccgagtagctgggactacaggcgcccgccaccacgcccggctaattattattattattattttttgtatttttagtagagacagggtttcaccgtgttagccaggatggtctcaatctcctgatctcgtgatccrcctgccttggcctcccaaagcaaagggtctttcttacaagggctcttagttgtcctgataacataagcaggtgaaatacattgttcaaggagacattaayaatggtgaacaagagcatatagagaggggaggaagacagggctgacccctaaagtcattctkgtgatggcagggaagcaggggagggaggctgatctttggtaaatgcaggaacaagttggcttaggatagggctgcatacaaggaccacaagtttaacaagggccagcacttgagttctcacataataattatacagctaacactgtgggctggatgctgctctaattaatttacccctcccaacaacctgtgaaatgaggataccattactgtctccattttacaagtgaggcaactgaggcacagagggcaggaactgcccatggccacaagggctggaagtggtgcggtagggctggccctctgctgtgtgtccccaacactcagctgctccacgtgcagagggcggggtggagtcgcggcacttgagcccaggccacagaggatgcttgctcactgagtgaccttgatcacattagccattctcagcgtcagtttccttacttgtttttgttttgttttgwttttgagatggagtttcactcttgttgcccaggctggagtgcactggcgcgatctctgctcactgcaacctctgcctcccaggttcaagcaattctcctgcctcagcctcccgagtagctgggattacaggcatgcaccaccacgcctggctaatttttgtatttttagtagaggcagggtttctccattttggccaggctggtctcgaactcccaacctcaggtgatccacccacctcggcctcccaaagtgctgggattacaggcatgagccaccatgcctggccagtttccttacttgtaaagactgacagatagacagctccctgctaaggttggatgagaattaacttagataatgcatacagtgtttggggcagtgcctgttgcatagtaaacactcagtaagtgggaattactgttattattgttactattgtgattaatacaagcctgtcctttagggagctccttgttttgagcagggagcaggggcagagaacatacataaagtacttggagaattcaacacataccagggccaagtacatacccaagaaacctgaggtgaagatgcttcccacttcactcctccagtgagggaamaatcagagggggaaggggagcaatcagagaggcttcccagaggaggccacttttaagtgggattctgagccctgagggacatttgcaagttggcggttcctcttagaagagttcattgatctccccagataaggacgagtgtgccaaggacaacggcgggtgtcagcatgagtgcgtcaacaccttcgggagctacctgtgcaggtgcagaaacggctactggctccacgagaatgggcatgactgcaaagagggtgaggctggacctccagttgttgggggggcgggctgcccttcgccgcaccccatgcccctgtgtgcatgtgcatgagtaaggmggtgyggcgaggacctcttccaccttctgagctgaggcccagcaactgctgtccttgcgggagagttttccycagggcatctcgctccttcaggaggcacctgggggcctcaggtgctctaggctgttatttttgtaagtgattaagcctgcaggctctggaatccaattayctaggtctaaatcctggctctgccgttccctagctgtgtgaccttgggcaagctatttaacctctctgagcctcagttttttctttagttaaaagggtctaaacatacctccttcttaaagtttttgtgaggattaaaagaatgcctagaaartatttcagactctctgacacatgttatgtcctcaaatgtcaataaagatcagccatttatgtctttgtcatatattaattaccatatgcaggtcccattggaaaataggatttggggaaagctttgctccattctccattcactgtggggaattcttcagggccaggtggcttttactgtccagtcatcctggaaaaagccttccttctgttcttaccctgcccagtgaagggagktcgaacatttatgacaaacacacaggcttccaggccttggctccagccacgaaaccctgcaaaggaagtcaagggtggaggaagatgtggaagacacacaccctgatctctggaataaacagtctggatttaggagatttggctgggtgccgcagagtctggtcaggatctgcctagaatgttaaaggaggcgctgacacatcttcaggaggaggtggccaccctccaagcccagccctagggcatggtcacaggtggcggaggggctgggtgggaggctgctggaagaactgagctgggaaggaacagtcaagcccctgtgagatgggcccgggccaggaccaggcttgcctcctgcagtgtgggagaggacaggagtgacgtcaactctcccaagatcccacccctgaatagtggctgcattcatgtgggttgaccccaacagcagggggtgtcagagcaacatctcaggagctgagcaaatgtcccaggagcygagccactgcccctttgagcacctgttctctgcgttggctgcagagcagatgtagcactgagcagaggcaaatctctttggaacatcctcgaagctgtttcctccccttcctgcccccggccctcctcacctgcctctccagcttcttcagtgtggagcctccgtgtttgtgatacagtccaccgtgctttctaagcagtggtagactggcctcaaagccaggcaggccaagttcgagtcccagctctgccccctatcagcaaggcactgaccctctccaaacctattttcttatttgggaagtgagaaggactaaaagagaggatrcatggaaaatgctgaccacagtgcccaccacagaagagaaatggcagctattggccaagatgccaggcattgaacaagttgtgggaccactcttggcaaatagcactgtaaccaggacaaacttggtagactccaaataaagccactttgaaaaactaaaagaagcttatggatggatgatgaaggaggcctctgttagccaagatgcactgagcacttaccatgggcyggcatgccctaagcctttcccatgcattatctcattcgatcacatatcaccctgactagagtggcacccttttacaaataaggacaccgaagcttacataagagccccaagtcccacagattgtaggtggcagaaccaggacatgggccgaggcccacctgaccccactgccagtgcttttaacatatttgcaaggataactgcaatgtggataggaatagaaagatagcctggcccccgagccacagtcaggaaggcagaaaagccagtgcaagtaaaccagcacatccctgagccaggagatacccgattcaggataccccacccccatatttgataaagaccctgagacaattaggagagaggggaggagacccccctagaatccttcttgtgctgcccacagtgaatgacttctctctttktatgtgtccccctgccacccccagctggctgtgcacacaagatcagcagtgtggaggggaccctggcgagccccaactggcctgacaaataccccagccggagggagtgtacctggaacatctcttcgactgcaggccacagagtgaaactcgtgagtcatttttgtagtttattgagaatgtggacttgagtatcaggcagatgtgcgtttgagtctctgctctgccacttcccagctctgtaacttggaagttactcaacatttccaggtctcagtttcattatctggaaaacatggatactaatgaagcctacttcatcgggctgttgtgcagattaaaagagacaaygcacaaaagctctataggtcacacctgggcacagtgggacccgcaggaggcggcatccaccacccacatctgcagtgctgtttgagattcacttgtttccagttttaattttttacaagacaatacagtctcatgattaaaaatgagatgaatcagtacaggaggttggaaatagaaatcaaaagaccccagagcccccatttccactctagaaatgaccactctaaacacattcttatggatccttctagaaattttctgtgcacaatcatgaytgtcagtgcacagggaaatatatatgtttttgttactcaaattcctctaataaaatcccattcgtattttttctacaacttacttttttttcccattagtaataggagactaagttctttatgcaaattccctcttgaattaaaaattttccccaagcctttatttgaagtctttttcacgtatatgatgtgtggtttgcacagttatttcaaaggagagttgaatctcctaggagtctcatttctcaacccccagggactcccacactttggagaataaagaaccccttttgccagctggagaatgtattgtacttcaggcagatggacattttttaaatggktttttctgactgtasaggtaagtaggattgaccctatgaactgtggacgataactcagggagaatggaagagaacagagagggaaaagtccatgatcaatggactatggcgcagggacttgcaggwtgtttattggtgagagccatgagtgaggagcagaagaggcgaatgggcccccagggmgtcgaggggtgaagacagggcctctgaccacagggtgctcccagcgggcagttcacatgctgggctgcccgtggggaaactgctgctctgctaagagctggtatcccgggtcagccttgaatctgggtgaggatgaactgaagagagccttagggaaaggcactgcttctccaagaccgccatctgctgggaaatgttcgcaatggcaacatagagccccgaggacctcgggggaggcgccttctggcgttgggagcgcgcaaacgcacaacgggaagcgtttgcccgaggctcacagactcacgtggtagtttccaaaaggcgttcccttgggaaacggatggtggctatattgattgcgcgcttttcgctaccatagaatgtgagttgaatacttctcaaggaagctggtggtgttcactgcatgtgggtggcgacagggcgccccatggacctcctgggagctccctgcctgctgagcctaaggctyccttccactgcatggccgtcccggtgccactgctcccctgtcccgtgtctctacccaccaccttggcccagtgctccctatgtcactggcgggagagctttgcccaagtacgttagtgtgtgggagtcattcttctgaaagcctgcattgccgtgctggtcccttccccctcccaacctccatctctgcgctgccaggccagccccgctcttttgaattgacacccmcccccyccccccgcaactaatgtcctgtctccctgctctgtcatttggtccaagtcttcatctaacaccgtccccgctcaccttatcccatctcccttgacgctggggctgccatcagtcggccacctacccagcatctgagaagcctgcattcagggctgaaaagcctggaatggtgcggcgcccctggcgagcgttaggggacagtccttagggggaacagggagaggtgaggcagcataacctgatgactgatagcagtgggggttggagaaggctagctggggtcaagttcagcttcatctgtctccagctrtgtgagctgggrcaggccagccagcttctctaaaactcattttccccatctgcatgttggaaataataayagctcttccttcacagcatcaccagaagtaagagagaaaatgcgcataaatgcttggcatggaataaacactcrgcgagagtcagccaccatgagggtgctgcctggagcagcgtgcacctcatacaacctcaccagcgtcatttgtactaaagggtcgtgcagcagagtgcacaggtcaacagcagggtctctgatgccagagcaccagatcatggcccaactctcagtatgtgaccttgggcaagtcatctgacagcgatgagcctcattttcctcacctgtaaagcggggattagacacatcacaggggtgtaaagattaaatgaggcgatacttgtaaagcatttaaaacagctgccgacagagtgggcactcagcccttgctggctcttagccctaagtgagagagaagctgtgtgatgggatggaaggaagacagatttgggctgtgtaaagcctggctctgtcgcttaatagctgtcaaaatgtcaagcatttaatctctgaacccctgctctctcatctgcagtgtggtcattgtagcaatagctcatgtaactacttcatagggccacttgctggaccaaaagcaaggcggaggttgagaccctctctacagatgtcctcaagcatcatcayggccacacaccccctgcacagccagctggacgtctccctgcactgcctcgccccttcctgtcccagaactggaaaggaggcccccaccccagctgaacgccaggcccttgccttactttctgctcttctgtccccagacctttaatgagtttgagatcgagcagcaccaggaatgtgcctatgaccacctggaaatgtatgacgggccggacagcctggcycccattctgggccgtttctgyggcagcaagaaaccagaccccacggtggcttccggcagcagtatgtttctcaggttttattcggatgcctcagtgcagaggaaaggcttccaggcagtgcacagcacaggtacctggggtgggacactggcttccacctgatgagcacttggacaggagacagagaaatggtgaaggcacgacaaggactgccttttattctgactgggggagggcgaggggaggaaggtgcgtgataaaatgtcctattaaaatgaagcatcaagctgggcgtggtggctcatgcctgtaatcccagcactttgggaggccgaggcaggcggatcatctgaggtcaggagttcgagaccagcctgggcaacatggtgaaaccccgtctctactaaaaatacaaaattagctgggcatggtggttggtgcctgtaattccagctactcaggaggctgaggcaggagaattgcttgaacctggaggcagagattgcagtgagccaagatcgtgccattgcactctagcctggacgatagagtgagactttgtctctaaaaaaataaaaaaaataaaatgaagcatcagcaacyawagggaaaagggccgtcttctttcaatgtccttaattgacgcaatttgaaatggacaaccctttgttagtgccccattttttcctccctccttctttccttcctttcttcctctcttttaaaaatatattttggccgggcacggtggctcacacctgtaatcccagaactttgggaggctgagtggggaggattgcttgagcccaggagttcaagacctgccagggcaagatggtgagaccaccccccgatctctacaaaataaaaactagaaaacatagcgaggcgtggtggtcccagctaccctggaggccgaagcaggagaattgctggagcccaggagttcaaagcttcagtgagctctgatcacgccactgcactccggcccaggtattttgctggtctatgaagtccagaagttgggtaactgagtggtgaaaacagcccttttatccctgtaaggaccagttctggaaagtgaaaaatgtttctgttccccgtgattttttcttccattcaaaatgtaaatagcactattaggtcctttggtgggaaatgtacgtgcttataacttatattatctacttcgttaagtagaagaatgtcaggaagaaatttggctctgctctttagccattaaaatgttgccacctgggactagtgcccacagaagcaaatctgaccctttgatcctgatgtacaattgtgtcctttgtcagagctggtgaccacccaaagcccactctgcttctgtaatgctgagtctgagctcacgatcatgggaccctgtgatccttttaacagcctctacctccagttttttttcagtaccggaaaatataaattaggtcaaacaaaatggcgaccagcatcctgaggcagttcagcctcctcttgcacagcagaaaacgctgcatggtttgtggaaccctgtcaaactccctgaggagttctagctccctacagggaagtttaaaagccctcttgtccctgcagatagagaccagcaggaacacaggtgcttcagggtcccggcaggaagtgggggcacattcagagtcattatttgagagaagttaataaagggacaagttacaaaggggtgggagagtatgggacactgtaggacaatgaagccaccagagctaggaactgcaactccaggcccagaggatgagaggagggagcagttcctggaagctggagacagagaggactgcatgcagagaccctctggctgcagctgtgacctaagtggaagaaaagctgtggcaatcaggggactaaataccctggcttctctcgcctccctccctctgatctgctggtgctccccatggctgaacctgcagcagaaggcacggggtcatcgatgtaggccaggggtctgtctcacggggcccaggcaggtggggagggtgggggcgtccggcmggatggaggggaggcgtcccaccctgctctgtgctcatttcatgaccacccagctctcaggaatttgaaatttcccaaagacaggttagacctgtaagacattctaagccagagccaacacaggactcagaatggtcagtcagacaggaccggggccaggcagggcgtggagctccagcggggcctaggagtgttaggagccaggtggcccagaatctacaacagcgtttgcctgggcccctcggggggcatggagcacactggggaggggmtgtgcaagaatttgcttccagaatttctggtgcttgctaatctagaccagtcttatctatctattttatttatttatttactttttttttttttttgatacggagttttgctctgtggcccaggctggagtgccgtggcacaatctcagttcactgcaacctccgcctcccaggttcaagagatgctcctgcctcagcctcccgagtagctaggattacaggcgcccaccaccacacctagctaattttgtattttcagtagagacagggtttcaccatgttggccaggctggtcgcaaactcctgacctcaagtgatccacccgtctcggcctcccaaaatgttgggattacaggcatgagccactgcgcccggccaatatccattttattttatgtgggcttaagtgtccaagacacaaggtactatatatgggaccagggccaaccagagttactgtccttgtataatgaaaaaacccagaaacaaaggctacagaataccagcccagagcctgaggtgcagctcacctgtgacacccacagggacctcaaagttggcctatagtcaatgccctcaaatgcaaaaaccagtcaattagggtctgaggtttccagggttgagagcttacccgcgattccgatgtgcttttatcgccctctgtcggcagaaatgacaaattgcagtcagtcggtggggcgagtgggagcccttctcagatgcatccaacacttccagggaataaagtggcaaatagatccacccatatcccagcgaccagtgaggcgaaccgtccattggctccatgtctccataaccggaaaaaacaaaaagcagccaactcttttcaatggcatgctcacgtattctcaagctgggaacaggggaccttggcttgtgagggccactttgcacccccgagggagccctgacctgggagccaggggcctctgtgtactcctccatcaaatggggtgacgagactacctggcctctcctgccaggcacgcaccaggctctgtagagaaagccgagcagacgcaggcgggaggcacgagggtgtcttgtgctgaggggacatctcacttctctctgctccagagtgcgggggcaggctgaaggctraagtgcagaccaaagagctctattcccacgcccagtttggggacaacaactacccgagcgaggcccgctgtgactgggtgatcgtggcagaggacggctacggcgtggagctgacattccggacctttgaggttgaggaggaggccgactgcggctacgactacatggaagcctacgacggctacgacagctcagcgcccaggctcggccgcttctgtggctctggggtaagtcccggagacgctggggccggggcagagtgtgatgattcacagcaggagttgtggagtcagacacgcccggctttcagtcccggccacctactccacttaggagcaacggcgaggaggcacgttctgcagaagcggagtgggaagcaggagaaccgtcaggagaggaggttgggaggcagccagggaccagtccttgaaggccccttactgaggccagccatggaagagcacttttccttttgggactttcacctatttttgcaaaggctttccctctcccctccttttttttttttttcttttttttcccccgagacggagtcttgctctgtcgcccaggctggatctcggctcactgcaacctctgcctcctgagttcatgcgattctcctgcctcagcctcccaagtagctgggattacagacatgcgccaccacacccacctaatttttgtattttcagtagagacggggtttcaccatgttggtcaggctggtcttgaactcctgacctcaagtgatccacctgcctcgtccttccaaagtgctgggactacaggcgtgagccaccatgcgcagccactctcctccatttttatttggccttcaggctttaaaaatatttaattatgcttttatatatttcttatattcacatttctctcctcaagcaaaaccaaatgctctgaaaattacaagtcacttactatacacacaatagttgtgctcaaggtcattatcaatgttctcattattgatttctttagtgggcctattgtgtttgctgtttctccagcacctgacaccgggcttggcatatagttggtgcttggtgggagtttgcgcattggccagtacagtgtcccagtcactcccctggctgcaccgcactggacactgcccatactgggcaccagccccctcctttctgttgcctggaggcccggtcgctcaagcttctttgctattggctggacttatagcacatcatttttgagtcaccagtggtccttgtgctaaacggaaactcaaattggcatttatatttctttgaataattcccttcatcttctttcaccctctaaaaaaggaagaatgacaaagtggcacttaaccaatgcactgcctttgataaaatctttcaaactatgaggtctgtggaaaggaaccccttggaggggttaactgagcagttaactgtgggggaagcccactttggctccactagaacctcgcargcaacagccttggaacgtggctcccattcacagaccacctggcaaaacctttctgaccaatatagtggctccatcccatttttttgtccttggatgagacagaggcctgaaccatggtctttgtttcaggtctcctgggagacacatcataatggtgaccctggagctcggtgattcatggtgcatcctttactgtcagaaggacctaagcttgggtcccgcctacctgcgagaacttgagtctcagtttcctgaagtgaaaaatggggatagtacctgccttataaggttgctgtaaagtttacataagatctggaattgcctagtgcagcacctgacccacctgcatacttaataaataatagattctatatgagctatgcacctaggatcatctttggaagagcagggcctgcaaagctccctggagcagaatttgcaatgttttcttttgaaaaggagcttgttyggatgcccttcagagtctctggtaccagagacacatcctgtgtccttgcataagatcctgtcccatcctcctcattttcaactccaatcacagctaaagtccttctcgtttccctttctcctttcctcagccattagaagaaatctactctgcaggtgattccctgatgattcgattccgcacagatgacaccatcaacaagaaaggctttcatgcccgatacaccagcaccaagttccaggatgccctgcacatgaagaaatagtgctgatgttcttgaaagacagaaactgagaatttkttttgttttgttttgtttttaacaacaatagcaccttgaaaatctgccctaaaacagtgtacagtatttttctcaaacaaaaactcagaatccagccttagaggtatatatttgaatgaaagtcttgtaagtttggccaacaaggtggagagaaaaatgttcttttgcttctgtctgcaatgttatcattcatgaactgttaaagtgttaaagattagrattgaagtcactgaccattccggctatgcttcttcataccattctccttgtcccttgctcctatgtggcaaaaggtcagccttggrgttggccgttcctctaatctggacttgcttgcaaaggtgccaggctgtcttctgtccatgttgggcataagggatgaaaacttggccgagactaatgtgtggcccacagctttggctggaatcattttctttctctctgccagggacatgtcaaccaagaaacctgaaaatatggatggatgtcaggactaaaaaaaggcatcacagtgagcagtgagcacagagggagtttcgagtataagaatcattgtcatgaagttaggagaccacaaagccatttctcagagtcattcactctccttgtccctttggtttccccccctccctaattgcagtgggggctaaggcatccattatgaatacagcagaacatttgctggcgagagtcctgtctgctgagaagacaatattgtggctcgtcctgatatttttttcattcattgactttgagaagactccacctgtgcttggaattccatgggcttcaaagaacatttcttcttttagctttggaggcacttgccgtggcacacctggactccttgacatccaattcaaactgcatttgcaaaatgtgcaaagacctcttatgagggaccaattcaggtcccttatggggtgaacactgttgaagactggttaattataagttatgtaagaatcatcgccttgtggaacaagtcaatcagtgactagcttcctgtagccaatcaggttaaagagtgcgttggtaactttgctctgattaactagtattcaatcaccaacttgcaaacagaattcataacacttggcacttgttctagagaagtgtagaggatgatgtttacataattttagcacctcaaggtataatttaaacagtgaggtagttttgaatggcatttcattaaggcatctatgggcattatgagctaaaagctgtggtatgttagctttaaaagagtatttatgttggaataatttttaaataatgtttacataactgtaagtcctgtttggttgttgttggacgcagggcggcacatgagtgtttttggttagagccaagatagctcccatgcaccggaattcctttgggatgaatcagcatcattttaaacaaagtatatgtaaaaggtgaaaggttatattttttacagatcagaatgtggcaccagaggactgtgtctcattaaagtgattgctgggagcaaaaactagaatgatacaaagaaaggtcagagaaatgcatgggaatattttttccttaaaacagaaaaaaattaaagtattattaataatatatgtctgtatatatgtatgtatgtaaaagatcagctgtcaaagccttaatcaatgcagtgtggaaaatgccaacccctggtcctcgctttactgtgggccctgcaggactggctctccatttcctgcctctcctttcaccaagctctgttttggcctttctcggccctggactgaggctcagcctacacgctcatattgtgcatatggcagaccctgcccagcgtgcgctttgatacagcaaatggagcagctgacctcatggctccaatcccacctgcctgttagggtagattccatttatctgatttttgtattttctgaggttttatttggtctcatcttgtctatgagagttgaaactggaactgggaaacctaagatgggtgttatggttctttctccaaggaaataaaaattctgcagttttaacctttagaagtctaagcaagattaacaaatttcatagaaaagtgggagggagtcagaaacagagttggtgctgctcagcaggacggtgaaacaatgatacttctttttatctctttagtatgaacattttcaaaaacacacagcttcaacaattgtcaccatatggccaatttgcaacaatgggactcttatgaaaaacctttatttaggccttctgtgtgacgtatccacagaaaagagaagctctgattcagctggggctagctgggccgctcctctggaagcccacacttgtggggacttaggcatgacacaggttcttgcaaagaaactagaggctggcttcactagagagagtccattcagcagaaagtcccaggcctctgccttcgtgcttccaattatcagtgacctgcctgcaagcatccccagaagcaaacagcagaggtagaagatatcactgcagcctgctttgtgctttaattgggtaccaagctttggggatgacagtgagttgcaagaatagttttagttcagagaattgtcttaggacaacaggctaatgaaggatttggggtctgggtttttagcctggctccgttctggtgtaacccggtctagcaaaagctaagcctggattgcagggcaggaaaaaatctggaattaactttagccagtggaatttcttcaaacagagaaagagaggctgttcattgatccactattccctctattttcctctaaggtaaatatttagaggtatttacctgtaaggtgaagtttcctttttatttctactttacaatttctctctaaagcaagcttgtccaacccttggcccaggacggctttgaatatggcccgacacaaattcgtaaactttttaaaaaacattgtaagattctttctgtgatttttttttttctcgtcagctatcgttagtgtattttatgtgtggcccaagataattcttcttccaatgtggcccagggaagccaaaagatgggacacccctgctgtaaagtttcatatcactcatgaattgctcagctgatttaaataatttgtaaaatcctgctaactagcaaattcacattgagattttctattgattgggtccctttgatagctttcagattggtattgttagcgttccatttgtgaacaaatgttcccttggctttagcagatgtttttaaagtttcttttgtagaccgaacttctgaagagtaataccaaatgcctaaaattttatttttaaaaaggaaaattgtttaaagtattatatgtaaacatatgggtattttttattttgtgtaattttacatttcatgaaatgatgtcagtttcaaagagaaagtggagaggacctaacatatgtctctacctagaacggatggtttcattaaagaatgtggatttattgatgtgtcttgggtttgtattgctaattcagaccagatgggtccttttagtgctaattttctccaatatcacaagagcttgggagagagtactaaaagggggcccttctctacagccttccactctctggttagtatccaagtactccagaacagagttcactaatggacccagaaagtcatgagcaaagctaaagatggctttcaaatttgttccctttcttacaccaaaacaagctgaaaatcttacaacctaattgtgaagatgtctgctgccgaaaccatccagatgtggtagacatcttccatttgcccctcagctcccgtcgccaccctcctctatctggacatttgtctgaggactacatctgacacccgagactgaaggttatggctcccagtaggtgaacactactgggagtgttccaggcctccccactgggggccctggaagttcctccttccactttccacttcaggcttaggggtggtaatgacaccctgcttgtctaaccttggggtactgcacttccctcaagggaaacctttataggtagtcattttaataaacacttttcaaatgtagtaatgagtgtacattacttgtctcctgcagggaacctgactgatacagggttatttctaacacaaagacagggactccatctgataagggacaccctcttcaggttgattagatgaagaggctttggggtatgtttggagttttgtgggttatattacagaagggtaattatacaactgtgtttttagaagcactcagattgctctcagtgcaaaatcctttaacacatgcagttgttttgtgctatacatagtctcaagattttgacttttctgcccatttgcagtcaccaattacatagagttgatagataaataattgatagatgataaatagatgatataggtagataggtagatagatagatgatagaaaaagagagaaaaagaaagaaagagaaaaagagacaaagaaaaagaaagaatgaaagaagaaagaacaaaaaaggagaaagaaaggaagaaagaaagaaaggaaagaaagagaagaaagacagaaagaaagacagacagaaagaaagaaagcaggctatagatcttcagcaaggtttatcttctatagctaacggtgagtcccagtggtgcaaggctatgaatgctggtatatcagtcagcataggctagcttatgctgcaacaactatcccccaaatctcaggggctttatataagatttatttcttgtccacactacacattcatttctggtcatctggaaactcttccatatcatcctcagtcaggaccaggctgatgaagcagcagcatcagaacattgctgggttttataatacagggaaagaaagggtggcacatgacacactggctcttaaaactacctggaaatgatatattacttctactcatttcattgatcacagcaagtcacatggatgtccttaacttcatgacaagaacaaggcaaactagcaacattggtgggcagcagtaatgactctcacatgtgacatctgtagataggaaaatgactataattcttctgtttgttctaaaatttcactttatccctaccttattattaacattttagataaagatttctaaaaattagaacaaggccactgcaacaatgtttgtatacccacaaaattcatgtattgaaatcccagcccctcatgtaatagtattgagaggcgggggctttgggacgtaattaggttatcaggctccagagagatccctcagcctccacgtgaggacacagagagaggacagctgcctaggaaccaggaagcaggccctcaccagacactgaatctcctggcaccttgatcttggacttcccagcccccagaactgtgataaataactttctgttgcttataagccactcagtctgtggtgctctgttttagcgtcccaaatggactaagacagccacctgtcatttagaatggtccagttttataagctgaccggttgttgcagggaagaccatccatgtgattgggcttgtacaaatttaaatggtgacaaaatataaatgatccgagattctcagagttggtggccccaatctttcacccactaagggcattccatctatggtttctaaggagatgattctcaggcccgacttccaaagaaggagagcttactcacttcatccattccttctcctttaggtaacaatgccaaattcattttgcagaaccacctcttcttccattggagggaccctcactggggggactgttagccaggtggtacatcatccttggccatatgaaccaagccagaccaaccaaatcctcttcctgggactggagtcctgatcagagaggcaaaagggctgagatattttggagctcagtttccctggaaggacacctctgaaagaccgtctgggagttgctgctgctgaaggtttgggagcaacctcactctgtccttccagagcctggttctctagccctctgtcctttctgagagctccactatactcagtcagtaagttctccttttctgtattgtattgtattgtattgtattgtattgtattgtattgtattgtattgtattgtactgtactgtactgtactgtactgtactgtattgtattgtattgtattgtattgtattgtattgtattttgagatggagtcttgctctgtcgcccaggctggagtgcaatggcatgatcttggctcactgcaacctccgcctcccaggttcaagcgattctcctgcctcagcctcccgagtagctgggattacaggcatgtgccaccatgcccagataatttttgtatttttagtagagatggggtttcgccatgttggccaggctgttctcgaactcctgacctcaggtgatccacccgcctaggcctctcaaagtgttgggattacaggcgtgagccactgtgcccggccaaattttccttttcaaaaaattaagcagagtctggttttgatgcttgtgactgggcagtcatgactgatggacacttaggcaggggtaccaattgcctgaagatgtcaacaattcttctaaagagataatgtgtccatcagaaggcagagttatggatcagtggatgcacagcaaacaaaagtgccaaaaaggacctcagtggccctccccatccacaaacagccttgccagagagtgctggggccataaactggaattctatggtccaggttgattctacgccagtcaaggaaaattaaaagcatcatttgtacgagctgtgctgattcaagtagtctaattgcataaattgtatcatccctgctttgtagattaaaagactcagactggaagaagttatttcacttgcctaagaccatgcagcttccagtagggcagctgtggctctaaacagaggtctctctagaccatgttgtcaccagtaggttcagtttaggctgtcactgtggagtcttggaaactggaagcccacaaggcagaggcctcattggtcttgtttaggatagcatcagtgtcggccatgttgcaggtggctgattaccacagtctaagaactgattagaacagcagctgtcacccctgactgctcgttagcgtcccctggggatgcccctgcctcactctgatcaatcaagtcagagtctctgggggcaggttctaggcatcaagagtttttataaccagccccctaccactccctaggtaattcaggtatgcaaccaggatggaaaaaccacctgattaaaggcaatctggtctccactgtgccactaaactgctcttgtcaaggccaccagcaaccccgatactgggaatcagaaggctcttctgacctcttcggaggctacctctcagcagcagttgatacaattaaccaacatctactccccttcttgaatcaaatttctttcctgtgacccccgaacttatctgattttcctgcctcactcaactctccttgctagtgacaccccctcttccaggctgctaaatgtctgtgaacccctggcagctgtcctggccctctgccctgtctacctgctcatgcacaccgggggctttaaaaccatccacaggccggcca

SEQ ID NO: 6828 - DNA, 24069 bp, Homo sapiens
ccaaacttctctgcctccttcccaacctgaccagcagtatggtggaccccctggccaaacttctctgtctccttccagccctcactgagaccatggtggaccccctggccaaatctccctgcctcatttccggcctgccccgcagcatggtgggccccctggccaaacttctctgcctccttcccaacctgaccggcagcatggtggatcccctggccaaacttctctgtctccttccagccctcactgagaccatggtggrcyccctggccaaayctcccagcctcatttccggcctgccctgcagcatggtggactccctkgccaaacctcccagcctcatttccrgcctgccctgcagcattgtcgactccctggccaaacttccctgcctcacttcccgcctggttggccccgtgatggaccccatgatggatcagtttgtctgcctccttcccaacctgtccagcagcgttgttgaccccatggccaagcttctctgcttcctttcctgcttgtccaataccatggttgatctcatgggcaaccttgtccatgccgtggttgagcccctggacgcctttgtccaactccttgccggtgtggctccccatgttgctaagtccgttgaaaaccttctccacttcccttccggcatgcgtgattccactgttgatgccatccagggccttgcccacctctctctctgcattgctcagccctcggttgatcccttcaatgaccttctcaatggggtcatcgctggcygcccatccagacagggcccccagtagcagaaggagggagcaggagcygaccagacgtgcaagatgcatattgctgggaaggtcgggaaggatgsagagaggagccagggaagccacgctgctatttatcctctctccctctcgccctcttctccacccctcatgactcaattacccctgtgaggcactgagttggtcttcagtcaaggaggtgtttcccagggagatttggagttgagcaatggagaggaggaggaagagagggtgagtcatggatggagaagaactctggcatctttgctccttgccctccaccccagagatgggtgtctgcccttccaaccacctcctctttcattcctcacccactgtccaggcctcctctctcgcaaacccaccttccaccacgctccatccctgggatgcaggcaattcttcaacacctcactcctctcaggcatctaagcctccagctccccaggcagtgaggggctagaatgatgggaggcaccgtctggagaggggagaacactaggtgggatgaaggagtcatcagacctcgttcttgtgggccagcccctgccctcactcattccattccagccacacaggccttctccctgttccacaaacacaccaagctcattcctgctgcagggcctttgcacatgctcctctctctgcctggaatgcagaacccagatcttcacgtggctggctcctcctcatccgtacttgacttaaatgccaacttcgcaagaaaacctctcctgaccataacatggcattaattatactctgtagtatcacccttttgttttcacagaaaaaaaaaatctgaaattacctttattttttattgcctgtctcacctactagcaatgtaaattggtcgtgttgatcactgctgtattcctagcttcttgaacactgcctggggttcagtaaatatttattgactggacaaatggatggattcgaacaggccaaggaaagagactccgagcccgagtctgggtctcacagggtgctggagggaagggcgcctgggtcgccagggcagcatagagtcccttgtggagtgccgcagattttggaggcaggatcccattcctgtcgcagaacccagacctcctgcctcccagcccttgggcaagggcagggggctgattgccacgagctggaacaggacgcagtgtctcctgaaaagccggttgaggcagccacggggaggggccgaagacccagggcagcaggagcctgtgagccagaacctgggctggggccaggccctcatccttcctgccctcccgacatggggcctcctaagccccaacctgaagccccaagtgttgacatattggctcgggttggaggggaaacagctgagagtctggcctcaggcatgaaaagggcatcggaaggaagggcaggtggtggtgggcaggcttggggcagcagatgcatctagaagccagttgggagggaggctaagaccagaacgagagccagtgggtgggtacagtaggtgcaggggtgaaagatatttgggttttggtgccaaggggagagactgagagaggggtggaggtgggattgctggtgggaaggccaggcaggaacaatgtgcagggtgtgagcagctggaggtggcagagctatgtgtgtgggtgcccaggtgtggcgagaatctgcacgtgttttcaggctttgctcaaacaaaggcgccaaggcccactcccctcagaggacccggggttcctctccagctcctggacacttgactccacccaaagacaggcatcccaggacagatatccagaagcttctgccttctctgggctctgcctatagagggtgactaagtgtgccacctctccaagcttgagctcatcaaatctgtttcccggtttcacactccagggacaaagccaaattcctgggcaaactcaggtgtggtttttctgccctggtccagggccgaaatgatggagtttcccataccaggaggtggctgggcagagaagagtgggtgatgagtgtcagaatcctaacccacccagagatcaagaggtgggatttctcccactttgaactgtgttccatcttctttttgtgtttttggagggagagtctcactctatcccccaggctggcatgcagtggcatgatctcggctcactgcaacctccgcctcccgggttcaagtgattcttctgcctcagcctcccgagtagctgggattagccgggcacctgccatgatgcccagctaatttttgtactttcagtagagacggggtttcaccatgttggccaggctggtctcgaacccctgacctcaggtgatccgcccacctcggcctccccaagggcagggattacaggcgtgagccactgtgcctggcctgaactgtgttccatcttctctatccctctccaccccatcctttcatcttctgccagcctcagtccctctcctctgtctctctattcccatgtggcacgattcgattcaggacttcagcatctggctccataactgagaatggcctggagttgtcctttctttattttatttattttttttatgaagtatcactctgttgcccaggttggagtgcagtggcaatctcggctcactgcaacctccgcctcccaggttcaagtgattcgcctgcctcagcctcccgagtagctaggattacagatgcatgccactacacctggctaatttttgtatttttagtagagatggagtttcaccatgttggccaggctggtctcaaactcctgacctcaggtggtctacctgcctcggcctcccaaagtgctgggattacatgtgtgagccactgcacccagccaaaatcagccccttttgaatcctggttttgttgaggttatatttttcacctccttgattgtacaccaaaatgtagctccctttgtttaattaatcatctgtgttttggtctcggttcgttaaaacctcctcacctgtacacttagtttactttcttctcccaggccatcaaagcaggagagcctcaccctgccctggtcccatggcaggtgcttggcaaatgaatttctcatggatgttggcggaaggaagaggttatgtcattctgccccttcttgcatccatccctctctgggatggtgactccttcctggcacaaacccccactccccctgaaccttggtcacagctgcgtgtcaacctgctgtgcaggtgatggtgcctgcctgtgagtcactgaggtgcaagcaaacccctaccccggggctgcaggggagggagctgtttgtccacttgttctttgtcagacgttcattgaaaacctgctttgtattgttctaagtgctggaggcacagtcgtgaacaaacaaacaagaacaggagccctgtgaggggcttagagcccaagggggagacatcgaacaaataaaccaatcagtagatcatgacaaactacatgaaaagctacaaggaaaagaatgggtgctgcgagaagatataacgtgaagagtttgataagattggcgatcagggccgggcgaggtggttcacgcctgtaatcccaccactttgggaggccgaggcagatggatcacctgaggtcaggagtttgagatcagcctggccaacatggtgaaaccccgtctctactaaaaatacaaaaacaaaaaaaaaattagctaggtgtagtggcgcacgcctgtagtcccagctactcaggaggctgaggcgggagaatcacttgaacccaggaggcggaggttgcggtgagctgagatcgcaccattgcactccagcctaggcaacaagagcgaaactctgtctcaaaaaaaagaaaagaaaagaaaagattagcgatcagatgaaacctgaggaattgacatttattcattcaggtatagtttattgggctaacgcctttttcagacagggtcttgctctgtctcccagctggagtgcagtgacacaatcacagctcactgcagccttgacctcctaggctcaagtgatcctcccacctcagcctccctaataattgggacaacaggcatgcaccaccacacctggctactttttttattttttgtagatacagggttttgccacattgcccatgttggtctcaaactcctggactcaaatgatcctcccacctcagcctcccaaagtgttgggattacaggcatgagccactgcgtccagcccacaaacacctttcaggtgccaaacacttttcttgtcaatgggatacagaagtgacatagatgacgtccctgtcctctcagagcttacagtctggtggacagagacagttggcaagaaaacaaacaatttttagagagacatgtgctctaaggaaaataaaaacatagacagtgtagccctagagaaattttgcacactgaagcataactcagaatggagaagtcagacaaggcttcctggaagatgggcagaaattgggaagggggtgacggctgacagtgacagagaaaggagggaacttagatgcagagtgtagaaagcctctcttaaagggtgggaaaccaagaggcagccaagggaagccctgggtgggccttccaggcatacggaggcagcaagagtcactccactggagaatccaagggacagcatggaacctgtgtgcttcaagagacagagaagaggaaagggctttcaggaacagtgtaaaaggtgggattccaggctgggtgtggtggctcgctcctgtaatcccagcattttggaaggccgaggtgggaggatcgcttgagcccaagggttctagaccagcctgagcaaaagagtgagaccctctctctacaaaaaaataaaaagtaaaaatagcctgcagtggtggctgcacatgtagtcccagctactcaggaggccgaggcgggaggatcgcttgagcccaggagttcaaggctgcagtgagccatgattgcaccactgcactccagcctaggagaaagagtgacaccccgtctcaaaataaataaacaaatgataattttaaaaagtgggattccattccagacggcagtgcgtggccgtggaacggtgatgcatagcgtgctgacgtcccatgcctctacggggatgggatgcgatggtgtcaggcctctggcttgggcgccgcccctcggcgacgtcactgggtactgtgacgtcactgggtgctgtgacatcagggcaattagcccaggacccacagccctggcsctccgcacgcacctcggtaacatcacagcaggtccaggccaatgataaccttataagaggccatgtcgaagcgcgacatcgtcctcaccaatgtcaccgttgtccagttgctgcgacagccgtgcccgggtgagggaggcagcggagggcgcgggggaggggtggaaagggtagtggggagcgtctgcaccctcacacctgtgccgtatccctaccgcccttcctggcgtgtgcaccatctagggaccaggggatcagccgctctccctccctccacacccgccagtgtgctggcagagtggggtttactgccatggcggggagaccgggcctccgcccccagggctgggtgggcttcgcgccgctatcacgcggtagaaagagcagaaacgagggccatcggaggctgcagcctgaaagtggcgggaagtgggcgggcttaggaggggcttagggagaacccaggggtgctgggcttccatgtaaaagtgatgttcatggcgcttcgcgtgaggtgagctttgccctccctgtgatgcacaaaacaaggacacttgsaaccttgccggggacgtgctsaccacttcgcaggcgagagctcagggaagcctcaccaccacctgagaaggccagagtgtgcccgcagtttacagagcggccaacagaggttaagagagggcaaactacttccttagtctctcaacaagggcggcgcgcccgcgmgygcgcacacacacacacacacactcactcactcactctagccggaggaaccaggtcttccggtgggctgcctccattcccacactgttccctcacttcccaagggcgggggccgcaggggtaggtggggctggggctttggtccaggagaccctggaagacacaggagcagacaggcttaccagcctcatgagacttgaacccctgccctgcgcatcactgctccgtggcctcaggcttcattttcccctctgtaaagtgggtttatagcgcatgcctctcgggattcagtgggaggacgcagtgaggagctgggggcagcacccagctagcccccaggcttttctccaaccgggggaccccacccctacagtggaggggaagagagtgcaaggctgggagtgctgggagaggaggaccatctgagttttcttcggaagggtcacccattgggctcagattcccacctgaaccaggtggacaaatcccctttctcccatagcagaaacaacccccaaggatgcaaacatcctcaagttcaccaataaacactaacaccttcatgaacttggacagccactggaaacacctatagtccagcctcaggccacaaggtctgtggcaacagggagaggtcagggagacagacaggccagctggcccccggctcccagccccaccaccccccaggtgcmtttgatttggtgccaaaaacttggactcccactacccccttccagcccttctccaccccctgctgtctccctttcctcaggaatctgtgtaggatcagacttccctcctctattaaaatcagctcctatgtgtgggcctcgagatctcactgcgccctcacagcagcccctaggtgggggatcagccccaagaggttcattaacttgctcaaatccacagagcagcaggtctgtgtggactgagccaggcttgactttccagcttgaaactctctgccaccaggtcccctgagtctccacttctcccctcttctcaagccctcctctgtagctcaggcggctgctacctccaggcgcaggtgtttttaagtgcagtctgggagcaggagtgtgtgtggagaggtgggagccaatgtgagcttccatgggtttcacagagtatgatacacrgtactctctaagcttccctgaggataagaaatgcctggagtgcttattttattttttatttttttttgggagatggagtttcgctcttgttgcccaggctggagtgcagtggcacgatctcgcccaccacaacctccgcctcctgggttcaagcgattctcctgcttcagcctcctgagtagctgggattacaagcatgtgccaccacgcctggctaatttttttgtatttttagtagagacggggtttctgcatgttggtcagactggtctcaaactcccaacctcaggtgatctgcctgcctcggcctcccaaagtgctgggattacaggcgtgagccaccgctcccggcctggagtgctgattaaaaacaggatttctgggcctccatacagacccactgagtccgatttttctaggaagagccctcctcaggtgatttttttttttttttgagacagagtctcactctgtcgcccaggctggagtgcagtggcgcaatctcggctcactgcaccctccgcctcccaggttcaagagattctcttgcctcagccccccgaggagctgggattacagtatttttagtagagaacaggtttctccatgttggccaagctggtcttgaactcctgacctcaagtgatccacccaccttggcctcccaaagtgccaggattacaggtgtgagccaccacgcctggccactccgacgactcctatcatggaacagtttggggaccactgggctaaatcaattattggacaaattcggggaacaatctacaaaatactaatgcatgtcaaacatttcctcggcttggtcataagcaatccatgtattacctcatttaatcctcacaacaaccctctaagaaaagtactattatctccccttacagaggaggaaactgaggcacagagaatgtcaccccaagcgatctatgttgaaagtacataccccggccaggcgcagtggctcacacctgtaatcccagcactttgggaggctgaggcgggtggatcacctaaggtcaggagttcgagaccagcctggccaagtgaaaccctgtatctactaaaaatacaaaaattagccaggcaccttggcgggtgcttataatcccagctactcgggaggctgaggcaggagaatcacttgaacccaggaggcggaggttgcagtaagccaagatcagtccactgcactccagcctgggtgacagagcaatactctgtctcgggaaaaaaaaaacaacggaagtacataaccagtgaattagaatctccaggaaagagcccttgggattgacattttaaacaagttcattctgtagagaaagtgggtttgggaaacactgggctaaatggttggtcacgaggggccaggagccagcaacagattctgggcagcaaagacagtttgttctctttcactttggtggtcatgcaacccattccctcccttcccccgyatagtgaccagagcaccgcccccacctgagcctaaggctgaagtagagccccagccacaaccagagcccacaccagtcagggaggaaataaagccaccaccrccaccactgcctcctcaccccgctactcctcctcctaagatggtgtctgtggcccgggagctgactgtgggcatcaatgggtgagtctactccagcccctgatcagtctgaagccttagagcccagcccctcctctggctgctaactgggggcacctccacatttccccccatcaatgctttcgttccgacgaccctggagaaatagcccggagcaaggcagacagggccccatgctcagcagcatgctggtggggaagacagtaatcaaataaagaaattagattgttcagtagagtgtgctgggaacagtgtagaatccagtggaaaagtcaggctggagagggcagcctttgccagtgatcagggaaggccttggggagaaggtgtcattggagcgggaccagagtgatgagacacagccagctcccagggcaccttgctggggaaggagtcttccaggcagcgggacaagcaatgattctggggcagaggcgagctcagtatgttcagggacagccaggaagtcagagtggctggtgtccaccaagcaaagggaaaaggagggaggccagtgagaagcccggagggggctgctacaccacagtaaggagtgtggatcttgttttactgatggacagtcgtggatgttttcatgccaagagacgtaatctgtcttgaagttttaagatccatccaggctctcacacctgtaaacccagcactttgggaggccaaggtaggagaatcctttgagaccaggagtttgagaccagcgtgggcaacatagcgagactctgtctctacagaaaaaaattgttttaattgtttaatgaaaaaataaaagatccatccagctacaaggttaagaataggggttaggagccaggcgcagtggctcacgcctgtaatcccagcactttgggaggccaaggcgggtctatcaacttgaggtcaggagttcgagaccagcctggccaacatggcaaaaccccgtctctattaaaaatacaaaaattagccaggtgtggtggtacgcgcctgtagtcccagctacttgggaggctgaggcaggagaatcacttgaacccaggaggcagaggttgcaatgagcccagatagcgccactgcactccagcctgggcgaaagagctggattccatctcaaaatatatatatatatatawgtatatatgggttagggaacggattgggagagggagctgaaaaagcagttaaaggggctggtgaggtcatcttggcaagagatgcccatggccagcacagaggttgttgccttcttcccctggattaaggattcccaaccaggctccttgagggagcctcctctccattacccccttctctcccatcccttcctgtctgtccctggccagatttggacgcatcggtcgcctggtcctgcgckcctgcatggagaagggtgttaaggtggtggctgtgaatgatccattcattracccggaatacatggtcagtagctrgcagagggcaggaacagcagggtgggactggggtgggaaagggactcagggaagctgtatggaaggctctcagctgtaatgtgagaccttcaccaaagaggggactctctagggatcctcaccctgccaccccaagactaggagccattccatcccccacaggtgtacatgtttaagtatgactccacccacggccgatacaagggaagtgtggaattcaggaatggacaactggtcgtggacaaccatgagatctctgtctaccagtggtaaggaaagcatctgtctgatgcacggctgtgacatattgaggcagggcatgtggaggtggctaaaatgggattccagcctctcacatggggtgctgaaaccacccccaaaattgcgtgtgcatgcctctaggtactaatttgaagagggaagtctcaggtccttcacccctaaaatgattaagaagcactaatctaaaaagatgcctcactgtactgaagaatgctttttctttatattttttttagggacggggtatcactctyttgcccagtctggagtgcagtggtgtaatcatagctcaccgcakccttgacctcccgggctcaagtggtcctcccacctcggcctcccaagtagtgggcaccagccaccacacctggcaaattttttgtagagatgaggtcttgccatctggcccaggctggtctcaaactcctggccccaagcaatcctcccaccttggcctcccagagtgctgggattacaggcaggagccactgcattttgctttaacgcacatttgcatgttttctcgtgggcatatcaacatgtccagaactcaactcttgattccccttcaacccacacctattcagctcccattgaccactgctggtcaactatgcctgaattccaaagggaggaaggtataatgaggcttgtgcgaacatccgaacatccgttcccatcatggcctgaaccagtgtttcagttttactttagaatgccctgggccgagagaagggctacattcagttagttgggggagtttagaattttatttttggctgacattcacctttctaatgtaaactattagcgactcctggctctgtggctgcctggggcttttacacayacacacccacaggcccacacacatgcaaatacacacaggcacactagtgaaccctgtcygggcccaggcagggtctgcagcctccccagcgcccctccccacagatctaatctcagcccttctccttgtacttactgggggtagggtgagtgataaaggggcagggatgggtgcaggaagtttgtgggcagggggcagagactggagagtcagtgaaaattgaagaaagctgcttaacccaagtttgaaatcatgacactagaaacaactccagcaccatagttatcacgcagacttcamcgtggccaccaccattaccgccacttggagtcatccctcttccccacctagctgccccctccgtccacggtcccgactcaggtcttgccttctctggtcacttgtgcaatgcagttccccgcccctccagccccctctccatccccgcactgttgggctgcacaagccaggctgtgtgcctgcactctgccctgcacctccgctagctagctgggtgaccttgggcaaggaaccaaacttgcctgagcctcagttccccgctgtatctgatggggatgatgagcaaacccaccacagcggtagctgggagcacgaatggagtgaacatgtgtttgtggacacttaaacgggcacttcccacaaggccatggccttgcacggagggctctgtcaactggtaccaccactgttgctctggcattagcaggtacaggccctgatagccattcagaacttcctttgaatgaatgaatggaatcctcaaaacagcctggtgggcaggaggctggggcccatgacagccttggggagggcctggggtcttctgggggcacagtctttgcctcaggccaactcagcaattgttgcagaggaatcgcaagtgtccctaatttggaaggcaggaaatggggggtatctgagaagagctcgttgggccagatgatggaaagtggactgacagagcaggagacaggaagaggataaccatgcatgtgtgatggctttgcagggcagcccattcattcattcattcaggcagtggaaacaggagtgcagacccgaggtgggaccagccacctgcactccagcaggctctccctctcactcccctcccctctgccctgacagcagtaaaaaaatgcaaaaaatgacagcggtagcacttcctcatcgggttgtgaaggttacatgagtttaatgcaggtaaggcacttagaatatgggcacaggacaggtgttcagtaaacacgtataaaatggctaactaaaaaaaaaacacgaggccaggtgcagaggctcatgcctgtcatcccagcactttgggaggctgaagtggggatcacctgaggtcaggagtttgagaccagcctggccaacagagcaaaccccgtcaccactaaaaatacaaaaaacaacaacaataaaaaactagccaggtgtggtagcgcatgcctgtaaccccaactactcgggaggcggaggcaggagaatcgcttgaacccggaaggtggaggttgcagtgagccaaaatcgtgccactgcactccagcctgagtgacagagtgagactctgtctcaaaaacaaaacaaaacaaaacaaagaaaacccatgaggccaggcacggtggctcacacctgtaatcccagcactgtgggaggtcaaggatcacttgagcccaggggttctaaagcaccctgggcaacaaaagtgagaccccatctctacaaaaaaatttaaaaattagcttggcatggtggtgtgcgcctgtagtcccagctactcgggaggccaaggcaggaggatggccggagccaggaagatcaaggctgcrgtgagctctgattgcaccactgcactccagcctgggcgacagaggaagaccctgtctcaaaacaaacaaaccccacaaacattgattgaaccccccattgaggggagcaggctcaatggcaaaggaaacagaccgacactggccaagaatcacagaagcaaagcacccggttactcatgataaacctgggaaggaagaaagtggaacagtttattcacttaatgcttgtttgctaaagccaagtagaaaacggcaatactagatgtttagtgtgcttcaaatacaaatgtttgtcaaaataccaagtaaaaacataaatttataaaacaggaaaccagaaacctcccttacctttccaatgtaaaccatgagccactgctgccccaaggctgcctcaggcttcaggagtcctccaggagctttttctttaatgcagtgtctgttttcagggaccctcctggcctttggcagccagcttcctattgcaggagctgagggtctaggagggttcatggcgaggttgtcagagctgggaagcagaaagcagccgggcaggcctcacagtcacagagtccacgtcccgggcagcatatggagaaagggtctgggctggctgacagcagtcagcattggcgcctctgaggaggttgagggctgagttggggaggtcaccacctgtacccaggcataacaggggtggtgcaatcagcaaagggaaagtggtctgaagtggggcagtggtgaaaagctaggccagcggggtggagcccatctggaacaagtaggtgtgtggggtaggggacgcaggtggttgcaggtgggccggtacctgctcagcctgtcaaatggtgaaagccatggactatgaaggtggggctcaagcaggggagactgactcagccctgccacttccccacagcaaagagcccaaacagatcccctggagggctgtcgggagcccctacgtggtggagtccacaggcgtgtacctctccatacaggcagcttcggtaagctggggagaggtgcccagggctagctggggggatgatggtgccagaagcccctgacacctgcgcttcctccccaggaccacatctctgcaggtgctcaacgtgtggtcatctccgcgccctcrccggatgcaccaatgttcgtyatgggtgtcaatgaaaatgactataaccctggctccatgaacattgtgaggtaatgtgggcagtgacatcctgcaatgtgtggaagggagggtagactcgtcctccccaccctcagccccactggattcctggtcgcttggcttctgcttctccttcccgaaactatctgctaaaaacgcatgacttccagaggacaagcttggggagcctccccagctgcacctcagtgcctccttcagtctgacagtgtccccacagatccctctcaccctcatcctgacgtttcataaaaccaagtctgcgtgcataccccaagaggggtaagggtggaggggtggctctgcgactcacctcacagtgtccrtgcacaccttggctgtttcagcaacgcgtcctgcaccaccaactgtttggctcccctcgccaaagtcatccacgagcgatttgggatcgtggaagggttgatggtgagttgaggatgaggggctggggcaggaaggatggcagggaaacccaacttcttcccgggccttgcttactgtatggagttaagagggagagactggtttcgggaggagaggcccaccagtgcagaagtcacttaaaacactgtgcaaccctcaggcaaggctggaccctggcctgcacacatcccctcctgtggtctgtggtggtggccccaccagcctycacacctaggccaccaacttagtcctggaaaaaagaggcatgggagcttaggagcatgaaggcctcatcttggtccttctcttccccaagaccacagtccattcctacacggccacccagaagacagtggacgggccatcaaggaaggcctggcgagatgggcggggtgcccaccagaacatcatcccagcctccactggggctgcgaaagctgtgaccaaagtcatcccagagctcaaagggtatgaggacaagaagctgcaaccagggtgggggcatacgccaggaggactggactggcccggccctcagtccttaagaggaaagcaggggcctggcccagccacagggaaagggggaatggagggcaacgtccctaagttctgactcctgttcctcatgggggattctccaggaagctgacagggatggcgttccgggtaccaaccccggatgtgtctgtcgtggacctgacctgccgcctcgcccagcctgccccctactcagccatcaaggaggctgtaaaagcagcagccaaggggcccatggctggcatccttgcctacaccgaggatgaggtaggggctgaggagaggagaccctgggaggagccctctgggaagggacatgatttccacttgccagggagctgctctcaatgtgccaagtcagaaactgcagggcaggaagggagatctccctgcctcagggcctttgcacttgctgttcctttagtctggaatgcttcccttgccaggtgaccatacagtctgtccttacttcctccaagtctctggaggaacctccctcttcagcaaggcamcccctcaaaatatgttctttttgtggccatattcctcacctgaaatttcatttcatagtcactgttggccccagtggtgtgtgcactccaagaaaacagggatttaggggctgccttttcacttttgtggctccaacctggcatacagcaggtgactaatacatgcttagtgaacaaaagacaacagctcccatttttttcaatacttgctcagggccaggccatggccagatgccttctctgtgaggagtggatgccatggtcatggtggacccctgtacatccaccttggtgctgtctccctgcattaactcctgcaggtccactttcccacagtcactgggatcttttgttttaatggaatcacattgcatcacccgttttcaggattgaaaacactcctgtggcctttcatgacactagggctaaaaccctcaggtcctcccttcctgcagctccttctacctcagacactgtgctgagggccccagccggtcagatctttctagtcatctagacccaggctsatggccacccctcagagaggccctccatgctggcccattccaaacgcttgcattattcctaggaaagggatgtactggtacagcatgagggtgtttgtgacctgtgccctttggccagaccctgacacagtgccttggtcataccctgcacttggtcataccctccagtccagagactggacacagtagggctacatcaaatattatagatgaatgcatggatgggcgatagagttaagagtcggggcctcagctcctggaggtccttgctctgccggacacacttatctttgaaattctgacttccasgtcgtctctacggacttcctcggtgatacccactcgtccatcttcgatgctaaggccggcattgcgctcaatgacaatttcgtgaagctcatttcatggtaagggggaaggagctggagacttagagggaggggaactaaggggtggtcggaaggaacccccttgaacctcccgacccctcctccacaggtacgacaacgaatatggctacagtcaccgggtggtcgacctcctccgctacatgttcagccgagacaagtgaaacgggaaggtcctttctttccttcccaggggccggggccggaacatgtgcctcccgttccagcatctggctgcccgggggaggaaggacacccggggcgggcgccccacgccgatgggtccatggtgaaataaaaaacagtgctcacggctgcgtcccgtatctctgcgccggtcagggcgggttctgatccgggtttgaggcccgccccacccttactcgatcgcctgcgcccacgggcgaggggtcgcgctcgactccaagccgggttccacttcaggagaccgggaccgcgatggcagcggtagaggccccgcatggccggaagtcactccccaaagcgctgggccggcagcggtgggacccagggccggccacgggctctctgacgtcactgggcgcgacgccccgcgccgggactactgctcccagaaggtcgcgcgcgggcccccgccagtcaggtgggtgccaggccctggccgtggcgaaagagccggcggagccggagacccgctcccggagacgccgcctcgcgatccccgcgcgggcgggaccgggcggccggcatcatgaccctgtttcacttcgggaactgcttcgctcttgcctacttcccctacttcatcacctacaagtgcagcggcctgtgagtgcgggaagggcgcggggcggagagggcgcggggcccgggccgaccctcacctcccgcttctccaggtccgagtacaacgccttctggaaatgcgtccaggctggagtcacctacctctttgtccaactctgcaaggtgagggccaccgggaagccacgtgttctggcccccaggctctgcagacccagggacccgcccccgttgcctatccgcgcccccgccgccccacggtgggaccgccctcgggactccgcactgggaggcgtcaggatacctagagaggatggactttaaagagggcacgacctgagaagagacctagaagcaacttttgcgtagcacttagtaaaactgagaaaacctcagtagtgtggttggctaacaggttttttttggtgcggttaagagtgatcactgattccgtacgtgctgctaacactgcccaaggagcagcaccttcagacctgactcagatgccctgtgatcacccagaactcaaacttccagccccctcggggacccggggacctatcctctatctccccgattcctgtaattttgccaccatctggtggttcctcttccagatgggcccccagaacctgtcctgccctcttcctacccacgaacttcccacaaatcccacgtggtttatcttgatcccctcaccttgaagtgacctctttctgctttctgttctcagatgctgttcttggccactttctttcccacctgggaaggcggcatctatgacttcattggggtgagaggggccagggaagggaagggagytcaggaatggggctccctgtccccctgtgcttacttaagcctcaacctgacccgcaggagttcatgaaggccagcgtggatgtggcagacctgataggtctaaaccttgtcatgtcccggaatgccggcaagggagagtacaagatcatggttgctgccctgggctgggccactgctgagcttattatgtcccggtgcgtacagcagcctggagcccagacccctgagaagggacacctgggttccacgggggtgctggagggcaggggctcaaagcctggtgctgaaggtgtctgagtactggagaatcccatcctttgccttcctcagctgcattcccctrtgggtcggagcccggggcattgagtttgactggaagyacatccagatgagcatagactccaacatcagtctggtaggcagtcgtgctctcccacatacacatttctgctggcggccatactcctccccaaggcctggccccgactttctgcctccctctaggtccattacatcgtcgcgtctgctcaggtctggatgataacacgctatgatctgtaccacaccttccggccagctgtcctcctgctgatgttcctcagtgtctacaaggcctttgttatggagtgagttgggtggggtttagggctgggtccaaagtggggtgggttatctagtctcccttccttaytgtgacattttccygcaggaccttcgtccacctctgctcgctgggcagttggrcagctytactggcccgagcagtggtaacggggctgctggccctcagcactttggccctgtatgtcgccgttgtcaatgtgcactcctaggcttggtgtctcagacattgatgtaccttttccctgcctcrctccaggttttagtgaagtaaacagtatttggaaagttgttgctgcctccatttctctctcttgggaactgtctcccaataccgtgtccacctgggtctcagaggccctggttctgtctcaggagccaggtagacaagctggaagctagccagtcactgacttgtcccatgtcttgttcctcaggctcctggtttgccaggagtagacagaaggtttggatgatctttgagcagtggcagaggccagggccctcagggaacagatgatagaggggagctagaatccaagagaaggcccttggggggctcttcctcctcacagccccaacctgggcctcctcacatgggcccttcccgggctggttgcctctgaggctcctggccccagtgtccccctccaatccatcctctgtatggcagccaggggatctatctgaaacccgtctaaccaggtcatcctcccacttgcagccacttgcggccccttgttacacagtggacagtccaattgcttggcctttggttttacccaaccagcaaaaccagcttttctgaaactgctccctagaataatttgtccagccagattcttaacatcgttcaagccatggggtcagcatggggctggggggagagttgtgactgtgagctcctcagttctatggccctcagatcagatcccagcctgagccttctcagggtggagtggagagacagctgcagccaagaagcagagcagtggggcccccagcttggacattgtcctggatgcccccctccaccctcagccttccttggtccactgaagccggctccccgcctttctctgagggggatgtgtcagaagttttgaatgtcatgtttaagctccactttgatgtacaccctccccactcaggaagatgctccccatccttggtgttcccagtggggtaccccagggagtaggatagcaccattgcccctcctcctccaccaggccgttgaagttccacctgattttttttaagcttaggcctaggaaagctcactatgaccatctcgatgtttccagagggagcatttgccttcagacggcagctgccatctaggccactcttcctcattgtttggagtaaagacagggtccatgggtctcttgggagctggaagtgattgatcaccttgactttgatgtagaaaggaagtagatggggcagtctatctgggtggacttgtgacaaggtcactttctcccacacttccatgccccacatagctcttcacacatattgagacaagtgtaggatgcaaaattaccaactggaataatcccagcttacatggggttcagggagagagactggagtggctgggcctgagttggcagaggacggtgaagcctgggcggttggactgtggggagccaggcttcaggtgatcggggttatgatgggaaaaccccgggttatggggacccagaggagccgcctggcctgccgtggaagcagtgcgggctcccctgagcagaggacatgtgagctgagacctaaagaatgagtgattggggcaaggcagaggtaatggtcttgaggtcagagagggggcctgtttttcccaagggaacataactggttggaatgagttcaaggggacttgtaagactacagaagctggcaggggtcagatcacaggaggctttgggaaccaaggagagctctaggcagaggaaggacagggtcagatttggctttaggaagctctgcatggctgttgtctgaaatgggaaagctgaggccacgaggccagggctggaccagggcagggctttgtggggttaggagagtgactagaagccaagcccaggtgttggtgatcagtggctgtgtgtatttatttaccggcagggggcgctaacaggtaagggaggagcaaagagttccaggataactggagtttggggcttgtaagcccgagggctcaccacgtttccaagggagaagggaccacactgatgggacagtgggactatcagattgggtcagtgcatgggtacaggcatggggggtgatgaagaggccagtgtaggtcaccaacactgggggaagctggggacagaggtgggtctcactgcagaaacaactgaagccatgggggactggggggctgtggtcacaaggaaggagaagcccaggccctagccagagaaagccacataagaaagaggaagagaggtgaacagaggggctgggaaaggagcggcagagatgggaggtagggggatggggttaacctttcaggtgaggggtgtgaggaggggacctccaggagttgttcaggaactggccattgccgggacagaggagtaagcaggtaggctcagaaaggagacaccgctggggggtgggggatgcttgatgtggaaatgacttgggcccccttgtgtctgggagcctccaggagggagaagggtgctgagaacagagaaagcccagaggtggtagggggtgcctatcgccacggcccagcttgcgtttagatgccatgaccctgggcaaaggaataggaatcatttccccaaggcaggtttattgaggacctactatgtgccaggctgtgtactaggcactggaggtgcagccctggataaacagcccccatgtacaggactgtgggagatcacaagcactaatgagagacgctgaggacagtgcctggcaccagatacagcacagtcagcatgagctggttttattaccatcgcccaggacacaagcgtgtctttaacgaagggccctcaggcagccgtccagcctggactggagtcctaagaacagaaacaccctccagaagcggtcagctgtactccctgtcagagccccaccgccaccacaggtggcggctttcccgaggccagcccagaggactgcccaggcgctgctgctccaggaggtgcgaaccttgggaatgggggaggggagtgggcaggtccctccaagtttggggtgccgtgggctacagaagcagatactggtggggctgggactcttggttgctcagatatcttggtggctgtccagagggtcccacgagccctgcccccacctgctgtggcagttgcagggatgcttgaaggcagtcgtccctctaatagtagagttcctggtcccaccagcctgggagagagagggagaaaggagactcagtgctgggggtgccacttaggcagggccaggggctcagaggtcagtgctggttgctatggagggtcaagggcttagaggccaagtgttgaggatcaaaggtgggtgcagctgctcaaacgtttcagtcccctgcccccaggctcccagtctccacactcactccctgggcaacagcgaactccaagcttccggatctcatcatagacgaagatgaggatgccgtagggcagggggaccagccaccactggaacctgaaggcacatggcaaggtgaaggccatcccaggcctgtgccctacagccccctccctgtccttgcccctcacagcctctcaccgaatgggcatgaagttgaagatgttgggcatgccggggcagtagcacaggaagcagccgatgcagacctggaacacgatggcgatcaccaggatcttattcctgggggtgggcagaatgggacaggccattaggaattggggacgtgatggaaatcaggatactgtgggtcaaagtaggtcagatgtcagcagcagcagggaggtgttctacacactgaacactggagtggcccgggcctctcagcaccacccctttagtgaaatgtggagggggccgtggggggagttattggccagttagaaaggtttttttggcatgtcaccatctggcactggcacccgctggcatttgccggctgttctaaaccacagtcaggatctgatgggagttgggaccaggggttggagggcaggaagagggccagccagggacacctgaagaagccttgctggaaggcagagagacggcgcgtcttgcggatgaggacatcggcgatctggcy

SEQ ID NO: 6829 - DNA, 230101 bp, Homo sapiens
  misc_feature (1)...(230101): n = A,T,C or G, or insertion/deletion polymorphism (see Tables 1-2)
caggctggagtgcagtgggagccatctcaactcactgcaacctctgcctcccgggttcaagcaattcttctgcctcagcctcctgagtagctgggattacaggtgcacacgaccatacccagctaattggtttttttttttttttttcctatttttaatagagacagggtttcgccatgttggccaggctggtctcaaactcctggcctcaagtgatctgcccgcttcagcctcccaaagtgctgggattacagacgtgagccaccatgcccatcctcctttggtttcctcttatcctcggctcctctgggcatttcctcttgagcctctcctaattttctgttccgctttgatgcaccccccggcccacccaagctcgccttcctatccttgttgatatttgcatcttgtccttcgtgggattccaggtacattcttggtggacttggtggtggttatgtgtgcggttggacggacagacttgcttttagcagccacttgtccttgctggcagccactggtatttatatgtctgtccccagtgcccaacrtggtgtctggcataaataaatcagatgttccattaatacacacacaagaaaactgcatggtatcagcacttatctgtctggcattagttttaaaattgtatgtgtcttagaatttgctaagaaaagtttactgtaagctcttgaggaaagcttttcaggaggaattaatttggagaaaaatgctccatgcctaggagtgttgagtgctcacagatgacactgtgtggggtccctgccactccctagtttagttttatttcttttcattgccccttccccacaataggtgctcagttattaaaaatcgatgatttaagtaaaaatataaaagtcatagctgcattatgggaaatgtggataatgggggaaagggaactgtaattgactggttagggcgtggtttctggagccagttgtgtgggttcaaaccgcagccccaccactagcggctctgtgatgctgagcaggtgacttcatcccttaggttgcttatctgtaagatgggaacagtaatataacctacatcctagagttctgaggattaaataagtgcatgtttattatgtacttagtaatcactgtaagtgttggtaaaataaaatgatcgtaaatgcatgcttaccatgctaacacttccatttcttctctttggagcgacagaagctcctcctcttaccaacaggtttaggttcccaagactgctgagaagtccattcattttaactccaaatcacctaaccaatgaccagtgggttcacatacacagaatttttttttttgctccgactcctaggctggagtgcagtggcatgatatcagctcactgcaacctctgcctcctgggttcaagcaattcttgtgccacagcctcctaaatagctgggattacaggcatgtgccaccatgcctggctaatttttgtatttttagtagagatgggtttcaccacattggccaggctggtctcaaacacctggcctcaggtaatctgcccaccttggcctcccaaagctctgggattgcgaaccactcccctggcccacatacgcagaattttaattttttccccaccataataagcttctgtctcttctcactaggacactactattgcttttgtacttactggacaagatggagttgtgttctttaaatgtctcgaaagtaatcacatacccacaaaatacacacatacactcagcacagggaagccgtccctgagcatgagccatcctgagatggccaggctgaaatgtggattgtgaaacactgctcgctttttattattttttcctggattgtggttttgctcttatctatgaaagtttgaaatctgagagcttgtaaggagaggggcttttttttgttatgtttttttgagacagagtctctctcccccaggctggagtgcagtggcacgatctgggctcactgcaagctctgcctcccgggttcacgccattctcctgcctcagtctcctgagtagctgggactacaggtgcccaccaccacgcctggctaatttttttgtatttttagtagagacggggtttcaccatgttagccaggatggtctcgatctcctgacctcgtgatccgcccgcctcggcctcccaaagtgctgggattacaggcgtgagccactgtgcctggccagaagaggggctttcgtactggaatccctccctgccttagctcgtttgagtgttctccctgtgccctttccgtgcttgtactcctgtgtccatagctctaagcttttcatggagctgtgttttttgttatgatcattgtttttggggctccgtcatatgccttcaaggcccctttctcctggatacattctggcattttctcctccctttttcttccctggtttacctttgtttgctccaagtgtttcagttcctacctttttccttcagttgcacacccttctcccctccacattcccggtattttccctgagtgatcactggagggagagctgggagagctgagcattccacagtgggctgccaccctccgctctccaagcccatgccacctgtggcttctggagtctgtggatgctgtctctcttcctcagtgaccacgtgatcctgtcatctcataaccgcgcttccttacatggggtagaggtgaggggtggagggtgcatatcttaccctttgtaatattccaggtaccctctgaacattctcagtggacgcttgggtatttggttggatggacacacttgcttatcaacaagtagtttgtttacrgagtgcctcagtgctcgctccctgcatgccaggggcaatccaggtgaactgggggtcctgctacccactgtaagctccaggtgtagcgcagaagaccttagagtgcccttggcaggcagcctttcctctgctgtgtgcagctcatgggaggaaatctctggaaccttctgagacaaggtgtgagcaggtcagttcggtgttaggtgatgtttagttctgtggccgccaatgcagtgggttgattgttgtgaaggaggtagttcctacgtccagatttttgtgcccctgtcatcacaggaatctggaaggattgctcttagaagaatgcagctctgtccatcattcggagggttcttttagcaaactgatacccacaggggtaaaatgtagccagcctccatagtaaattgctcagtttaccaatgtcctccgttaacaacaacagcaaaaatcttagaacccctccagctgttaaaaggttccttcatttagtgtcgattccagctaagctttcggaaactaagctcattacattgcagatgattcactggggatataagataacttcatttttttttattaaaaaaccgttattttcattattaaaaactgttaaaggatttcactatttaaaaaatttcattttcattatgaacgaagcaaactcagtttgtattttggttcaggtcgtttctgtagataccgtattttcttacactacctgccttagatttaggcatctagagggccacggttaagattgtgctcactcgcttcctccgaggtgccccagacggtgccacagtgagcacgtcatgtccatttctcttcagggatggtacttatttgtcctttctgtggttgattttttttttttttttttttttttttttttttgagatggagttttgctcttgttgcctaggctggagagcaatggcgcgatctcagctcaccacaacctccgcctcccgggttcaagcgattctcctgcctcagcttcccgagtagctgggattacagacatgtgccaccatgcctggctaatttttgtatttttagtagagatggggtttcaccgtattggtcaggctggtcttgaactcctaacctcagatgatctgcttgcctcagcctcccaaagtgctgggattacaggcatgagccaccgcactcagcctttctgtgattttaaaacaagctgaagaaactgtttaggacctagtacactgcattttacccatagctctcacactttaaatcaggaaagtcctggtttaagttacttgtatcactgatgttgacttctacgcctcaaaccttgtgcccttatttttgtctcagaaaacataaggccctgtgctgagaaagtgagggagcgataatctcgcattgacaggggccttctctgttgcactgtcattcccttggcttagtcaagaacttatctttgtagtagcaaaatgcctagattgctgtttgccgacccactccggatagttttatggttcattctccgaaacaggtattttctttctttgtactgtggttgagaagtagcttcctgtcctctccacagtgtctggtatagtacgttaaatacaacaggtggatagctcaatgcactttgaattaaatttcagtgctatgtacctggtacatttcccatctcttcctacttgttcctggcatgagtttccagctttttctctcccattgcacaaatgagtaacatgctctttcatgaacctcctgttttttgtttatttagagatgggggtctcaatacattgcccaggctgaccatgaactcctgagctcaaatgatcctcccgcctcagcctcccaagtagctgggatgacaggtgcaggtaggctacccactgcacctggcatgaatcttcaattttgacaaaacctccgaatgttttttaaaagatattttaccagtatgtgagtcacaaaatatcccattgatagatacaggtgcattatattcttttgtttcttcatctctactttcctgttggctgatttaaacttctctctatgtgtgacatagaacattgaatgaatgagagaaacaccatgtggtcgtggtggtttaaaaacaccatgtgagctgtgtctgagcatcggagccaggtatggctgctcgatggttaacgattactcctggtatctcctgggccctgacataaaggagctggagagtaggattctgtgggaaccagctctaatgttgctgctttttccagcagtcttattagaagacaagcggggaatagcagtgctatcgtagggaaagtcttgtctccatttctgctttgtgaaaaagcacattattgacaaacatcgatactttaactggttttggtaacagatcatgtgtaacacgtgaggacttcttcctgaggcagggcactgcgtgttgcagtacctgcgcgtgggatgctgaggttgtgtggggggtggaggttgctgctacatagcttcaaggcggggggagtgtcttaccaatgttgccatggtggatcgaggactgaaatgcaagtttctgttcgtgaaatatgtgtccatcttagtggtgataatgacctctagaacacggatggttttgctacgccgagacctttattgttgacctgtgtagagatgtactcattagtctttttaactaattaattaattttttttttgagacaaagcctcactctgtttcacaggctggagtgcagtggtgtgatctcagctcactgcaatctctgcctcccaggttcaagcgattctcctgcctcagcctcctgagtagctgtaattgcaggtgcatgccaccactcctgactcacttttgtattttcagtagagacagggtttcaccatgttggctagggtggtctcgaactcctgacctcaagtgatccacccacctcggtctcccaaagtgctaggattacaggcatgagccactgcacctggcctcagtgtactagaatacttattcctggtattttctattacaacattatgttgcatcttgaaagttataatgaaatggtagtggcactaataaggttttttttaaaaaaaattaaaaataagtgaatatagtcaatatgattaaactgctctgatttttttttttttgattgctcttaggtaattttttctgcaggatgaattaagagaagagacacttgctcatcaggcatggagagcactttgtcagcttccaatatgcaagacccttcatcttcacccttggaaaagtgtctcggctcagctaatggaaatggagaccttgattctggtaggattttgttttcgagattcatctggatttttgatgaattgatcaatatcttcctgaaagtattcaggaaacaatggggcaacatttgtagatctcacatactgtctggttcctgggatttgaagtcctatttataaggatatggccgctctaaaatttgggtcaagattcttattttgaatactagacagagaggactaggttatagtgcagcaacacatcacttcagaatctcagtggcctgggcaggaaacgtctacaaatcacygtagcatggagtcgttgtgcaccatcctgcagggtttgttgtgagtgagaagagcagggttggaggtctcggaccagcagtcatctgctctggctcgcaagagacaaatgccatttttgctcagaaccccttgacaggaagttagttgcatgtttctgccacagcaagggaggttaggaaaaagaattccctcccaagtgctggagagagagagacaggacatccagatctgcctacgtagtagatgccgatgatacagcatctaatatgttgagcacatctgtcagaaaagcatacagtgtggaaggaagtgaggtcatgcggattggtggtgaagtgcgtctcccttccagaaatctgaaaaacagaacagctccctcctcggactcaaacacagccttcgattcaaatgtatgtatgtatgtatgtatgtatgtatgtatgtatgtatgtatgtgtgtatgtgtgtgtgtgtgttttgagacaggatctcacctgttgcccaggttggagtacggtggtgcaatcatggctcactgcagccttgacctcttgggcccaagtgatcttcccacctcagcctccacaatagctgggactacaggtgtgtcccactgtgcctgctgacttttaaattttttgtggagatggggtctcactgtgttgtccaggcttgtcttaaactactaggctcaagtgatcctcctgccttagcctcccaaagtgctgagattataagtgtgattcaccacacctagccttgattggattttaattatttaactaatgaagttataaatgcataaatgtatctttttctaaatacttacacaataaagggtttatttagaaaggatacctttaaaaaaaaaaagggttgcattgtttatacataccagcaaatgacttaaggacagtttagtcctctgagttgtaaacattagctatggtgaattcctataaaaaatgttgcgcattaagttagcaggtcacttgaccatggtccaaagaagtcacaaagtttgtcttcacattttgatgagactagtcaatgacagattacaggttgctccatatcattgaatttattagattaagtttatgaaattacatctttatatggaagaaaccctggaaaaccctcacatgagggaaggccttactgtgttgaagggcgttagtatctgtttccaaatcggctcatttgtccctctttcagatttttctacacataaaccagatgggagaagacttctcctgcaagtaaagctggatcattgttcctccctggaaacatggaaattattttctgagaaggcatagttgtataggctgaaagttcatcctaattattctactttatttaagtacagatttccctttttaaaaagtctttcctatgtttgctgagtgaagttatttttcaaattctggagttcctgagctttcagggtatttttgtagtatatcatctgcacacatccaacgtggattactgagttatttctcatgatatgttttggaaactgtttaaacaccaactgtgtattggcttttcatgtgcacacggttgcagtgtatctctctaacttaagtagtttctgaaactcattaatgataatctggtgtcgggaaaatgatttgtaccgacatttcattaagggtggctgtatggatggcaagtgtgagagcgagaatcattatatccttggctgggggagtccatgcagaaaacccatgtatactcatgttgtgattggttccttgctcttgcatcggggatggcctaaatcatacaggatgttcagatctttaatggaaatactatttctaaatggctctaaatgatcttaacatttttcagatattggctcagatttttctccacccccatgtggctaatctgtcctttcgccttgggatttctgtatttacttgtgcggtgaggagagttttagatgacgatacagactctttaaagaggacacacatttaaagcagagtctaagactttgcagaggacagtggctggattcacttgagaaactcaaatctagttttgagcattttcattccacaagtagcttattttttttttactaaaatctagttttgagcattcamactattaagtatgattctacaagtagtttattattattttttccaatctgctaacccacaaaatatttccagtcctggaatcacttggtgagatatttggttctgggaccagctgggacaggtttggggctgttgcagagtcttagtgctgaaggtcttctcctgggaagcattttcagatgggacttactcatcccacgtacaggaggaggcaaacccagtgttctttagctggttctgaactgactcgcgatgataggtgtatgagttcagactgtgtggcaggcacagaaaatgttaagttctttgcgtgtgttaattcacctaatccttcaacagcccactggcattcaacagcccactggcatagctgcttttattgccccactttcacagatgaggagactggacgacaaggtgaagtgacttgagccctgtgttagaagcaagatttaatttcaggcattgtgaggctgtggagttggtgctctgaaaccctggggggcacctgccccttcaagtgcacagatgagtcatcaggaaatcccaacagcctcctacccacccatccatacactcacacccacactcacgcccaccccacagccacacacacccacactcacaccaccccacagcgacacacccacactcacaccaccccacagccacacacccaccccacagccacacacacccatgcacacacccgaccatccacccatccacacatacacccacacacacccacactcacacccatccatccacccatccatccactcaacccacactcacacccaccccacagccatacacacacacactcacacccatccatccacccatctatacatacacccccccacacactcatacccatctatccacccacccatccacacatacacccacacacacccacacttacacccatccatcacccatccacacatacacccacacacacccacactcacacccatccatccacccatccacacatacacccacacacacccacactcacacccatccatcacccatccacacatacacccacacacacccacactcacacccatccatccacccatccacacatacacccacacacacccacactcacacccatccatcacccatccacacgtacacccacacacacccacactcacacccatccatcacacatccacacatacacccacacacacccacactcacacccatccatccacccatccatccacccatccatacactcacacccacactcacacccatcatccacccatccatacactcacacacacccatccacatacacatgcacacacacactcacatccatccatccacccatccacacacacactcccacccattcacatacacccccacattcacacccacctcccccccacacacacaaccgccccccccacacaaaattttgggggtacagacacaacttagattctttgttgttctttcctactctttcctcccgtgccacctcccctgtgtcccgtgacacatttctacaggggttcccaaccccccggccacagattggtactggtccatgggctgttacgaactgggctgcaccacaggaggtgagtgtcaggtgagggagctgagtttcatctgtattgacagctgctccccattgctcacattactgcccgagcttcacctcctgtcagatcagcagcggcattagattctcataggagtgtgacccctattgtgaactgcatgtgccagggatctaggttgcayggtccttatgagaatctaatgcctgatgatctgtcactgtctcccatcacccccagatgggactgtctagttgcaggaaaacaagcycaggattcccactgattctatatcatggtgagttacagtattatttcattatatagtacaatgtaataataatagaaataaagtgcacaataaatgtaatgtgcttgaattgtcctgaaaccatcctcccatcccctgtatctgtggaaaaattgtcttctacaaaaccggtgcctaattgtcttccacaaaaccagtccctggtgccaaaaaggttggggaccactgtgttactgtctccctcgcaagtgactacactcaagtgactaaagtttttccttgagaaaattatgggatcgaagaaaggaaaatcaaacccgcttggggtgttttctctttttttttttttttttttttttttttgagatggagtctcgctctgtctcccaggctggagtgcaatggtgcgatctcggctcactgcaacctctgactccctggttcaagtgatcctcctgcctcagcctcccaagtagctgggactacaggtgcccgccaccatgcccagctaatttttgtatttttagtagagatggggtttcaccatgttagccaggacggtctcgatctcctgacctcgtgatttgcccgcctcggcctcccaagtgctgggattacaggcgtgagccaccacactcggccgggtgttttctcttatgtttgtttttttttttttttgccactgtccaccccgagatgctatgaggctatgattccttgcagtgatgcccccaagaaggaagacttcagctggcctcagtctcattaccaggctttttttttttttttttttttttttttttttgtgggagggccttttttttttttttttttgagacagagtcttgctctgtcacccaggctgcagtgcagtggtgtgatctccgctcactttaagctcctcctctcgggttcacgccattctcctgcctcagcctccgcagtagctgggattacaggtgcccaccaccacgcctggctaattttttgtgtttttagtagagacggagtttcaccatgtcagccaggatggtctcgatctcttgacctcgtgatccgcccacctcagcctcccaaagtgccgggactacagggtgggggaacctttttctaaggaaagctcaaatcacagttgagatcaataaccgacacccaagtcctgtaaatgaaataggcacaatataaaattactctttctcccaggaacactgaatatgtgattagaataagcccagggagaggaaatagctcaggatctgtggcctccccagcagacaccatagacagcatcatcccaggggacaccaagaaggaagtgtgcggaaattccaatgctgggattccaggtgttgtcagttgctgtgataaaagcaagcagaacaatatgctgacacagtgttcagtagattccttgacattctttttacaggcttgcgacgtgaaatttcctgaygaagtctatagataaagyggtgttgcacatttagacagggtgagcctcagtggagagaattatgctgaaaatgtgagcttgattcttcttcttggcatttggtattaactggagaaccacaggctcttctatttgggaaggaaaggaatcaacatttttcttagaaaaattcaggcctcactcttcacgctgggaactggtcctgtgtgactcaatggtattcccttttttccttaaccctcctttgaatagctgtggcttcccctggctaggtratttgtgtgtgtgtgtgtgtgtgtgtgtgtgtgtgtgtgtgtgtgtgtgtgtggttttttcttttctcctagagtaactctggccatcgggtagttggatgagtcaggaggacctttgtgccgtgaggactgtccctgcctgtggggtggctctgcagttgtgagctcagattctaggcaggtggccacggttcctttctgagttgtttgcacagatgcttccaatgaatatactcatggtggaactaatttctaaatcttaggatagtattaaatgactatcagtatttacaagaagaaagacttaatgtcttctttctgtctctttccacattaaaaaaaatatctagcatctaagaaggtgctcagtaagcattcaccctgaatctgccaattcccggttcctttattggtgtagtgggcacaggctttaatattcagccttgtaaagtcagccttgtttcagattgtaaaattgtacaaacccaagattttattccttaaacaaagatgtatgggccgtttgtttattccatttttcactctcacgtcacttacactccagcttctagtaaggtatagtgaggtattctttttatgtttcttatgaaatattcttgcctcataaatagctttctgttttctaaaactggatcgctgctaatgaacactgttttcttttaaattgtgaaattttcttcgtagcttttcctagtcggttttcatgacatcatggggaaatacttcccactggttcatttacatggagggagattgtcagaatttccttgataaaatgtttatgggtttaagaggtttatgaatcagctataaatatttgctctgggtttatgagacctctccccataaacattttgtgtgtttttctattgctcattgaaatgtctttggagaatcagctccttggggcacataggcctggggaagggttgtacgtgacccattttaaaaggctgtattgtgaataaccgtaaattttgtgcttgactttgttataacgcacagttcaagtcatcagtgctgggcatgaaggtttgagtttttttaaatcccattctaggtctgacttttggttacctttttaagtgttttctttagaccagcagagagggacagagcttagtgttctactgattcctgcaggggagacacagtggcaccctctgacctcctggttaacttgactgaatgaaaccatgtgcactgaagtctgtagaaccctgtatattgggaaatgtagttgtaatgaattaaaatttgacagaaacaaaacttttggtaaaattctaatagtatagattagaattgtatggagaataaagaactgcaaccagcggtctcagtgttgaggctgaaaattggaggctctggtctcccctgatctgaagtgatagaatcatcgaatctttgtgggtaatgggatgggtcactaaagcctctcatcccaggtgctggtgactgcaggcagtttctgaggttccgcctcaatgtgcgtgtttccttttttttgttttgttttgttgagatggagtctcgctctgtgacccagtctagagtgtagtggcaccatctcagctcactgcagcctccacatcctgggttcaagtgattctcctgccccagcctcctgagtaactgagattataggtgcatgccaccacccctggctaattggtgtatttttagtagagatgggtttcaccatgttcaccaggctggtcttgaactcttgacctcaagtgatccaccttccttgccctcccaaagtgctgggattacaggatgagccactgcgcccagcctcgatttgcatgtttgtgatttgcaggaaggagtcacccaggacaacttgtcccgtttttcagcagctatcattctcggagtcctacgtagaaccttgtgcctccttcggcccaggactgagtttcatgccgatgtcttcttcccaggtgctcttcttcttcctcacacrcaggttctgggagctcagtccactcttctcctcttcgcaggtggccacggcttcctgtgtcttcccttttcctgcttttttggctgtagactgtttcagggttcaccaacatggagagacagactcatcactttgaaacctcyctaggattctgcaggagacacgggtggtggcagtggtggtttctggtgcatgatacaggtgggagaaggagggggaaagtacttcataagagctccagctttggactcctgaccctgatgctggacaacagtggctcagggtgattccctgtcctttctgagctctcaagattgcccctgtgagtatacatccatcatcgttcttgggaggattgtgaggcaatacctgtaaaccactgtttcattctgtttcgtrttcctataacagaatacccgagtctgcataatttataaagaaaaggtttattcaactcctgattctggtggctgcgaagtctatgacgggcagctgcatctggtgagggcctcaggctgttcccgctcttggcagaaagaggaaggggagcaggtgtgtgcagagagatcacatggaaagaggaagcaagagagtaaccagggtcttaacaacccactctcgagggaagtcatccattccttcaagagccagaactcacccctgagggaggacattaatctagtcatgagggatctgcccccatgacccagatagcccctgctagacctcagctcccagcactgccacattgggaatcagattgcaacatgacttttggtggggacagacgacattcaaatcatagcaagccttgtagcacagaagtgacactcgaacacagcagagctcttaggatgtgcctgggagggcggtggctgctttgtagagctggaagttactgacacaggctagggcaggcagggggctgcaggagggtctggttcaagctgaggccagacaaggaggatggaaagaagctctggactttgtctgcagcaagtttgctatccttagatactgcatcaggacgttggggcagagcaatagtgctgagctgacgcctctgactagtgcatcggaaagcaaatttggtaagaggtgcccagtgccgttgggaggcaggggactgtcaacagagccatcaggtaccaccctgaggtgttttccaggagacggctgctttctctctagttcacttcgctgtgtctgtgacgctctaaacttcttggtgtcatccattcttcactggaggctgcaggacctgttgacttattttctcaggaagtgcatttctgtttgaagggcgtcaatccctgggtgggaccgaatgttagagcaccaccaaggaaaggttttctctcctgatagctttttctttttcttttttggatgtttgactgtaagtcactttattgaagcaaaagttgaggaggccattctaagcaacttgggcttagaaggcaaaatttaaaatagcctttcaattcagctcttctgactttacaaaaatgatcctcttccctcaatttctgagagtacacaaagtattaagagagacttacttttcctacttataattcaaaaatttcaagaaggccgggcgtggcggctcacgcctgtaatcccagcactttgggaggctgaggagggagggtcacctgaggtcgggaattcgagaccagtctgcccaacatggcgaaaccccatctctactaaaattagctgggcgtggtggtgcaagcctgtaatcccagctactcaggaggctgaggcaggagaatcacttgaacctggggggtggaggttgtagtgagctgagatcgcgccactgcactccagcctggatgacagagcaagactccatctcaaaaaaaaaaaaaaaaaaaaaaaattacaggtrgacaaaaagtagtgatagtctccagaagaaggcattcttatttggccccatgtcccctggcctatctgataggatcggatatcagttctctaccagccacaagatggaaagcagtatttactcttggccagtgacacaggctcttgtttctagaagataaatgggttgagcatcagcatccattggacattattgcaggaagatcatctaaacttttggaactctcgtgtgcattttggacagctctttctgttgtatgttcttatcatggccttgccaattggttcaaataatgtttacagcttattatttccatttaaaatgatgccatcacatttatgccgtgtatatgttaaaatgcattatttgatgctttttggctatacaagttttatcgtatatgtagccttaaatgtttggggaattgcttgatttccttcaagcctgggtgtgtggatttgtgaaattcaaatagttatgattctggccgggcatggtggctcatgtctgtaatcctagcactttgggaggctgaggcaggtggatcacctgaggttcagagttcgacaccagcctggccaacgtgtagtgaaactctgtctctactaaaaaatacaaaaatttgttgggcgtggtgatgcacgcctttagtcccagctacttaggaagctgaggcaggagaattgcttgaacccaggaggtggaggttgtagtgagccgagattgcaccactgcactccagcctgggtgacagagcaagactctgtctctcaaaaaaacaaaacaaaaaacaaaatacccccctacaaatagttacgattttaagagccatgttgtgcatttgattgtatttctctttattccttgtggttggagaaacacatgcactgttggtttctgccggagtgtcgggccccaacagctgtgtcccggcagtaggtaagagttgggagccttggactggccaggcatcgggagtgtcaggcagctggtcggtttgtgttgttgactggctgggtggccccacacactcgagcaattctttggggcctcattttctctttttccccttaaaatgatgccagagtcagtgctttatctttataacaattagtgctgttctctgtatacatcacagcctacatcacagcccttgctcagcgcacgatgggttccttcgccttgtcctccagcctccctgcaggctgggatgtctactgcagctaatttcaaactattacacgaacatgtagcaaatatgcgttggaacatgtctcatgttatttaccccagagaacccagtgttactcttgatttcatcagtgcagtcaaagyggaatgtcccatgttttcctttctttagtcaacacttctaaaatcagcagactgaagctttgcaaaaaattcagcaatatccttctgaactgtggaattagcttgtgtcttgtatgaaggattttctggtctcagttgcaggccagcacctttctgtcctccactccagtattgatattctgttcttttgtttttcaacagaagaaggctcaagcttggaggaaactggctttaactggggagaatatttggaagagacaggagcaagtgctgctccccacacatcattcaaacacgtatgtaaagcagcttgtgtcttctctgtgtctagaaagtgggaagggaaggaatctatagggagaagccggagaactcaatggaagaagggcagaggaaagagggaaattcgtggccaggcatggtggctcacacctgtaatcccagcactttgggaggctgaggctgagactggcaaatcacttgaattgaggagttcaagaccagcctgggaaacatggctaaatcccatccctacaaaaaatataaaaattagctgggtgtggtggtgcacgcctgtagtcccagctacttggggggccgaggtggggagggtcacttgagcccaggaggtggagattgcagtgagccaagattgcgccactgcaccccagcctgggtgatagagtgaaaccctgtctcaaacaaaaaggcaagatggaaattcagccaagatttcttaggaagaaggaggagacctggaagttagcttggtttccctggatagctacagggaatatagaccacaggtagggtcagcttgagtaagtaaagagctggaaaactaaaccagtaggtgtaatgtattcttagtaggtgtaatggctgtatgttttcagtttcaattaatattttgattttgaaaaagctcataaaagatttccagccatttattggcagatgagtcagattagaggaactaaccataaatatgatgaaaacatttggatccaaccaaaaaaaccactctcatcaataatgtttctttggataatgcaaatagcatgtccagcactgggcaagtcccagaaaatttttaaaaagtcagtttttatcaggttttcgctttggtgtaagatactggtaatgtataatatcattagcagggaaaagtctaactcacctgggttctaagaagttgggtcctggaaatttagtctttaatttttgttttaatagaaatagaaatggagatttaactctgagaaacatttttcactttgtccatgcagggcaaagattcagcctgagtttcatcagtaaatcggggcactttcttaacctgttcttccttttggctccttggctgaatgaagaagccagaactttgattccttatttttatttatttattttctgttagccaagtctcgccatgttgcctgagttggcctcgaactccaggctcaagctatcctcctacttcagcctctcgagtagctgagattacaggcatgcatcaccatgcccgatttgattccttattttaatacaacattttattctttttagaggtgaagtgttctttccaaaaggaatttaagatttttattaaatttctgtgaccctgaaaaggtagatcatgtttccatttctctttatactcatcatgctatatttactagtttattatgaacgtgattgtggctgtttagtaaaaccaagagctaaatattaaaacatagcaaagctttcaagcatatgatgtggttatggtcccgcaaaagccattgtaacatttatatcttaagatgctgagatgatttggcagttgccttaggcagtttaggaaagagacattgatcacaatttttccttcctttctgtactgagaagttatcaatttctctctgtatggagtcactcctatttyctttgattcagtcaatcctyccacctcccttttaatcacaatatagtgtcctgggggccagagctggaggctgtccttcaggctgcagaagtccccaggtccgtatgccaggtttaaaggaaaagtagcctcagacccatgcaagtgtgattgataagtctgtcatctcctttcagcagtggccacttgcggacagcggatatgtcagctttgcaatgttaagacccaccaggctggaaagctttttctggggttgagggctggtagatatcaacagactatcacccttaattaaaaaacaactccattttctagggccatgttgttcatggaatagcccctatcatgtggtcctgtgagtccttgaaaaccgtgtagtccacattcagatgtgctctgagtgtagaatacacaccaggttttagaggctttattcaaaaagaagacagttggttgtttcattaatgttttttatattgattacatgttgaggtgataatgttttggatatattgggttaaaatatattgttagaattaaatttattcttttttgttcttaacgtggctggctgcaaatgtaaagtttagcattacgtttgtggcttccatagygtattacttagataaatacatgcctgttttagagcaacaggaatattgtttgtaagtgccatattttttagtggtttttgtcatcttctggatgtattgtgtctagtgtagtaatgggttttctctatttctgattccttaaggttgaaatcagcattcagagcaacttccagccaggaatgaaattggaagtggctaataagaacaacccggacacgtactgggtggccacgatcattaccacgtgcgggcagctgctgcttctgcgctactgcggttacggggaggaccgcagggccgacttctggtgtgacgtagtcatcgcggatttgcaccccgtggggtggtgcacacagaacaacaaggtgttgatgccgccggacggtgagcccctgtttcaaaggcttcgatttacgagccgccatccttcatgacgcctgtaattttgcaaggagcagagagaaccttgcgtagaatccctaatggtcttagtgcaaaggtctcacagttctttcagagtggtttctcaggtttccttagctggagggagatcagtgcattttcagatgtcagagctggtgctgacaatggagccaaacttggcttttcggaactgaaagtatgcctaatccttaaattccttttggagggtaagaaaggaaggctgaaaggacatcaggaattggagggtaagaaaggaaggctgaaaggacatcaggagttgagggtaagaaaggaaggctgaaaggacatcaggagttgaggtcttgtgtttggtgattggccatgttgcttttcttctgctttagcaagtcgacatttgaacagtaacagagtgtcttaagcaggcttctctaataacttttcatctgtcttgttgggagactgtcagggtgtcaagcttttagaaaaccatacagcacttgtgccctaaaacttaaggtataattaaaaaaaaaaaaagaaagaaagaaaaccatacagatgagagaaatgacattggtctcaagggagtggtcaaagcccatatagatatgatcaatttagttgctacaaagccactattctctccgggggcagttttaccccccaggggacacctggcaatatctggaggcatttttggtcagggccatgggagttgctactaccatttagtgggtggaggccagcgatgatgctaaacccccgcaatgcacaggacagccccataaccaataattaccaggctcagcctgccagcagtgctgagggggagaaagcctgctggaaaagaatgggctggacatgataaatgcattgaaggaattcatctgatcccctaagtgagaaaactgagggcagctaattacgtgaatctctacaccccactctctatgttttattgtatgataatggcagcagcgatacttgcaggctcttgatgccaccttgcaaatgtgtgtggtgtcctcttcgtagctagctgcctgttttcatcttgaagtgacgtataaacttggagaggtgaaatccccaggttcattctgtttgtggtattagcagttgccttacttagcctttcacggtatcggagctctatctttttttttttttttttgttatgatatattgtttttctgataatttggaatagcctgtggttttttaattaccctttgttaggtgtaattgatagcctgctaagaagggggtcataaaatggctggagttaagagttgcatttatgtgacatttgtcaggatcgaacccattgccatggcgttagctgacattttgaccctttattgtctccaaagaaagagaaaaagggtcttctttctttctttcctgcattgggtctttgcacccgctctttcctatgctgagaacctccttcctttccgcatcctcctcctgctccagctgtcagcatagctccctcttccacctgcaccaaggttgacactgtctgtgctcatrggccaggtcacaccctatctgcaccacgtggctgcctgcgccttcagtgttcatcacggttgcagttgtactattcttttcttttcttttttaagatctaattgacgtgccataaaactcaccactttaaagtgtacagttcagtgattttttagtatattcacaaggttgtgcaaccattattactataattccagaacatttcttttatcacctccaaagtcactccccattctccccctccccggaaaacccttggcaaacactaatgcactttctgtttctgtagattttcctattctgggcattttacatgcatggaatcctatgctgtgtggccttttgtgtttggtttattctcttaagcatagtgtcctcagggctcatccccatggtagcttgtgtcagaatttctttcctttttaaggctgaatcatattctctggcatggactgatcatattttgttctcccttcatcagtgggtggacatttagaggcagctgttcttccacttgggtggttctttgaatggagtacactttatccccccagacagtaagctgcatggtgtgaacccactcgtctgtgtacaccagctctagcacgtgctgcctgtgcttgaggaattctcagtaaagattcactgagtaatcgagtgatttactgaagaaggtaaaagtgcggcttacatggtcrtctgaaatagcaaggaaaagaacagtcattgttacgaaaggaggaagcacgtgcgctctccttcacctttcctccttgagctgccagtagtgctgtgtgcaccttctctctggacatgcgagcctggatttccagcctctctattcaggtgagtgctggagaatggctgttcttaagtcaggttttatttttagttcccrctccagctctgygtacgcaaatcgcagggtcaggaggcacacsctgggaggcacagtgcatgctcatgcttttggtaacatctgattcactcagccccagacccagcctaaacaggtcctgagggagattgttagatctgcctttgaattaaaacctccactgaggtgagaagctgtggtgtaacgtttgattaatttacctatgatttctgatccgtcgtgaagtaaatcagccttgatggaggaattgtactgatggaatattgaggaaatgccaggtctagttagagatttagagaccttcccccatccccaactctgcacgcaggtgccacacatttgtgccccctcacactcaggggagttgcgttcatgccgggggccgtgtacacacttgggggcatcaagagaagggcacacagagggggcacatagagtgggtgggagcctcaggccccatccttgttgccgacggttttaccatcacattcatgactcactcttcaagtttaacacttgaatcttgaaagscccttggaaaggatgtaagatggtttcattttgtaatagcttctctagtgaatagtttyagagacaagttctggggtcttgaatctgaatactctaagagctaatgggttcatytggtaaaaatgtatgctgttgcttgagaaagagggcagagtttattaatcaattcttccttctccctcagaagacaaatgtggcagcagtcacacacactctcagaaacaccatcaaatttgtatcctactgactttgccacagtcacacttaaaatgacaagttcaaaaagaaaaatgagaacaccctggaaaaagggaaaccataaatgtgatggaaatacttaaagtcttttcaattgttaacaacttatgctaatttgaggaattcttcagtgatattttttaaagaactcaaaaacatttagtgggtaatcagtatgacttggaaatctttaatatggagagcagagtcaggaaatagcaggttcatggggcaagaagttttattgatcgctgtaggacagaataattattgctttgtagccagaggcggcagttgttccggagggaacagtagaatctattttttaaacaaggattcttatttgtgtgtttttttttctgtcttagagacctgatatcattgtaaattctgcaaccatacctggtcgatctttgctgtggttaaacttgaaaggcaccgcagaatatgaacaggagttacagcgatccagggtgtatgatgtttctgtttgggaggcttcttggtgagacggagattttcttactgattccaggagtcagagtggtataaagggaggggcctgtggctgcagcccaagatctgagttcttatcttgcctttgctattaacttagctccatgggtgagtccccttcttggggttctcatctttgcatgaggggggtattagtctgttctcacactgctaataaagacatacctgagactggtaatttataaagaaaaagaggtttaggcagggtgtggtggctcacgcctgtaatcacagcactttgggaggccgatgcgggcggatcacgaggtcaggcgttcgagacaagcctggccaacatggtgaaactccgtctctactaaaaatacaaaattagctgggcgtggtggcgcatgcctgtaatcccagctactcggcaggctgaggcaggagaattgtttgaacccgggaggcaaaggttgccgtgagccgagatcgcgccactgcactccagcctgggcaacagggcgagactccatctaaaaaaaaaaaaagaggaggtttaatggagtcacagttccacatggctggggaggcctcacagtcatggtagaaggcaaattagaaatgaggagcaaaggcacgtcttacatggtggcaggcaagagagcctgtgcaggggaatttccctttataaaaccatcagatctcttgagacttactatcctgagaatagcgtgggaaaaacccgccccatgattctgttaccacccactgggtccctcccacaacatgtggggaattatgggagctacaaatcaagatgagatttgggaggggacactgccaaaccatatcaagggggttgtggtatagaatctctaaagagctttctagtctgaaatgtctaggtttgtgacccttgtgaaggaagaaaggaaggagggtttgggtgctagttttcctatataatgcacgaggaatggagtttagtttggagttaagatccatggacgtctagcccaggaatctgtccaaagcacagacatcaagtttgtgaattactgttggaggtgatgacagtttaacagattgtgagacactgtcattaggtcagcaagttacggtgtatgcctgggtagaattttcccccataaagaattgtagaccccagttccccattggaaccagagaactgagagtttttagcccttagctgagtaatcagcggaagctgagtcaagtcagttggttgtggataacagcctgggaatgtttgggaattttgcccttgtttcatgggggaagggagagaatgcctttccttgtcagatggaggttgcagagctccagatcttcgaggacactttgggattgtccaaagtagttttctagtaactggagtcactgcattgaaagaaagtggttttattatcttagatgatagttttacagagcacttaggaccctgtgcagtcccatgttttcttgcatggctcttttaaattaatgtaagctgtgaattaatgcaagccatcattagtctgtgaaatggtacaaggaaggagaaacagcatggcggcagctccaggagatgtcatcactaggggattcccatcagcaggcagagctccattaataaagacgcatttagagacctgggctctgtgaccaatcggcygttcagagcagcgttcctgcttgtgagctaatcagggctaatctttcatattaaaagtattaaggaacatatgacattaaagcgtcacccagtgccgcggaggattatggctcttattagtggagcaaaatgtaaaacgttttggtttagtaaatcyataaggcttgatttattcataagcgcatgcaatgcttgcaaggggcagctgccaaataattattgtttatggtgagaatgtatggaaatcatttaatccagtgacgacttcattgttatttattgaaaagcagtgacattacctcttaatgtctggggctggggagctttggagatttagtcggtgcctgcygagcccccaaaaagatgctcgtggaagattgcaggtaagtatgtgtgatgatgtggctccaaataacaccccttggcttgtaaatggagacgtatttatgagtgctttctactgttgccataaaagtgttggaattatagtgccttaggagtcatgctgctaatttttattttccccgttattaaaatttctgtcatttgaattgcgtactctgcagtcttggcagaattactcaatttaccattcaaagttaaatcaaaattagtggagttagttaatatacaactcatttgaataaaggaatgtttattcatgaagtgtgaggagaaagtgtgaagatggccttatgtttatgtgggcagctcctgccaagttttaaagcctggttttaggaacgtttttgggaattgccatttttactgtagttgattgtagaggacaagatgctggcaggtggcacatgggacaggaaagtgactagacaagcaggacttacccagctgtgacatggctcaactgtggactccaaaaagtagaattaggttgtgtttttatgagactgaccctttttaaaatttatattttataatgtaaatgacatttcagtaatattaagggaacttaaacaatcacattattttctttggttatctgacattgtaactggagttccatttgtttatcaataagaaaatttagtatatatgctaaaaactcataatgaatcctaactgggcacccaggcttgagggaagcagagagacactcattaaatattagatagcttagtaataagagagcagaacacattggtataagaaagggtaggattatttgacaagtatgtctgtaaataaaccaaaagtcatagttagatattttattaaaaaatgtttaaatattctaaaagttttaaataaatattttaaaaagtgagttagtattgtattgtcaaaaagccatttttgatgatggtgtgtgaaagagggaacattcaggtaggaaacaaagtaaccctttctcaataggcactgaatggaccttttacaacaattcccatgrttwtgaattctatctgatcaagtagagagtctgtgtacacattcatcatggtgtagaccaggatgggcttggcttgtagatgtgtgtgacagagagagtaggtatgtatgtgtttgtaacttttggtgtaaacagtatttaattttaatatctatcatttacacatcacatcataaaagagtcctgctgtgaatcaaaasccttcatataggtaatggcaaataactctttgtttatgagtaaaaaatgaatagtttttttttccccccagaaatccgtgtttggtgtttgtatttgtttttcactactcacaatatgccacacactctcttttttatttttatttttttgagacagggtctcattctgtcttccagtctggaatgtagtggcgtaattttggctcactgcaacctctgcctcccggggtcaagctatccttctacctcagcctcatgagtagctggaactacaggcacgcaccaccatgcctagctaattttgtattttcgtagagatgggggtcttcctgtgttgcccaggctagtctcgaattcctgagctcaaatgatctttccaccttggcctcccagagtgctggggttacaggcgtgagccagtgtgcctggccccacacactctctttggtcatcttgaacagtgaatgaatgaatcacgaatttcattctgtttgtgtcatagctctccaattagaagatacttttgtgtgcacctcctgtggtaccaggtaacgacgtttaatcctgtcaatcctcagaacatccttttgaagtggctggtattattcttatttcatagttgaagaaagtgtgtttgttcccagatcaggcagtttgaagtagattttaagctaagaggattctggccagttctgaaatcratgctttgaaaatagcaggaggtctgtaaatatttgtttattgattagattatatcattaagactttagattaaaatggtcagactgaatatcactgagaaaagttgtagagttggtttcttggtgatttttaagagtagggtagaaagctgctgtccagaatattttccaatttgtcttttttggcggcaaataagtggaagagatgtggtctggaagttctttgccgaatggtaaccatgagattatgtaaagttatgtaaattgcatcagatgctatttgggtttttctgcgctacatgaaaaccgtaagcatgaagcagtgactagaaggttttcctttttagtgctagtcataaatgaatttattttctcctgcttctcaacccagcaacatatgtaatttaagtcaagcatgtgtttgattctgagtggaattcgaggggggagttggtgctgtgtgtttccatggcctcgtggctcatttttgcttccgtgttaactccttcacttccataattgtcagagcctccaactcatctggcctctccctcccttggtgccccacctccccttgtaaggatcctggccctggcctgctccagatgcagctcagatgatcacggcctcgggtgcatggagggctcagctcccatctggccccgttcctgctctgggtggacctttgaacgtcctgaatgatccttgggtttcacttgtatgggaagccccgtggcagctttacacagacaaggcccccgggcacagctcggcctgcaggatgtctggctgctccaggcttgaccctgcctcgttgacctccctttattccccctccacctccacctgttcactcttcttcgtgccactgaccgtcctctagtttgttggactggggagcttctcccactgtgctcgcagctctggcctcctatccaagcctctgactcccctgctgcttcttattaagtcttctctcatggctccatatttcagggcatacctccattctagggccatgcagatgttctagggacatgctgatgtcccaggggtatgcagatgttctagggmcatgcctccattgcagggccaccatgcctccattscagggccaccatgcctccattccagggccatgcagatgttcwagrgccatgctgatgtctcagggccatgcagatgttcaagagccatgcctycattccagagccaccatgcctccattccagggccaagtagatgttctagcgccatgctgatgtcccagggccaygctgatgttctagagccgtgcctccattccagggccatgcagatgttctagggccatgcagatgttctagaaccatgcctcccttccatggccatacagatgttctcgggccatgcctctgttccagggccatgcaggtgttctagggccatgccggtgttctagggcaatgcctccattccagggccatgcagatgttctagggccatgcagatgttctagggccatgttgatgtcacagggccatgcagatgttctagggccatgcagatgttctagggccatgttgatgtcacagggccatgcagatgttctagggccatgcagatgttccatggccatgcagatgttctagggccatgttgatgtcacagggccatgcaggtgttctagggccatgcaggtgttctagggcagtgcctccattccagggccatgcagatgttctagggccatgttgaggtcacagggccatgcagatgttccagggccatgttgatgtcacagggccatgcagatgttctagggccatggtgatgtcacagggccatgcagatgttctaggcccatgcagatgttctagggccatgttgatgtcactgggccatgcagatgttctagggccatgttgatgtcacagggccatgcaggtgttctagagccatgcctccattcattccggggccatgctgatgtcccagggccatgctgggttccactgggtttcactccagggctgtgccaacattccagagccataccaacrgtcgtgcctccaactcgagtccttaggttctgccggtcattagggagagtctgcctttttgagcctggctctcagggaatggttggtttgtgcaaagcttgtctcctgagtctagaatcatgttaaagcttggtgagtacgaccttcagttcaaagtcttgggaacttagatggttcccaaggattattcagaggttaatttggaattgttttagtcagggttttccakagaaatagacctgatagggtcagtacatacatagcaagaaattttatgtttaggaacatgtgattgtggatgaccagtgagcccaaaatctgatggggaagatctgtaggctggaaacttaggaaagagctgcagtttgagtctgaagcagggggagccagtgttgcagatgaagtccgaaggctgcctgctggagaatcccctcgggctttggggaggtcagcytttcaatctatttgggccttygactgatttgatgaggcccacccacaagcaagaggatgatctgctggtcagtgtgtacttatttaaatgttagtcgcatccaacaacaccttcacagaaccacccagagtaatgtgtgaccagatgtcttgtctgggcaccgtggcccagccaagttgatgcataaaattaaccctgccaggcgtggattcagagctagagctgaatygcccacttgctctcccctggcgtcatcttaatgccttctggagaggcagaacattttrtgtacacttggaatcactgtgctactttgccctaacagacaatgttcagttgatatttctgaatatagatgcccttaacagaaagctctggtaggaattcgagagattgcgaagtaaatgcatggattatctttaatgctgtgaaagtataaatgtcagagtggcaggtcagagagtctcttgaaaaccaatacgaagtgggtaggaagaagaggcagagacatttcacccactttttaggctcactgcctgctgctcagcagggccaccatgatttatctgaattctgtgtcartttccataactgcatatcactctacaggtacccactgggattacttacaagrgattttgctaatgaggatgtacttccgggtacagggttctgtggcatgcatttaaaaaggcagtagctggctgggcgccgtggctcacacctgtaatgtaattccagcactttgggaagccaaggagggaggatcacttgaggccaggagtttaagaccagcctggccaacatggtgaaatgctgtctctattaaaaatacaaaaattagccaggcgtggtggcacatgcctgtaatccctactygggaggctgaggcaggagagttgcttgaacccgggaggcggaggttgcagtgagccaagatcatgccactgcactccatcctgggtgagggagcgagactccatctcaaacaaaacaaaacaaaacaaaacaacaacaacaacaaaacgcagtagctagtgtgccttcatcatgggttgccttgaactcctttgaaatcctgcatcttaatcactatatggcctgtcctcaaccccaggaaaaaaacgaacacatgagcagcctttgaggttagcattacacttccacgaggatgagaggggcctccagcctggggtgtgccttttagagaacgcagagaatcacatgcacagacaaccatgtgtattcaagagtacggagatgcctctccctcggatcctgttttcaggactggtctccagcaccctgtacctacacatcaggctcaaatggagaaattctctgcatctcttgtgcccttgggaaaaaagacctgtgtccgaatgctgtgattttgtgagttgtggtgttgccactgtcagagtaagagataaattaatggtcaaattacttctttcagaaagcacaaatataataaattttttacagagtgaagaatcactttgcaatagttctgagcagtttctattctggaagaaattagtrcagaatttccaacagttgtatacattgactggggcttcattatttatttatttatttatttttgagacagagttgcaccttgtcgcccaggctggagagcagtggctctatctcggcttactgcagcctctgcctcctgggttcaagcagttctctgcctcagccttctgaataactgggattacaggcgcccgccaccamgcccagctaatttttttgtatttttaatagagaaggggtttcactatcttagccaggctggtcttgaactcctgatcttgtgatccagccgcctcggcctcccaaagggctggggttacagacatgaacaaaattaactttgttttacaaaatgaaaatgaaatattttaccatacaaattcacactgttctcacatatgggaatctggaaccctagacgtgacatggatgaagccgatgttgactttttacattggcaactgagtgaatgttgaatgctagaactgtggatagttttatttctttataaacatgcttaatgagattcagtgctgaaaaaatagatamaatatttaattttattttaatattttaaattaaaatgtttgatattcactaattttaatttgcatttccctattaattttagtagacactttagaaagagtaggaggacatttggaatcgtaggacacttagaaggaaaatagcatttttgaacaaaatgattaaaaaatttgaatttagcattttcttcagtttacgtattttgatgaaaagaattaagatgaagtagactgggtatagtgatattttatcttttaatctgttaggtgatttctgtgactagaacataaattaygtgaaaatctagatttttaactaaatagttaattttgctgaaaggaaggccaaatagataaagataaaatcatttatgacttacgtctttatctgattactcatccaaacattgctggcccatcagcagaacacccagactcatgttctcataattgaatttagtcatctctggcttttggccaactttctgtcttctgtgctctagtgcttttccagactttttgattgacattatgaagatatatttgtcagtgaaggaggacagggcatactttacttaaaagcctgtttgcttgattaataacttgtaaatcttaaacatgtgctacgtgagctacatttgtatttgcacttggtgtgtctgggcctgttttagggttcagatasagcccctgtgaactagaagtctttctaaggatgatttgggcacgcgtggatttagggagccagtttctacatccaccaggcctgtctcttccatgagactgatctgcctgagaatagaccagtgccgtcctttcccacctgtcccgtcttctctcccactctttcctctcctacgttggttgagaaggatgtcaccaactgaggtatcgagatctcatgcccactatgccagccgtgacatgcagacacaccagtttatctttttatgtttactcatgacactgccacgttattcgtgttattttgatcaagactaatgacaattttaatcatctaagccaaaagaaaatttttctcttatggtcaaagaaattttttaaaaagttgaattatatactgcctactttttgttgttgttgcagagaaattggataggataaacaatacgagactgttgggataagagtctggggcatataggctgctgttaaagtagtacttatgtatatttttatttatttatttttttgttttatttatatttttttttttttggagagggagtctcgctctgtcacccaggctggagtgcagtagcgtgatctcggctcactgcaacctccaactcccgggttcgagcgattctcctgcctcagcctcccaagtagctgagattacacgcacgcaccaccacacccagctaattttttgtatatttagtagagaaagggtttcactatgttgcacaggctggtctcgaactsctgacctcaggtgatccgcctacctcggcctcccaaagtgctgggattataggcatgagccactgtgcctggcctattatgtataattttaaatgtaggatggaaggtatcagatcatttactgaatatatttatgggagtaatataggagttttattccaaatgtcagagttgcagtacacaggaaattacatcctttgtgatgattgaaatgaatgaaacatttctcaacgccaaattgaaaatgcatgatgggaggacatgagttcttcaagattcttgtatggggggtatatgaacaagaaagcttgaggaccagttttcacaaatggtactcaaccatagcccttctcatttacccattaagatgtttttttttttttttctttatgatttagatgcttagatgttcttagggctttggaaggatttatcataattgagcatttgctgagtttctgtttccgtcattggattcctttggtaatatatttgcaagtctttctctgagttctttgctaataggaaaacaagagctgacaggaagatcttgggtggatgggtaaaaatggctactggctgttgatttggtccactgtatcaccacattactgttgacatagtaatggaaacactttaatatcaatcagtgcatattggggttctattctgtgcctggtgttttttgggtgggaatatatgatacggttgttattaagcattttatattgaagcacactggtaatatagtcaacttttggccaatagtgtgtactcagtgatgaactcaattttggcaaagggtgtcttctgtggtggcccccagtgtacttattttatttatttatttatttatttttatttattttgagatggagtctcactgtgtcacccaggctggagtgtagtggcacgatctcggctcactgcaagccccacctcctgggttcacaccattctcctgcctcacctcccgagtagctggaactacaggtgcccaccatcacgcctggctaatttttagtatttttagtagagacagggtttcaccatgttagccaggatagtcttgatctcctgaccttgtgatctgcctgccccggcctcccaaagtgctgggattacaggcgtgagccaccacgcccggccccagtgtacttatttatttgttggccatttctgccctgctgttgactgtttcactccttggcttagcaagaggtgttgggagctgatttgaaactctaatctctggaggcatggggaatatgactcctctattctgggtggggacttctctgagatagcatttcttttcttttgagtttaaaaatgtgtctgtctaagcctgggcaacatagcaagacaccatttctaagaaaaaaaaaattaaccaggtgtggtggtgcatgcctgtagtcccagctactcaggaggctgaagcaggaggactgcttgagctcaggaggtcgaggctgcagtgagctgtgattgcaccactgtactcccacctgggtgacagagtgagaccctgtctcaaaatatctttatgctatacatttttagaggtctgttcaacagctatggaaacttccaagagccaggcactgacctgaccctggcacctggagcgtcccttctgggagaatccgcctgtggatgaatagaaaggcccctgctctctgctggtattgaaataaaacactggcatctctggaactgagttatgtctagtaagtggctcctccgaccagtatacggggtgggaagtgttggtgtgagtcacctggcctgagctagggcctcaggcctgcctagcactgaaaggagcccagaaaaaagcgacttcagaaaaaagcgacttcatctgcttgcatcacactgtcctcatcttcaccgtgacaaactgacacaatcttgctctcggtttgatggcaaacgctctctgtaacctgtcatgtggaaagttccctcctcatcagatatatatatatatatttttttttttacaggtaagaggctttaataggccttgacaaagggccgtatgagtggagaagtatctgcgccctaatagcagggcacttgaaatacagccacacgggtacagtgtctttcccttagccagtagctcctcactcggccacgtccactgtccagaatactgtcgaagagttgcctttttaccccctgtgagctcagagaattttgatcatacttgcctgtgctatataattgtttatgtataactgatctcagccatttgcttatgaaagtaaggctgcgtgaatgttttgttttcagaaatacacattttggatcctaatgccaccacttaattaaacgtgcgaacctgggctaggtattttctctctcaactttgtgacctgcagtattcccatatgtaaactggagataatgagacctgccttacaggatcgttttgtgcattaaatgggatttgtgtaaactccttagagcagtgctaagaatgaaggtggtaatgagaaatgcagtttttatccatcctcattcttctggttaaggatggtattttattcaccttttgattycttataatgccttgcacatagttaaagctcagcagttgttaaatgaataaggaacaaagcccccatgaaaaaacaacaacacacaaaactaattagtactagtgtatgtgtgttattcactggagagccttttcaaatcctaccacattcagagacaacaatcacattacttgattttgaagcccagcacatgttggaagcagaaaattagaagcatgagaagacagctgttagtcatgcatattgatatcacaaataaatcctagtgggccacccaattgcaaggaaggaggtagaggagctgggaaaagtggtatcaacagtagagcaatctaatgccttttaccagaggagcggatagccccatccacagatccagagggtgtgtggctactaccaagggaattgccagccattgcatagtaaagcagmataattgatttatggcactcaatcctccaaaaagttgtaaatttctttggtgtctaccaagtaggtggcaacagcaaaggctaacctcagggggatttgcacaggaggaaaaacaagattgtaaaaacctgctgttctaggagttgaaatgtattattattatggctatggtagaactcttctcttctttgtcatgcagacttaaagtataaarcagtctttattccagcttgttaaaagtgggaatgccgtaaaccaacacagtgagcctggagcaatgacaagctacacaaaaattaaacatatttgtatttcaagatgtagcgagctgtcgtggccagttcatggccactttgggaagacatttattaggaggaagcaagatggcactaaagcgtgggagaggacagaagctggagccgtcatgggtgcagaataaggctggcccggaagagtggctgggtggggtcacacctggtagttcagatatcttttgctatcgattttctaattttctaagatgaagtgttaatgtcccagcgtgtggatggtgcctccggatggacaattcaggttgcatgccccagacctcgtgattgggactggccagaacagacaagaccccatcagcaggatggacaagaccccatcagcgggatggaccccatggaaaaaaaaaaaatctaggaactaagacacgattgggcaggaggctgggaaacttactaggaaggatcaaggttgactttgccaccatgacctagccacgaacacgatgggaagaaggctgtggagtggggctgtgggcagygcctccyggggccctgaatgaagcaagcttggagagggagctggtgtgtgggtctgagtggcttctttaatgtcagcatgcgcctatgaggtgctgacgtagccttattgcctctttgagagttggcttcccatagggacatcctagacactggaagatttttgcatcggcatcttcagtccatcaaatactgtccttgaaatcccastgtcctcagttggtgatggacaggggacagacatttgtggtctcatgctgagggtcttaggaaggcaagaggtggataaaagagtcagggattgagggccgggcacggtggctcacacctgtaatcccagcactttgggaggccgagacaggcagatcaccctaggtcaggagtttgagaccagcctgcccaatatggcaaaaccccgtctccattaaaaatacaaaaaattagctgggtgtggtggcgggcacctgtaatcctagctagtcgagaggctgaggcaggagaattgcatgaacctgggaggtggaggttgcagtgaactgagatcatgccactgcactccagcctgggagacaagagcaaaactccgtctcccccccgcaaaaaaaaaaaaaaaaaaaaaaaraaaagaaaagaaaagaaaaaagagtcagggcttgaaagtgagaggatccaaactgcatcctgtcctgcccacagggtgttctgtccaccttaagtttgacatggtggttctgaaccaagcctgagactgtgttgggatgaaattcctgggggctgtagagttgggcagtctgtgctgagcattccatcacacgtgccattccacaccatttggagatcgagcagaacaggtttgattgatgccgggtcattttgttttagatcattttcacatttatgatctctgggattayggaagaggtctgtgattcttgtgatttcaagagaggggatttaaaaatggatagggaggtttgtcacagattcatgagacctgggagtgagaaggaaagcggagtcagagaggtggagaatgggtgggtgaccatccttgacctgggatctctgtgaccaggactctctccatttctcatccaaatgtcctttttggaggtctcatccttgtcatggtggtgacaagacatggaacttaccacttctgaggacttgaacaccctgagagcctgaggctgcagaaatgaccgtggcaggttccctgccattcacggaaactgaaatgtgccaaagagcttatatccaagccaaacagcgtttgtattggagaagttgcctttctctcaaaaaggatggataggaagcagtttttaaaaaaaatctgcctgctttctgaagatgaacacaaatctggttacatccaacagaagatagaatgattatacaacatgaggcttaaatgtttgtcttttaaaatgttcttaggttatgcagcaagagtttacagtagccaacctgtatttccaaggagatttaatcagaggaagtatcaaagaattgaagattagtatgattttgaaggttttcctaattatttttctgatgatctcttctcaactaacagagctggtaagtagagttgattaaacaatgtcaattttttgaaaagcccttaatgacatatttacacagtagttatgaagagccccccaaagcccatcatggattataggagcaagttatagccattaaaaccatctgtgattattttttygtagtagagagtgatgtcaagccatcagcttctgttcaacatatttcttagaaaaggatgtctcaaaacttcttcgagaccgtcaygaaatgaaacaactccccgatcccacacgaacctctcccaccaccctcaaacataaaccaacccaarccctttgaaaagctccaaagaaaataaaatgtttttagaacttcttttcttgttcaaatgtttgattgactcgtagagatgaagggatgatgatgatttatatgccgggtgtactgttatttggagtaatgtttcattagatttgttttgtgaaatgaagaaagcagtatgtactttacatttttcatctstacatctaatgtgcaatttgttagcccatcaaaattaattttagatcccaaatggatctttagatttgtaagtaccgttaatggttttttcagttaagtgtatgtatttatgtgcccttcttgggtgaatttctatgaaggattctgcagggtgaatgttgacatgaataactaaccagcaaataagtgtcaattaaaaattctattaccataattggccgtggcccttcctcatcaaagtacagtatgtttagatcaaatttaattttttttgagatgcttgcctgcttagtttcccaatttatctcctctttctgctaacaaaagaagctgttttccatttagaggggcatctttctacgctacctacatgtgaatactatgttcaaacactataaagatttttaagtgttttttaaaaacaaagagatttggtcatttttgcgggtttcttttctccttctaaatttcatggtcccttttatcctttcttcatggattctctacttttctttctcaaaatttccccttttcctgagggatttttgcttccagctgatgtgagggctttgatggtgtggtttatgtgttaggattacaactgctgttcccaaaaggccctaaaatgctgtggctcaagttaatttagaagtttactgctctttcttccaaattccatgtctgcatggtggaaggctggttctcctccaggttgcccagcaagaaagagggaaagggagaggctggggacagcagctcacctcccactagcaaaactcggtctcctgggattccaccaggccctacctagttacaaagagactgggaaaggtactccctagctgtggggctcctccttgctaaaatccctgggatggggaggctgcttttcctacaacaaagaagggagggaaaaaagccctgggggacagttagtctctgtcacaactcatttagctacacatttttgttttgttttgttttgttttgttttgttttgttttgagacagagtctggttttgtcgcccaggctggagcgcagtggcacaatctcggcttactgtaacctccacctcctgggttcaagcaattctcctgcctcactcagcctcctgagtagctgggattacaggcgcctgccaccatgcccggccaattttttttttttttttttttgtatctttaatagagaaggaggtttcaccatgttggccaggctggtctcgaactcttgacctcaagtgatcctcctatctcggcctcccaaagtgctgggattacaggcgtgcaccaccttgcccagcctacaaaaaatttttaaagataactagttcatctttggaaaacatctaagggaaaatgtaagagtgttaaaatgtaaaagagaatggtattttttttccttcatttgggagtcaaaatgtattgtctatagttgatacaccagtgtagatttttaacacgtgatctttgctgttgatggaataggggatgcacttttccttgcattaacgtttaaagagatggatgttacctgtacacaacatttgtaagagacggttctaaaaggtttgttttaaaaattacccgtgtcttgctcacatcctctgtttcatgtcctctgtttcaatctggtttttactgtttaagatgaatgcaagcaatcaccaagacacagcttcctaaaatgttagaacaccggggtcagaaagatcctacaagtgtctagaagtaaaacaaaacacaacagattattttaaaaggctggtgattaaaatgtttcgattcaatcactttgcacaaggggataagagcaaaaattatacagtgtgtattataggatgcatatagtcaaatgtcaggctcaaaattaggccagtagcttctgcygcttgracgttaatcttgaagcaaggaagaatgagggaatttcgggggggtgagggcgacagagttaaggtgttcagtgcttttatttttgtcctacacatggtagcaaccgagtgctctgcgaaatagcagtgacccgttattccagagtcagggactgttcttggcactcgaagtggaatgttgaagtggaagttttgcctcccagaggatttccgttccagctagtgtctgtgtcgctgtgaagacatggaggaagggtgaatgccatttatgcaggagattctagaacactcggttaagaccatctgttgatgggtctggggagaagggaaggacacacttctgtgtttgtggctatttgctgctaggcagcttgttgatactccaactcttctgtagttgtagacttggccatagaatgaagaatgtaaaaaagatatttgggctgggcacggtggctcacgcttgtaatcccagcattttgggaggccaaggtgggtagatcacgaggtcaggagttcgagaccagcctgaccaacatggcaaaaccccgtctttactaaaaatacaaaaattagccgggtgtggtggcacatgcctgtaatcccagctacttgggaggctgaggcaggagaattgctttaacctgtgaggcagaggttgcagtgagtggagatcctgccactgcactctagcctgggtgacagagctagactctgtctcaaaacaacaagtaaaaataaatatttttrtagttattagtttattaaactgtaattttcttatttctgtaggagataattatgtatttagaatggtcttgaagggacatcatgacatctagagaggtcgtttgaagctacaaggtctgggacatggaatttgtcttttataagccctggcaccttctaaggtgtctcacttgcagaccccagggaagccattcagctttctgattctgtggtggtttctgttccctccacggaggttcctggctccatctctctgtgaagccctgtcagggttctttcactttccttgtttgtctcctttttctcctgattgcctgaaatcacattacaactctcttgtatcatctttatccatgtgccacagctctttttttttttttttttttttttttgagacagagtctcgctctgttgcccaggctggagtgcagtggcgcaatctcggctcactgcaagctccgtctcctgggttcacaccattctcttgcctcagcctcccaagtagctgggactacaggcacccgccactgtgcccggctaatttttttgtgtgtatttttagtagggacaggttttcactgtggtctcgatctcctgacctcatgatccacccttcttggcctcccaaagtgctgggattacaggcatgagccaccgcgcctggcccatagctcttaaaaaatagggataaattatagacagaacagccaaatgagaactttcttgattccctctcttcttgcatggtggttgtattagtcagttctcatgctgctaataaagacatatccaagactggrtaatatatatagaaaaaaagggtttaatggactcacaattccacatagctggggaagcctcacaattatggcagaaggcaaaggaggagaaaggcacgtcttacatggtggcaggcaagagagcttgtgcagggcaacttccctttataaaaccatcagatcttgtgagacttactyactatcaggataccagtatgaggagaactgcccccatgattcaatggtctccacctggccccacccttgacacatggggattatcataattttaggtgagatttggttggggacacagccaaaccatatcagttgtccacccacacggaactcaccttcctaacccatgaaatgcaaaaatgcctaatacttcagtgttagggatatgaaaagacagaaaaaatatttcctctcttcccctaggaagctgacttgtgcatgcacaaataggacaagagattaaaccaggaaggcacgaaaaagcccctgactacttcagtcaaattatagcttactgtggtatctttcagagcatatgaataattgtgaattggcctatgatctttgggccagtggaagagaataatattagggatgaatattttctcttctcatctcatctaaactctcaggagatgttatccaacaaccatgccaagattcttggaggaacagaacagccattgaagatgttgtagtgataacgtcacattttctaccccctcaaacccaaagtccccatggtcttaacggtttgcttctaagttagaaccatcaccttattccaccaacatcagtatggttttcttgtgtagaaaggcttctaaaaaaatgggcaaaggacatgaatagacacttcttgaaagaaaacatacacatggccaacaagcatatggaaaaatgctcaatatcattaattattagggaaatgcaaatcaaaaccacaacgagacaccatctcacaccagtcagagtggctattctaagaaattcacaaaataacagatgctggcgaggttgtggagaaaagagaatgcttaaacactgctggtgggaatgtaacttagttcagccactgtggaaagcactctggagatttctgaaagcacttaagttagaactaccattcaactcaacagtcccttatgggcaatacccaaaggaatagaaatcattctaccttaaagacacatgcacgtgtgtgttcaccacagcactattcataatagcaaaggcatggaatcaacctcaatgcccatcaacagcagactggataaaggaaatgtgttacacatacaccatggaatactacgcagccattaaaaaaaaaaagcaagatcatgtcctttgcagcaacatggatgtatgtccctggaggccatcctaagcaaactaatgcaggaacagaaaaccagatgctgcatgctctcacttagaagtgggaactaaatagtgagtacaaatggacataaagatgggaatcatagacacgggggcctacttgagagtggatggtggaaagaaagtaaggattaaaaaactacctatcaggtactaggctaattatctgggtgacaaaattatctgtacatcaaattactctgacaccctgacacatatgtatctcctccttctccccacaaaaaaatctaataaaattcttcaaaagatgtggaaatgttagtaacattgctttcgacaatttttgaatcaaagtggtttatgttttggctcatttcccagttgtttcctgatagttttgggtaaaacaaaggaaatatggacacgagtgattatattttttaataatggagttaggtaaataaacttcctttggtgattgaaagactcactccaggccgggcgtggtggctcacgcctgtaatcccagcactttgggaggcagaggcgggcggatcacaaagtcaggagatcgagaccatggtgaaaccctgtctctattaaaaattcaaaaatattagctgggcgcggtggcgggtgcctgtagtcccagctgctcgggaggctgaggcaggagaatggcatgaacccgggaggcggagtttgcggtgagccgagattgcaccactgcactccagcctgggcgacagagcgagactctgtctcaaaaaaaaaaaaaaaaaaaaaaaaaaagactcactccagtgcaattcctaaattctgtaggctctccgtcccttctagaaggatattctggttcccccatccattcagtttacgagtcaaatttgcacaggcatgtatgcttatgtgtgcttaacatattggcagtaggtcaataaatgtgctctaaactcacgtaatatccctgtttgcttgtcataacagacacatatatactggagttctctttagtactaaccaattcgctggtatttgggttgtttcacttggagaccttggagccttcacaatgaacacatggtaactttttttttttttttttaatgaggcagtgagctgcrgaccaagtagatttaagaaggaaaaaggaattaatgaaggtcttcaacttctcaactcttcattggcacactcaactaaaaactggagctcaaataactatttgctctggttggcacctttccttttgctaaaagaatggcaaaatgcccctccattctgctttgaaaactttttattatgggaaactcaaacataaccaatagtagacagaatatatagtgaacttcatatgctcgttacccgacttcagccatgagctgttcaaagccatccttgtttaatcaatattaccaccctcgttttccagactctattgctttgaaggaactcttagacatcatttcatttcatctgtaaatattttagtatgtgtctgtaaaagataattctgcacatgtgtgtgtagaataattgccaagctctggtatttaaagagggtctttgtttacgaaatgatttctacaacgtggagccaaaaatggatttaaaaaatacccttctaggggaagttaaatgcaatgtatcttcttctatctcctcaaaaatttgttgaatgaataaaaaccaaaattagatcagcacccctcttcctctccaaacaaaagcaaaacaagaaaaaggaatactttttatattttaaatgatgtcttgggaacggaaaatttgcatttctcttcccttagtagaaccagaatgaacgttagatttaaatgtagtaggtttgggtttgactgtggtggtgaaaatggctttgtgttactgaatagctgtagctgccccatattttgcattttcagatgtccagtcaagtgagcactaatccttagtgtccacaacaggaacgttcccgctctgcccctgatacgagcttggatggccatgaggcccgaggaagttcactgattgccttaggtgaattgattccatgctaatactggagtactctttgtaatggcttttctgtagagacatattaggagtagaaaacatggaggtgccctctgctgcttcacatttcacgctgcagaaaagatgagcttgttctgtcctgggtgctttgaaactggcatttggttctatagagtgctcctggttatctgcatgggctttgtttttcagctggagtgattgttaaatcaagtcatgctcttccccagacatgcctttagtttctgtgtaccccaaagaatccctgcagtttctgtcccagttactttgtttgttaattttctagctttttttttttttttttaagtcaatgactgctgggacctcgcactggttggcagtgtgctcccatctgctctcttcaagctgaggtcacagacgggctcctaaggacgtgacacctcatctagtgatactcagaagctattgttttgcagtatttttttttttttttttttttgagataggttcttgttctgttgcccgggctggagtgctttggcaggatcatcatggctcactgcagcctccacttcctgggctcaagccatcctcctgctttgcttgagcctgttggttgtaacattgagagacaaaataacctgggaagagtgcagagtgcatgcaggactgacttagaaaggttgtgttagctggggaatggggatggagcagacttagaagcagatgtgaagcatcttaaaaacaactacagttgacccttgaacaacacgaatttgaagtgtgtgagtcacttatacgtggcttttctttgcctctgccacccacgagacagcaagaccaactcctcctcctcctcctcacctactcagcatgaagatgagaggatgaagacctttacgatcatccgcttccactgaatgaatgctaaatatattttcgcttccttttgattttctgaatagcatgtcttttctctagcttacttgttggtaagaatactgtacataatgcatagaacatacaagcgtaacaaatcccaaaatgctgggattgaggccggcccctgatggatccccaccgactgtggctgtctcaggaacctgcatggctttcacttgcacactcatgccccgtcagacctgtgtgaattggttagtgttaaggccctaagcactcatttgcgtaatgagagtctttcacttagaaactagctcatcctgctgaccctctgggccagcatttagcatctgtacctggagcctcggctgtgggaactctggccaccggtctaggcattatcatgaggggagccctgttagaacagaggattctcaaaggcttatttcttccctctgacagtcatgaagtgggttacattcatgtaagttggaggagatttattcagtgcttgctctgaatgacgaagttggcctgtctaagggaagctcagatgccatggaatgcagttcccagcccacttcagtccctgtgaaatctgtcagcggatgccttttaaggatgcagtctaatttgtggagagtaagatataaggcttaggggtgatgaagatcacagctctgaattgaagcagattttagagctattagaatcctatgcagtgcacctatcaaaacatacatttctgatgaaagaaattttattccgaagtcaaattatagttgtttcaaaataggaagaaaagaagtatcttcagctcttagcatttttctgatgttaagaacatatccatttatttttgccctaaagagaagttacaaagcatccaactcctttgtgtggaattgatttgagtaagtgtgaagcaaaaagccaattcagttttatcgaaacttatttgttttcattaaaaagccaatatttatttatttattcatttatttatttattcatcgagatggagtctcgctttgttgcctaagctggagtgcagtggcgtgatctctgctcactgcaacctccgcctcccgggttcaagtgattcttctgcctcagcctcctgagtagctgggactacaggtacctgtcatcatgcctggctaatttttgtatttttagtagagacggggttttgccgtgttggccaggctggtctcgaactcctgacctcagatgatctgcccacctcagcctcccaaagtggtaggattacaggtgtgagccgctgtgcctggccgccaattcagttttaaatagaagatttgaaattaagcaagcgtcctgtacctgaacagcagacattaccctgaagagcctgttggttgtaacattgagagacaaaataacctgggaagagtgcagactgcatgcaggactgacttagggaggatgtgtccgctggggaatggggatggagcagacttagaagaagatgtgagcatcttgaaaacaacttcagttaacccttgaacaacacgagtttgaactacgtgagtcatttatacgtgagtcatttatacatgggttttcttctgcttctgccacccctgagacagcaagaccaactccgcttcctactcctcctcacctatgtagtgtgaagatgataagggtgaagacctttatgatgatccacttccgcttaatgaatactaaatatatttttgcttccttatgattttcttaatagcattttcttttctctagcatacttgacgataagagtaccgcacataatacatagaacatacaaaatatgtgttcatcaactgctatcagtaaggcttcaggtcaacagtagtgttttggtagttaaattttgggggagtcaaaatttatatgcagatatttgacttttgggggattcagtggaaaaactagaatttcagttttacagggtcaattgtaattccagtgaagttcatgcacattttacttattttttgaggtatggcagaagtgattctcttagggcaaatgtggtctgtgtgagatgaattgattttccctcttggtgaatttcctcactggttagcccagagcaggacaaggcaacttattgttatttttccccttagctactgtcatttctgtaccgtggaagacaatgagagctgttggtttggtttaggaggtcacatgtgtggagggctgggttagcatggatagtggagacatcaaagtgttaaagacctcagtgaaaagctctgagttagcagatgtgcagcagagtttgctgtgaggtgaggacaagctgtgttttgggggccaggctggcaaggattggtgctccagaaagtatttgaagattaatttgaattgaactggaaacatgactcattgtggtccaagtgttatagactgaatctgccattttcgtcttcagttgattccagggcaggtacagagggcctgatagaagatggaacaggagctcttatggtcttgggtgcctgtgttattatccattctcacactgctacaaagaaatacccaggactgggtaatttataaagaaaagaggtgtaattggctcacgattccacaggatgtacaggaagcatggcttgggaggactcaggaaacttacaatcatggtggaaggcgaaggggaagcaggcatgtcttacgtgggctggagaaagaggaagagagagaagggggaggtgccgcacacttttaaacaaccagatctcatgataactcacttttaccatgacaagaccaaggaggatggcgttaaaccattagaaactgcctgcacgatccagtcacttctcactgggctctgccttcaacactgaggattacaattgtacatgaaatttgggtggggacacagatccaaaccatatcaaggtggaaccttggaatagaatgaaatgatgctcttgcaaagaaaccctgtcctcatgcaggggagcagcctacgttttctrtctttgggcctaatagcagcggctttgaacagatatccatacgtttagtaggacatttgactaccatggcattttgcatccttgtaagctttcatctaaaccacagttttatgaaagattctctcaggaatagagacactccctcattaaatcactgtacatattaagtcagtgcacacagtaagtcatggtgcatcatatcaatgaaaagaaatgggctattttattcttttcattgggttaaatcttactggtgacagaaagtactccaacagttgatactgtaaatagttgggtctaatggtacgttgcctggcttggttctctgagtttttctcattgaataccctctgtctctgttctgtcttcacgcactttattcctgatcctcagttttctctcagctgttctgctaaaattgcatgttctggtctccagcagttctcttagtgtgaaactcagtggcctttccctgttmaccttctcataaatttgttacatttttcatttgattactccctcagttcccccaatgttagttccctagtcattcactatccggatctctcgattgattgattgattgattgattgattgattgagacagggtctccctgtgtcacctaggctgtaatgcagtggcatgatcatagctcactgcatccttgaactcctgagctcagtgatcctcccgcctcagccttcccaagtgctggagttacaggtttgagccactgtgcccagccttatcctgatatctcattacatctcatttccagtgattcttcattcttctgcctcattttaatttgctcatatgatgcaagataaataaaacattctccaaaagttgccttgaagtttggtggtgtggctctgccatgaagacccatgagtgttgattttcttaggcaagccagtctagaaattttgcgktcagctgtgggcttttactatctgtaaaactcttgcaggagccaagtattactattgtatccagakagaatcctagctaattctagtgtaaagaaatcagtgaggagaaaagtaaaacataattatgcaggaaagtaggcttttatgactcaattaacatattttacagcgttttattacttcaaggcaatatttaatttacaaatgatttaagattttaaaaactgttggaactgagttaagatgggtggaaatattaagtacttcagtttttctrtgctgcctgatactttgtactagccagtaaaatatttgttaaagaagtgtttgtccttcctttgaggtattttctttttttttctttttagtggctgagtctattggaagggccttagttatacatcatgccatatggtattagtgacaaaaatattttgaggatagatttaataactaaaacaattaggttagaaggccattgtgagaacgcttggccagttgctttcagatttaatcctttgttacgttacagtccacagaatgtagtgtcttttgcctgagatacagaaagtgttatttctgatgtggattggattttggctcatttagaggacgtcaccaatcctatacaacagagcaggatggatttcttttctaagttaatatgaagtgttctgtgcaatttatgtatatggttgtgtgtgtgtgtgtgtgtgtgtgtgtgtgtgtgtgtgtttctgtttctgtttctgaatatcttttaaggtgttacttttttgagaaagagaaatttattggacgttttaattgtggtggtctgcagattctccatagcaaccgggggtgcaggcttactccagaagcaagtagcagttggggtcaccaagtaatgctgttctatagattataccggtgagctgcgtctgcatttgatgcctcctaagatagtgtgayatagttggattgtaagaagttgggtcatggtttttgtttggattttaaaaattgtcaaatagacataacatacaatttgcaatgtggaccagttttaactgtacagtttggtggcattaattatattcacgttgtcgtgcagccatcaccatgggccggagtgctttcctctcccccattggaaactctctacatgttgaacgtggttcccagtccttacccccttctctgggcaaccaccgttctgttttctctttctatgaatttgaccactatagaaaaagatcagtttctcccaaactttgcctaaatccccaaatagattccttttcccccctccggcttcttttgaacattaaagcatcctggtgatttatgctcccgcctcaattcctccctagcttctgtctggctgtgtcaggcctgtttcaggtgttaatttctgtgatcatttccctggtaaactcctggatggcaggttctaggttttaytcctgtcgtcctggaacttcacgcttgtctctgatgcagtgcaggcctcagctccgtagggaggttaacaaatgaagctgagttccgcaaggcagcccaaagcactcgagttacaattgcagacagtgggaaacggcaagtcagaggaagagcgctgggacactgggccgggtctgcgttagtgggtttgtcaagagccacggaaatccttttaccctgcctctcatggaataatgctttagttaatgtctgtatcggtgacaggtcccgcttttaatgagcagctcacttataaggtctgagtatgatcaggaacctttaggaacaaacactctgttgtggtcctggttgtgggactcagggacacagtgttctagtccccgtttaatgacacttctcgtttcctgtattgttccattttggtacagttaaggattgggagctaattccaaagaggtttcgttagctgtgatggggagctgatgaagaggcagcctcttagacacggaaggcagcacacagcaggccgaactgtgtgtctgagcatcaggctcctggtggtggctttggctgtgtcactgggaaggtggagggggtggcctctcggaggctgcacggtgggtttctgagcctggttctccaggccaggtggatgtgayggtgcctggctgtcagcggccaggccggctgtggatgacgcttgcctttttcctcttgatagaccatcatgttgctcccatcgtcagcaatgagttgtcgtgtcctgagatgaactccctgttgtcggaggcaggggaagagccgtcgcgtagcacatccggtgtgtgtgtctgctttgtcaggcccacttcacaaaatacgtttgaaatatgaagtttccccagataaactgtgaagggtgaagagtgctttagatgtgtgctttccccagattttatttacttatttgttcccaaactcatttcctgccttcccgtgtttctgcaacaccagcgcttcctagtgtgagccttaaagaaagacgatatttaacaaaagaagaaggggaggaaggaaagaaagcgggagtgggggagagagaaagcggggaggccctgtggggagctggggtggggaggccttgcggggtgttggggagagagagagagagaaagcggggaggccgtgtagggagtgggggagagagagaaagctatgtgaaaggtgagtcaatgaaaacttttgcatttataaattacccagtctccagtatgtctttattagcagcgtgagaaaatactaatacaccccatctctaccaaaaaaaaaaaaattagctaggcatggtggcacacacctgtggtcccagctactcgggaggctgaggcaagaggattgcttgagtctaggaattcgaggtggtagtgagctatgatcrtgccactgcactccagcctgggtatcaaagtgaaaccctgtcccttaaaaaaaaaaaaaaaaggtaagcctcaaagttatcctcatccaccagatatttactaggtgcctgtaatatgccaggcattatggtgtgtccttaaacctttatttgaagaagttattgggctcaaaagatatctgaatttttctacccatattttatttgtgctagtcttctatttttccttatctctcaagttgataaagctctcatgaagctaaagtatgatcagaaaaacttgtttctggcaaggcgcagtggctcacacctataatcccagcactttgggaggccagggtgggcggatcacctgagttcaggagtttgagaccagcctggccaagatggagaaaccccatctctactaaaagtacaaaaattagctgggcgtggtggtgtgcgcctgtaatcccagttactcrggagggtgaggcaggagaatcacttgaacccaggaggcggaggttgcagtgagctgagatcatgccactgcactcccgcctaggcaacagagcaagagtccgtctcaaaaacaaaaaaagaaaaacctcatctccattagactcactgtgtaatttctctttggcctattctgagttcctttgttaaggcttccaaggtgctgcctgcacccagtgctgtgctgtgaatagtgacctcagactggttctctatttgtgtgtttgttcttgcaattctgtcatggacattaatggaaatatttaggttttagtgaaataatttttttttcctaggagaatgaaatcaatgggcccagtagacttgttttcactttggcttgttttaataaaaagcatttttataagctgggtcggggaggaagtgaacattgtaaaaatttctcaaacatttgttattttacaagcgcaaataaatatgtctgtttaatttaaaaagttaacttattgaacaattcctttttctgcaccttccctccccagttaaggcaaactattaaagaatatgcataaatagtagagcttttaattgctattgatgaatagcacccttttgcatgtcttttatgtcaagccttgggtgagccctgtttttgtcttattaacacacattcgtagcgtcttctctcatttggatgtagatttagatgctctcttagccactcttctcagccttattgaagttcatccactgaaacacttgcaagaaacagaataaagtagaaaagtctcagctgtagaaacctacaataaactgcagttacacacagaaacccagtggctcattggtaccaagagccaataccagtagcctccataggtgaccatcactccgcagatgacttcggcggtagatgacctgtaggtctggaagagctgtaaccattcacctttcttttttttttttttttttttttgagacagagtctcattctgttgcccaggagactgtagtgcaatggtgtgatgatctcggctcagtgcaacctctgcctctgagcttcaagcgattctcatgcctcagcctcctgagttgctgagaatacaggggcgcaccaccacgcccggctaatttttgtattgtttttttcagtagagacagggtttcaccatgttgaccaggctgattttgaactcctgacctcaggtgaaccgcctgccttggcctcccaaagtgctgggattacaggagtgatgcgcacagggtcccatgtgaagcccaagtcatgcttctctgggtgtcagtcacttcatctgtgacttgagtggatgtgactagcttgcaagttctcagtgttgggggcgcaggaagagaggaaggatctttaccaccacagtggacagggcggcagtggtgggtgcaggagacaggtgctcttctgaaaagttctgcatgtggggatgccttttagtctctgatcctctcctgggaagatgcctgggtttaatgaactaaaatgactttccgactctgacatcctgtctttataaggtaaagaccattagattcaagagcataattggatagatatgtttaaaggttgtctttcaggattattgtgctgatcacagttttcacctggctttcctgtcccagtggatagtgagaatgatttccctattaaaaaattacccatcaacagactcctggttagacagtgtgttgagaattaatggtgtgtgccatcgagtgatgaaaggcagagagaaggtcttagcctatgggggaattctgagctagaactcacagtgtaatttttccttctttacaatgacatggtttataatgaagccttggtaggctggaggacttgtgtcagaatacaagtaccaaagaagtcacagaggaatattaactgagaaggcttttaagaaagaagaaaatacctatccttgtgctaggccaggcattgagggagggacagaggcctggctgcatcaaggtgtcctgacctgccttggagctggacagtagctgggcttgaagatgaccgcaaactgctgcctgtcccccttccagggaggacgctaccatgggatggattagacaggggaaaaagcatcagaagtcagatgagagaccttgtctttgttcctctgtttcctgacagcagcaaagattttgatcagaggtggtttttgtggaggtataatagcaaaaattaaagaaccacatctgacttgggaaggggcatattatatgggaagtgagagagagggagtgatgggggatagagagagatgggaggaagagaggagcagagagagaggaagaaagagagagacagggagctggaactgctttagctaaggtggcttggtggagtttttcttgcttgtataattatggtgattattaatttaaagcttgtccttcccaagtgatgcaagtacctgctcctgggccatcctgtgctaaggttgcattgctgaacggatgacagggtgggtggtgtatgtccctaaggccaccagagatggtttactcaattcayatgcttcctccacctgggatgaaagcggttaattaatgtttgattctaagaagtcaggtgatgtgattcagattagttatggggttgtgctgaagcgcgggtggaccctaggaggtgattttaacggaagtctcaaaatagcagccttggaactagttggactagttatttttaaaaataatgagaaatgttataaagtcggctgaaggtattgatttacctttcaggttgttcagaaacagaatcttgagaaatagcctgctacacagttgtaagggggataataaagagatcccccttctctaaaaaacgtttacaacccaatctttgggcagccgagatttttagcagccgagaagggttcccaggggccacaggttgtcttagaccatctccatcagttcctagaaatcgtgcaaagggtttcttcaggggtttctgaggcctgtaaccatggtattaaaatctgactctagaattctttgacatttcttgcattgaggggtgagacccatgttctctgtccttgaatctgggtggctttgtttgggactgttggatccaataggggacagcccgagtgacctcgggtgacttccaaggctgagtgagagaaggtgacacagctgccacctcatttgctggaacccttgtcctgggcacctgagtcatgggggaacaaatgtggttccatgctgtgaggccgccatgctgcatggagaggccatgtataggcgctgtggccagcagtcccggccttcccagccaaggccccggttattgtggagcagagacgagcctgccttgctgtgttccatctggatttctaaccgaggaatctgtgagcatcagcaaatggtgttttggcccctgggcgctagggcagtttgtgacccagcagaggtacctgcagcagcagcagcacctcctctctccctccagctcatgctctttgcagaactcaccacacacatttcctcagttccctcaccgcttttgtggttgtggggatgtctttagcacccgtgctgtgctgcgctgatggctgctgaggactggacgccagtacctaagctcggctcgtgagaacctccgtgcaggaaggggcccctagagccagaacagaggctcttccttctgcttccagccttgggtaaaaacacacgccaggcgtcattgacatcattgtcatcatcatcaccatcattcactgttggtcttttccatctgtccgctgtcattttagcctcagccatgacatttcttagtccgtgaaatgctactgagattgtactgttatttgaggtagttcttttggattttattaaccccagtatatctgttgcttacaaaataacgagccacatgctcatacaatggcagtgaaggttctatatctggcagcctcatgtgaattcaggagccggcagggaatttaggggagaagtaaggcaagctctcaagttttccaagccgcatgggctgcttggatctcacaagtaatgcctggatttaaatcactggggaaggcagccttctgctcctgtatagtagaaatgggtcccagtcttgagaggctgcaagtttaagcttttcttagtcaccttgttcttacacttttttttggtacaaatgtatttgtacacagagagacttttgcattttaagcataaaagaaaggatgacctcagaaagtgagttccatctgggactattattatttcagcacttactttatcaaagaggaaattgttttatgtagactcctacagtgggacagccatgtgccaaaaattaaaagtggattaacacattatataaaaattaactcaacagattatagatctagatgtaaaacataaagctgtaaaacgtttagaagaggacatgggatttgtgggttgggattaggcaagagttcatagacatgagaacagacaacaaattgataaagtggacttcatcaaaatgaaaaatttcctgtgtgaargacacttaaaagaatgaaatgtcaaaggacaaatacagactgagagaaaatattttcaaatcacatacctgacaaagctcttgttgtatctagaataaaatggactcttaaaactcaacaggaaggaaaaataatccaattacaaatggagaaaagacttaaaaagacacttcaccaaagaagatatacagatggcaaataagcagatgcaaagatgtcggtattatttgcattagagaattgcaaattagagccacagtcaatattactacacacctattataattagtaacataaaaaactgacaatatcaagtgtcgacaaaggatgtggaggcactggaactcttgtatgttgctagtggtgtgatcccatgcaaaatgggaaagccaattgggaaaacagtttggcagttcttacaactttaaacatacacccaccatacaacccagcaattgtactcctgggtatttaaccttgagagatgaaaacttaygttcacataaaacctgggtaagatgtttatagcagccctattcatagttgccagaaagtggaaacagcccaggtgtctttaagcagtgaatggacaaatgacaaacagattcattcaggtaatgaaactggctcagcaaaaaagttgaaagaactattgatacaaccatggagaataatcttgaaggcatcatgctgggggcaaaatactagtctcaaaggttgcatgctgttagattccatttatatgacgttcttttttttttttttttgagttagagtctcgctctgtctcccaggctggagtgcagtggcatgatctcagctcactgtaacctccatctcctgacttcaagtgtttctcctacctcagcctcctgagtagctgggattacaggcacacgctaccacacccagctaatttttgtatttttagtagagacagagtttcaccatgttggccaggctggccttgaactcctgacctcaagtgatctgcccaccttggcctcccaaagtgctaggattacagggcaaaactttagatcagtagttgccccgggggttgaggtggaggaaggatgtgactgtgaagataaacagaaggagggatttttttttcggggtgatgaaactgtatcctgatggtggtggtgggaatggaaatctatacatgtgtaaaattcataaaactatatacctaagacaggtcaactttattgtgtaatagaaacaaaaaaattaaacaatcttattattttgttgttgttgtggatacgagagaggaatagggagaacttttttttttttttttttcaaggaagacctggtttcccccagtggtctggtggcccaaattagagtgacatgaagggaagcactgggggcaaaagtccctcgtatgaaggacagcagggaggagacgatgcttttcatggtagtccgcagggcatggcgacatccctatgtttgtcttttatttacggtgactttcctaaaatayattacccaaagaattgcatggagaaattactgtgcaacccctttccccaaggggaacaccaaaagggaatctagttcggttttaagagcagctttggaagcaaaagagcggttgctttgggaccaggaaacaaaggcttgacttgaaatgatgagaaagagccagagatttgaggttttcgttttccagtgaactttttagagagttaactgcacagctcaaaacggaggctaatcagaggtgcacaattaaattaccatgcaccacttagaaaattaaagggtaactcgatagtctgtgtgatttcgaggattaattttgagacaatgtaaatggctattattagtatttgtattactgataatctttacatgggatgccagacgtgttgtgggtctttggaacagtagctgtctaagctgatttcagagacgaatacagagccgaggctattaaacaagatggcctggtgatctccagggtctgcttttgcagcttaggagctttggggaatgtgcgggggagttattgatgggcaggtgccgctggcatttcctgggcaggggctaaggatgtcaaatgtccctcagcgcctggaagagccccatacaatgaataattgttcctggtgatcttgaaatgttctgccagacacaaaggtgaaattatgtgtgcagtgaatggagcttggaacctaattccagctctaagttgtttatatatggtttgtatagttttaaaatagtctgaatttttcaagaatacagctgcctggtaagtccaatgaagatggctcttttgtttggaagcttaacaagagttgtttactcttagaaaatcagggactacaatatccctgttgatatttcaatccaggcaacacatacatatcagtgtacatttattttttctggttgcatactggacaattttacgtatgactattcttgtgctgcattcaaaatactgcatagaaaagaatgccaacaatattcagtttaatactgttttcttttaatttttaacatatttattgagatataatttacatactatgcaattcacccacttaaagtgtacaattcaatggttttagtatattcagagttttgcaaccaccaccaaaacattagaacattttcatcatcccaaagagtaaaccgttacccgatagcagccacttccatccccaccctgatactatcttctgtcagatccccacttatttattgttaagtagataaaagatttgaccgccacgttgtaccttctggtagagttgtacctgagcctgtacctactgaagtgtgctttattttcttacgaattactttccactattttttctctctcaagattgggcattttgtgactttaaaatagttatatgtgagggtaggttttgttacctctgaatatgtatttagaagaagagaagtccttggctctgactggattgagaagacatccatgggtcttccttacacagaggtgatgactaagcagcagcacagcagataccttgtgataatagaaggattttaaacttctctgagtacagctttattatttcatttattctctacctttaatattggttatggcctgaacgtttgtgaactccccaaattcctatgttgaagcccccgcagtgtggctgtgtttgaaagtggggccttgggtgggggcgcggtggctcaggcgtgtaatcccagcattttgggaggctaaggcgggtggatcacctgaggtcaggagtttgagagcagtctggccaacatggtgaaaccccgtctctactaaaaatacaaaaattagccggacgtggtggcgggcacctgtaatcccagctactcgagaggctgaggcaagagaatggcatgaacctgggaggtggaggttgtagtgagccgagatcgtgccattgcactccagcctgggcaacagagcgagactccgtctcaaaaaaaaaaaaaaaaaaaaaaaagtggggcctctaaggaagtaattaaggctcagtgaggacataaggctgggtccttaatcctttaggattactgtccttaaaagaagaggcacctgagagcttatgcactctccctccgcctcccttctctgcctgagcacacaaagaggtcatgtgaacacgtagcaagatggcggccacctacaaaccaggaggagaggcctccgagtgaaactgaccatgctgcccccttgatctggggcttcccagcctccagaactgtgagatacgtttctgtttaagacacccagtctatgcttttctgatggagtagcccaagcaaactaatacaagtttcttctagctggtaagaacaaccattcccttgggaccatagtggaagtgagtacagccatatctgcctttgagtaaactctgactatgaggagtaactcagggaactcagattggggtggagttcacaagatcctcggctgcagtttgggctctacctcttggtttttggagctccccygcctggtctcctccgcgtcttctctttttacttctggctcttcactctgcaccatcacctcttactccttattccattatttttcaacgttgcattgttgctgaaccgcagtgtttagcaaacctttattttctcataagctgaatatgcggtggagagaagggtttcccacaaacatactagaaaaaatgtgtgtgtgtgtgattatagtaattattcacacttatagcaaaacattcatttgattcaggaaaggacaaaaggtaaataaagtgttcagaaatctcactattgtagagctagaatcattttgggactacctagacaactttgtgtgtgcataggcaatatatttacacaggcatgtacttttacattcatagagtcctactatattcactaaactgctttataacagtttttgttgatgtttttggcaataaatacagatgaaatataacattttaaatagccatatagaattccattttatgtatgtattatgatggttgtaacttgagggtctttgggatatatctctgtctctgcctatgtctctgtctctataactctatcatctgtatcatttccctaatattacataatataaaatgcaaattttgttaaaaagaaacctttttaagcaaagttctttgtacttctgattatctctgtactatacattgttccaaggaactttttatcaatatgtactttcttttcttaaagatgttgaaacaaactttatttttggacatatcaaacctaaagaaaaagtacagaggttaaaattaaaaaaatctgcacagcacctgtggggctttatcaaattctaacatttcaacatacttcagattgaaaaaaccactatagttgaaaccccatgtaatattggggctcctttccaacaccttttgtcttctatggcaactgctgtcctgaatttggtgtttattttcctcattttttttttttttggttttttttttttttttttgagatggagtcttgctctgttgcccaggatggagtgcagtggcatgatcttggctcactgcaacctccgcctcctgggttcaagcaattatcctgtctcagcctccccattagctgggactataggcacctgccaccatacctggctaactttttgtatttttagtagagacggagtttcaccatattggtcatgctgcaaactcccaaactcaggtgaycaacccgcctcagcctcccaaagtgctgggattataggcgtgaaccaccgcgcccagctccatttatgttttatattgcatgtatatttcaccataaatcatagttagtattgtttttacctgttttcagactttccataaatggtatcaatataaataatttttcaatttgctttctctgcttattccacaacttctctgttttcttcatgttagacatttaggttgtcttttgcacatttttactgttaacaaacagagctatgaagaatactcttgggtgaatgttctggtttacaaatgagagcatttctctgatgataatgagacagtcattttccacagtggttatcatctagccagcagcatgcagtaatccaagttttcccatgccctggtcaaagcttcatttttggccttgggctagatgtgaaatcctgtctttctgtggttttcatccattttctgtgattgctagtatggttttgtgtcttttcctagacatgagggtttcctttgtccattcgcctccccactgtcccctcttccatttcaacataccctgtttattagaccttacttttgtgctgtgctgtgtatgtgtgtgtgtgtgtgtgtgtgtgtcttccataagttttcatttcaaattcttaaaaattttcttgtatattccttctaraatttctaaaaagtaaagatctttaatccatctggaatcgatgcctgtatatagggcagtcattgttcagggccagtcagtttcagctgggagcgccctttttcatcacaggtgtgagtacaaacaggatcattttccttgtgtactgtgtcagtccactttcatactgttatgaagaaatatccaagacggggtaatttataaataaataagaggtttaatgaactcagagtttcacatggctggggaggcctcacaatcatggcagaaggtgaaggaggagcaaaggcacatcttacatggtggcaggcaagagagcttgtgcatgggaactcccatgtataaaaccatcagatttagtgagactcattcaccatcagtagaacagaataggaaaaacccacccccatgattcaattcccccctagtgggtccctcccatgggacacgtgggaattatttacaattcaaggtgagatttgagtggggacacagagccaaacaatatcatgtaccgtgatgtgaaaaagtttgggaagtgctggtcctatttgtcattttatgacattctgcatacatttagaggtcaaatttgtcaagttccctaaaaaaacctccaatggaattttgattggagttgcataaaacttattaatggaggaattgaaattattatgatttcagtttgcattttctaacaaatgcattgcaaatgtaagaaattatattttaatggatggactcagtgctgagtgctgacaagcatcccaggtgagtaataaacccctgccttcaagtagttcatagcttaaagctatatgcttggaaatggacaagggagagttacaaaatatggaggtattaatgggacattttgactatactaagaaatatacaaactctcgtgttaaagaattcaaagggagaagagaccatatcagtgtgtcagttttcttaatgatttggtgagtacctacattgtgcaccttaagatgggatattttatccctgacgttattttaccctgaatcactgttaagatgctcataaatgccgggcayggtggctcacgcctgtaatcccagcactttgggaggctgaggagggcagatcacaaggtcaggagatcgagaccatcctggctaacacagtgaaaccccatctctactaagaacacaaaaaattagccgggcgtgttggcgggcgcctgtagtcccagctactcaggaggctgaggcaggagaatggcatgaacccgggaggcggagcttgccgtgagccgagattgtgccactgcactccagcctgggcaacagagtgagactctgtctcaaaaaaaaaaaaaaaaaaggatgctcataaatgcctcagtgaaacttagggttaccctctccttttcaaagaagagatccaccttttcttttttaactgagagccttcctcctcttcccttgcagaaagattgttaatttgttttatataggaggaatcctgtaataaaccatgtcattattaattaaaaataacacatgctgggtcctgagggaactcaacatggagaaaagcagccactgaaattttaacaggagtgttttttttagacgatttatttaattatctttactattccgagcagtggaggaactgggccgttggcaggcccttatgcgcttggatgggagttgctctctcttaacaggcagtttagagctacagagtcagtaattttaatctcccagtgaaaaatggcatttggaattggccttgaatagtggaggatgtgggtcatggagggtctgaaagaccctgggccttgaatctccatgtcagcccgcaaaacactgaggttagactctttaaactttactttcttcatctgaaaaatgaaaagtgcttcctattacttaacctcccagaatggtggtaagaatgaaaaggaattccatatattggctctcagcaggtgtgactttactgttctctgcaattgttgatcttacttcctatagtgaaatggttcctttcataagaaaatactccagtgattctccaggaaaaaaatagaaggaaagaagatttcaaaggataagctcattttttccaatcctagagaatcagcatctctgccctggttctcttgtctgaattggagaacaagtggctgtaaccctctgaccctccggcttgtttcatttataccgcggggcaagatggtagagaacacttaccacatgattggaagtactttgaggaagaactagataaaagtgagtcattaattaattgttaagagtcagcagctgcacactcaggcgtctcgtttgatgggaaagggaagcaacttgagtgaatttaaatcacttcgcatgtatgacagtgtattaaagtaatgagccatgcatctggccaagttggcgttgtcaagctttgactttctctgtctgtctctctctctctgtctctgtctctctctgtctctatgtctctctctctgtctctgtctgtctttgtctctctctttctctttctgtctctctccttctctgtctccctctctgtctctctctctgtgtctctctgtcttcatctctctctgtctctctcagtctctgtgtctctctcagtctctctgtctctctctcttagtctctctctgtctctctgtctctctccctctctgtctccctctgtgtctctctctgtctctctgtcttcctctctgtctctctctgtctctctctcagtctctgtctgtctgtctctccctctctctctctctgtgtctctctctgtctctctctctctgtctctctatcttcctctctctctgtctctttcagtctatctctgtctctcagtctctcagtctttgtctctctctgtctctctctctctctctgtctctctctttggtagcacctagtttaattcctgtagcttacatgctacaaaaagattttacaaaatccagcaataaacaaaatgaaacttcctgatataccataactgatacctgtgactctgggaatttcttaagacatccggaaataagtgtacctttgtacgtgaaggacgtttgttttccccaagatctaggtcaaattaagaacagacttgtgtcccatccagtttgagataggctggttggctttctcagggaccttgtgtttgcagctctgtgacagtattcagttttaaactttggatttctttctcctgaatgagcaaaagtaatgcttttgcagaacgccggggaattaattgctgctaagatttgaagaaagacatgtgcacagttcctagctctgtatttttaccccaggagtactgcgaacttgatgattttggtttagtgacttccttgccagcggacttacgttttttgtttgcatgttgactgctttgcctagaagttctgagggacatagtttaaagatgtcttgcagtgcacctggttaatgaatccacccacggaaactctgcctccgtgtctctgactttgtcttctgcgatccctcgtgtggccctgctccagtgggcttggcttccttcccttttgtcagagatgccaagttggtttatggcccggggcctttgtacaggcggcactctctgcctggaacacccttccctcagataattgcatggtttactctcaattcctttaagtctctgctaaaatgtcatttttttcatgaggatttgaggaattgtgtacaaataaaatcagccccaccctggcagatttatttccctttttagcatttttattgtctgataacatatttgccacttgaccattcgtctgtcctagcccagaatagaagacgcggagacgcgaacctttattattttctcgctccagttccctcagcatttgggctgtgtatttactgaaggattgagtggatattcttctatcagtatgactgatgtgtcatattgtggctcaaggcatatttaacagagccactgtgttacattcctgctaatgaaaggtaaatgttatttcactcattcaagtcataagattcttgattgagcccaggtgccaggtacaagtccaagtacttgggcattggctgacctggaattcaggtcatgtatttctaagtggggacaatatcacctccaaagaggtgaaaaaaaaatcatgcttttaaaatgtgccaagcacagatgtcagtataacacataaaaagatatgaaggatatctgtggttttacaatttcatgaggaggaggtgtttagaacaaatatctaaaagggcttcttaggggcatgataatgagagaaaaaaaggttgtgaaaccgtggtctttagggcagagaatatcagtgagaacaggcaagaaggttctggcagaatgcctcctgtgtccccatgaatttgccactttctcttcttcccagcattagccagaatttcatggtcagacctacaagtaccagctccagtggacacttctgtgttgcagttaattcttctccattcaatattccttagagttctcagaaaatcatttcttccttaagatggtgcatatctttgtggtttgcagccaccgtcttagactgtcccaagttgtggttaggataatactgaattgtggtgttctatgacttgctgattttttggaatttataacgaagtcaaatatctttttcatccagagatacaattttgtcttccaaatgacgcccaccaggggtttttgtgcatttccttggtggtttaatagaatttgaaacctaatatttcatgtcattttgttacataaattagtgttttccttacgcaggttcacacaaggatctgactcagatcttttaccttctcctctgtggaccaggtcagcgtggccagaagctatgatattgctgatgtgtactttttttttttttttttttttgagacggagttttgttcttgttgcccaggctcgagtgcagtggcatgatcttcgctcaccgcaacctccgcctcctgagttcaagtggttctcctccctcagcctcctgagtagctgggattacaggcatgcgccaccacgcctggctaattttgtattttcagtagagatggggtttctccatgttagtyggctggtcttgaactcctggcctcaggtgatctgcccgctttggcctcccaaagtgctgcgattacaggtgtgagccaccacgctggccatgatatgtcttcgcttggaattgagagcagatgcttttattaaaaataaggatcttaaattctgtaggatttttttttttccattaagctgcctctattttcgaatgatgagaggaataaaaccatgtggcttcccacagctgcccacatgggtcctgcccatggatttagtgtgggccagtcctctgagtaggctcacacactcaggacatgaccctgggggagggggcacgaggacaaagccctctcctgaaggagcagtgctttccaagccctgcaaagactgcaactgatgagggggacacgaccagaattttagaaggaagtatgtgctcatttagtacacggttgtgagctctgccacacactagatatcacatttatcaatagagaaacaaataggcatagtccctgagtttaaggacttcataggcatgcacatatgtatgtgtggtttgcatgtgtgtgtgtgtgtgtttatgtgtggggagggaggttatcatgttcaccagcctacatactatggctatgtaatatcaagaggttcatggagagtccaataggggatctttttcagaggagttgatcctggagaaatcctcgaagtgagcaggcatgctagaccatcttggcaggccagaaaggggaacctcttcatttacaggcacgatgctagtgactttgagacttctcttcatattttgtgtggaatgaaagagagctgaacagagggcttgagtgacttgtcctgtgcatggtggatccaggttttaaactcagttgcatgggagaagaatgtcctccaggtcgcaggcttccttggggaccccgtggctggcctgtcgtcccctgcatagttcattccaaccttgctctcatctgagtgttccttgtgctgctttccagcctggcggggcccatcactgacccattggcgcttccctttcctgggtgtgctgggcccaccagcctccacccagcccctcacctgcctgctcatatggctttggggtacgctcactgccttttctagcccagctggctggatcccttggccgtagcatcttttctgctgggctctgctctcagtgctgtttctggtctgcactgctctgagcctttctaactgccctagcccagctgtaaacattgctgtttttcttgccattctgataaaaatccaacacaacccattcactaattagaacattgcataaacatgagtcctgttgagggaggtcatgcgttttggctcttcaaggttcaccatctgttctcagcatggtctttgtatctcttccctctgtgatgaagtagaccaagttcagcttccaattgttccaggaactcagaaattctagtgttcctgacacttccagttttccctgtgttgtatagattagccttaatctgtgtacttctatgcctgaacatcttcttaataacagcaaatattaagagggctgactatgtctcaggtgctgttgtacaggttttacattaagacttctagcaagcctgtgaggtggggactgttcttgtccctgtggaaaccgaggatcagagaggaaaagtaacttgctgaaggtcatacagctcttaactggtgtatctgggacttgaataatctgggttagtagcagattgaaattatttggcatatggactagtcagggttctccaggaacacaaaacctgtaggatggtgatattgagagatttgttccaaggagttggctcctgtgatgatggaggctgacaagtccctagatctgcagttggcaggctggagatccaggagagctgatggtggaagatggtgtaatttccagtcctagcctgaggcctgagaactggaactggtggaatagttcttgtctgaaggcctccaagctcgagacccaggaagagccaatatttcagatagagtyggaaggtgggaaaaagccatcatcccccaaaggcagtgaggcaggagggattctccctcacttgggggtggatcagactcttgttctatacaggcctgcgatggatrggatgtggcccacccatagcatctgctctactcaatctgctgattcaaatgctaatgtcmgccagaaacaccccaagaaacacccagaataatgtttgaccaaatatctgagcatcatggccaggcacattgacacacacaatggaccctcacaggggatcgtgacgttttactcttgtgctgccggattggctggcttgcttgcttgcttttctttctttctttctttctttctttctttctttctttctttctttctttctttctttctttctttctttctttctctttctttctttctctctcttttctttctttctttcttttctttctttctttctctttctccctctctctctctctcttttctttctctctttctctttctctctctctctctttctgtttctctttctctttctctctttctcactctgttgcccaggctgaagtgcagtgacacgatctcggctcactgcaacctctgcctcttgagttcaaaaggttctcttgcctcagcctcccaggtagctgggaatactggggcctgctaccatgcccagctaatttttgtatttttagtagatacagggtttcaccatgttggccaggctggtctcgaactcctgacctcaggtgactcccctgcctcagcctcccaaagtgctgggattataggtgtgagccaatgtgcccagccgggtctggttttttatgcatgttttagctgtaatgcccttgtccttccaaagagctatagtcacagaaaggctgggataataacccaacatcttacaccaagtgtggttgagatagaaatcccagagatcatgtgatcgttaagaaatgttacaggtagtgcttgttcattcttccgggtatctcttgtgtggtttgcatagctgcctagcagttcaacatttggatttgccattatgtagcaataatgcagtggtaggctccttgctgttaatgctttgtggatttttctgtaacttgtaaataagttagcagatttagtcattttgcgaggcagcaagtggaaacaactaaaactgtttggtgtcccattttgattagcgctgtgtcatctgcctcccacttaaggggttgtccctcttttctctattgaaggaaaatgctagtttggatataagagtaaatcctaacgtgcaatgattctaaattagactcttactaaatgttctaactaggacatgtttgaatcagtgataatttcaataggggttcatgctatttttccattactttttaaaaaatgacaaaagtaacttggaaatgaaaatagcatgtagataaatatataaagtaaaatgtgaaagtcctccttcctctccccccttcaaactcacttcccagaaataactgcagaaaagctgtgcatgtatctagatattttcctgtttctataaagatactcttatgaaggtattttacattagaaatttagatgagaaaagtggtgtcttgccaaacacacagttctgagacatgttggtttcactcaaccatcttacaacctggctggacatggtggctcacacctgtaatcccagcactttgggagccaaggcgagaggatcactcaagccaaggagttcaagaccagcccgggcaacaaagtgagacccccatctctaaacaaaacaaaacagcaaaaacaaaaacaaaaacaaaaaaccccaatcgtttgtttggctgggtgcggtagctcatgcctgtaatctcagcactttggaaggccagatcacttgaacccaggagttggagaccagcctaggcaacatggcgaaactctgtctgtagagaaaacacaaaaactatcgaagattggtggcattcacctgtactcccagctacttgggaggctgaggtgggcagattgcttgagcctaggaggtcaaggctgcagtgagctgcaatcgtgccatcttatttcactccattgcttctgtgcagtatggatatgtcacataactttttagtcaatgttgaatattatattcgcccctctaggtttttaccatacacagtgcaattgcgttgtagaacaatacaattgagaacaattgtattatatttattatataaataatgttatatgttattatatataatatatattattatgtataacaattgtattattctctctgtattttaaaatttattttcttcatgacttatgggatgtacaggctctgggctcagcatcttgcacggaggtggtggatgctatgaggataacgctgctgggaatactggctgcaggtcatatctgagagcagaactcagtgttttatttagtttatttctcccgaggtggatggagcaccccaatcctctcattacagtcctttggcagagccaaacctggaagcatccccaatcccagaaaatctgtctagtttttactttgaaatgctgtccctctccttctggaattaggttatattgtctgtttacctggtaagtaattaaaatctcagtttcagcactttataattaactaaagggaaaaaataactccagcatgactttctattctggggggttcagtaaacaccattgtgattcgctaacgccccttaggaagatcactaatagctataaacgaaacagaccattaagctgagaacagaggtctccgggcagttgcagtctactgatttgctgattattgctggatgtttatgtgactatgtgcagttcaaacccctgtgagtgggtgaaacatgaggctgtctccggccggttgtccaggatgtgggttctaaggcaaaatttctggattctcgtcattctcttttcctctattttattctgtattttacttctggcctcagcattcctgttcccccaaatctgtgctgctcccttgtgctttacttctgtcttgtgaagatgtggataatggtctgctggactcatcacgtgctcgtgctgttcacccgttggtagtttggctgcgttgggtggtggcctcggctccctcggacctctagagccctgttgatgccgttactactcctacaagcctatggcttatgccttagggtggtgcaattttttttttaaattatactttacgttctagggtacatgtgcacaatgtgcaggtttgttacatatgtatacatgtgccatgctggtgtgctgcacccattaactcatcattaacattaggtatttctcctaatgctatccctcctccctccccccactccacgacaggcccctgtgtgtgatgttccccatcctgtgtccaagcgttctcattgttcaattcccacctatgagtgagaacatgcrgtgtttggttttctgtattttttgtaagtgcttcgtaaaaacattctgggccagggaaatgaagagatttttagtttgcgacttgtagagtgaaaagaaagaatttgaatgagttacaaatgaccttttcaggaattgttgcccgggcctttcttcaactgcccactaactccggcacttcaataaacccccttttttagaggcatttagaagggctgtgacaagtgtatttacagcagataaatttagctcatgtattttatctacataatctgattgtaatttatatatcttcagcctagataaaggaaatctatttcttattaccaaatttttctttttgtcaacatgacgtgagtaggatattgactttaactgaagggtggtgattaatcatagcagcttgcagggagatcatttattgctctgtgtagctgagcgactgctggcagagttgtaagtcaatcaagataaacccaagtgggttagtcactcttggatgacgatggaggatgtgatagatttattagccaagttctcctttaaaaatcactttacattcttagcaggtgaatttgcagatagaaaaataccgagtcgccgtcaatggaagaatctgttagtttgcaaagtagagtatagctgttgaaatgtcacaatgaaagatggactacctagagatagccattggaaatgtttagctctagattaatcttgttaagttcaaagagggcaattatgttcttagtaattcaggtgctcsatagactgggaagaagagatttgttctgtgtacaattacatggattgtataatgggacrtcttaagatttagaatgaaacagtttgttttttttttaggggaaactttgtaattgtaaccctggctgacagtttagtttgttttgttttattttgtttttgttttgttttttttttttttttttgagatggagtttctcttgttgcctaggctagagtgcaatagcacgatcttggctcactgcaacctctgcctcccgggttcaagcgattctcctgcctcagcctcctgagtagctgggattacaggcgtccgccaccatgcccagttaattttttgtatttttagtagagatggggtttcaccaggttggccaggctggtctcgaactcctgacctcaggcgatccgcccaccttggcctcccagagtgctgggattacaagcatgagccaccgcgtctagccctggctgacattttttgcacacgaagcctttttttcaaacctgcctgtttcctctatggagctagcatgtagtcagaaaatgcacagcarcttcatatgagccttagcaaaagaaaattctgaagaagatccatttaggaagaggaaaaatcagacagactttgccaaaagtaaatgtcagtgattcctgagttacccacccctttcatcaatttcatcactgtttttcctcattagaacagatagagaatggactactgtattaaaatgtttagatgtaccctttatcactgtctgtttctttcattgcttgaggaggtaggacagaaacaaagttcacctttcagctcaggaaggtaagtgccttgggcacggggtgcactaaccgtggcatgagatcccagcagttggaatcggcatcttgggacatggagttctcagcgcctggcattcatgcccggttttgcaccttgttctggtttgggcatttcccctctggcgtgggacagcatgatgtgtccttgtcggagaggtctttctgtgtaccgaatcaacatgtgacatttggctagacagcatcaagttaatatagatgtttgaaactgttcaccaggtgctctctctaaaccagtggttcccaactaaggaggattttgttccccaggttatatttggcaatatctggagacaagttttgttgccacaactggaggcagtattattggcattagtgtgtaggacccggggtactgctaaacatctgcagaatacagcgctgtcccctacaacacagagtgatgtggtccagagtgtcaatagtgctgatactattaaaaaaccctggtctagactggagccatctctgggcttactaagggcatatttaggtcttttggtctttactggtttttctggctgaattgtctttggtttttcattgttacagacacccacctcctcctcctcctttcttgaaaggattattatggatgtaagaggctatgcgtaggacatttactgaattactattttaacatgagagtaaggcgagcatatatgttcccttataaaaatgtagtagggtaagtaacaagggcaggttcagggtgcctcagtagctgctgcgacaggtcagcacatctcagggcctgatgctgtgatgtttaattttgttgatcctgtcacagtccaatgtgagggacagacagcttttcctatacacccccgttccatgtgccagctatcttctatcctggggccctgccatctttgtcaggcctcgtcctcctctgcattcagctggagataggaaagaaagagcttggagaaagcacagcttcacttttcacgggtgagaatcagccctgtggctttaactgagaggcagcagacctggacaatgtgtacctggctgatgagaccatcaatctctgacatggattatgtgaacagatattggtcagtccacaaatgtttacacagccgcttcataacagtgacaaagaccgacgtcttgctccagcattcaggcaggagaaggtcccccttccttgcaggaataaggttagccctttgttctatgcagttcttcaactgattagatgaggtctatccacatgacggagggctgtccactttactcagtctacaatttcaaatgttagcctctttcggaaacaccctcgcggatgcacccagaataatgtttggccaaatatctgggcacctcgtggtccagtcaagttgacacataaaattaactgtcatgaccattgaacttgaggatcctttcacatgttttctagccatttggatatccatttctgggaagtgcgtaagtgtctttgctcatttttcttctttctactggtctgtagttctttattgatccggcattagttatgtgttgcagaatcagttgattgtttactgtgcaggcttctgtagtgtgagagagttcatgtgtaactggtaagtacagcattcatgtctgcataatgtaaaagtgggcccactttcccggtagcttccccagcacgttaatgttttacatcaagtaatagccgctgatcaccagctaccttagcacagctgaaatgagagagctgcaggggagccaggactatcacattgccattcaccttacattctttctgttggtgaccttgggtcatgtgctttttcttggaagttttatgtccccatctccagcatccttggacatttgtccttggccccattaatgtagcattttcaacccttccttatatttctctccatcaagtgacctccacctttcaattttttttttaaggaaaaggtctaaatttattgtagtatttattaggtatgtaacatgccttttaataggtgctaaatttttgttgttgtttgtttgttttttgagatggggtctctctctccatcgctctggagagtgcagtggtgcaattatagctcattgcagcctctacttcctgggctgaaaatgatcctatggcatcagcctctcaagaagctgggactagaggcgtgtaccaccaggcctggctaatttaaaaaaaatgtttttatagagatggagtcttgctctgttgcctgggctggtctcaaactcctggactgaaggagtccttctgcttcagcctcctgagtctcaggcactataggcacgagctgctgcacctggcttacatgctaatgttatggtgaggatgttaggattattactatttttgtaagttatgtggctttgagaattcttccctaaacyttagttttmataagctgtcttattttcagcactcatatttgcaaaatgggacacttttcaggaacagatatgtgatattatagcagaaattcttgcttttaatagtttgtggcttgtagttttctttttaatgacttcttagtggatggaaattcttaattttactaagctgattttattgatcttttatgctttctgtgtctccagtaagaaatcttttcctcttccacatggatagcaaaaatgtattctatattcttgttctccaacagctttgtagttttgcctttcccatgtaagtccttagttcaactggaattgattttcaggcagtgcatatagcagaagactaatttcttttttctccatacggataaaccagttgtcctagaactatttatcagagagtctgttctccccctactgatgtatggagccagttctaaccattaattggatttgtctatttgtttgacttctctatttcatttcactagtttgtctagtctctttatctatactgtatctttaaagttgtttatgtatgactgcttttgtcatctgtatggcagggtccctagtttgttggtgttcttgaagagtgttttggctctccttgggacactttacttccatataatttttagaattgggttatctagttctacaaaagaaatctgttgggatttggattggaatagggtcgactaaatcgttttaaggaaaatgtacatctttataatactgagttctctaatccatgaacatggtatgtatttcctttgtttacatcttcttttatgtatttttataaaacattgtagttttctgtgtaatagttttctaccttttagaagatttattcttatatattctatgtgttttgaagcttatgtaaatggtatcttttaaaatttatatttttctaagtgctgtttgcatgaatatttttgtatcaatagtgagacttaaaggacattttgccctaaggtatgccatattttctaccccatggttatcagggatgctttggcatgaggatggtggcttggtaattttagctgtttcctctctccccatatgcaatgtaaatgacatgcatttttaacttcagccagtatagtaacacacttattgataatctagaagttgctagcattgcacagagcatcctggagtagggacaatgttttctcttttcctctttgtcatttgtcatatcattttctctttccttcctcttttttttycccccttttcttggcttcatcttctgtatcattttttttttagttgctatttgtggcatatattatatttgtagatgattattattaattcttttaaagcatccttgatttgatgaattatagatattatctgatccattgtatcctactcttagaatacctgcttcttctggaaactctacagcgggggttagcgaactttttctgtaaaaggccacagagtaaatattttgggctttgtgggccatctggttcctgttgccgctactcagttcactgttgtggcacgagagcagccgtgagcaatacataaatgaatgacgtggctgtgctccaataaactttatttacggacacaaaaatttgaatttcatataattttcatatgtcatgaaatattgacttttccaaccatttaaaaatgtgaaaaacactcttggcttctgagccttgcaaacacaggcaagtgccgggggtgggtggagtttggcctgaaagccacgcacagttcactgaagcctgccggagagcactctgtgtgtgcctctaactgaagactgactccacacacttgtcattgactggggcatggttaatggcttctttttgacccctatgaacataaattgaatctttgcaacattaaggtacaggtatggcttaatgaaaggctgcctttctaagtcagttggaaaacgagtccattttaagttgatctgaaatacttagagtttagtaaataaatgagctatatcaaatatgtgtaacactgaaggctaatttctttcagactctgctttgaatcgtgttccagtaattggggcaacccatagagatggttttgttttacttccccacactgttcctgctgtgttctgaatgaggaaagagggatttggaaaggttaagtgatttcactggagtcacaaaacgtgcagaaattggaacataaccagttcagtccagtgccatttctacttttgtcgccttgcctctcctgcattcttctagaaaatttgagtctcccgaaagggtagacctktgctaagtcaatggtgcagtattgataaggctgccccagactgccagttaggtatctggttttcccgttgatttcactctgtctggatgatcttccttcctggctagacagggatcaattttcctgtttccttgcatcatgcctaccataatggtgcaatttattttcttgttcaatgcttgctgaatactacgcaagtcagagacagcttgctagggggctggaggtgggcccaataaaatatcatccctgtttctcacaggagtttataatatagtggaggacccacaggtacttaattaatgacaggatacaggaactcggggagggagacactgctgagttattgttcatgtatggaaaaagcttctgtaaaagaacctaaatatcatttatagaatctagcacactggcttcaatgctgatagcctgtcatttaatcatcatgccaagtactttgcacgtggaaagaagacgattgcaggtgatgtcgcctccctaattgtaggttgatccttgaaggtttatttttgagattcagtaattacccgagtaagcagcatgggtagaatttttttgcaatgccttttttcacagttttgctaaaagaacttccactttaatactttactaatgaacacaggcgctctttctgtagaaggagagggactctgagctaggagctgatgctcctgttgtcactcctgaaaagaaaagggaggaagataactctgttggtcctcctgccatgctgtttctggagcctgtcctcccaggggtgcaactgtcctgtttcttctcacgtaattaggaggtgactgacatggagagctgtctcctttaggcacagggtgggacctgtcttattccaaatgtagatttagtagtactttggtacccggtggtgtttgtccctcttctctgtccagacaagagatttccttctcctttcctgaatttgtttttgacatgaatctttggagttagaatttctctctctgatggacggcatcgataggatatttaggcatagttaaatcgtattcagtatatttcatatctgtaaagtctaagggcctggacagccattcctcactgagctattgctgttactcaaatgagtttgggagttctgacactgatttgttaaaggtcccttggaacataacccgtttgttaagttagggactccttgtaaccatattgagaaaaccaagccccttagtacgtgtattagtccattttcactctgctatgaagaaagacccaagactgggtaatttgtatataaaaaaagaggtttaatggactcacagttccacatggctggggaggcctcacaatcatggcggaagtcaaaggggaacaaaggtatgtcttgtatggtgacgggcaagagagtgtgtgcaggggaactcccctttatgaaaccatcagatctggtgagacttactccctgtcacaagaacagcatgggaaagacccaccccacgattcagttacctcccrgtgggtccctcccaagacacaagtgaattgtgggagctacagttcaagatgagatttgggtggggacatagccaaaccatgtcagtgagtgatttgcttgggttcattctgtttctctgctccctgtgctgaagacccatctccgtggcccacctcgcccatgcagagagcacttcatttatcgtgggctcctgcctttcggccagcaccttctgtcgggtgtcgcaggatccttagtaacatgcaggaagggaaatgagaggaaagaacaatgaaataatctttgatcttctccactccatgtaacctaactttttatgtggtcaagcaagataagctcctatctggcataaatatgtgtgactacatttatatccctgcttacaaaatcattctaaaatggtaatgaaatattgcttctccctttctcttccggcagaaaatattctaaagaaataagaattttgatgaggagtggttattgaaaggggcatttcggactggttttaaatctcagtaatttattttattggggttattgaaatactggatatactgacagaaatcatcaagagcttatggttattggataagtgaactctaggttgtggttatatttagtgtctaaataaggccctattttattacaccaccctttctttctctttttctgtctctctgtctctctctctctctctttttagtctcrgattaccccatctttccgtggtggaaagaataatggttgcaaagtgagtaggaaatttatttctctgtactcatctggcatgaattgtttgctctacataaattgatgaattactgcttctaaggctgacataatagtttttgttttgttaaacaactataaatttcatctaatacagtcttagtgttaacaggaagaaaaccataagttaatatctgctacatttcattgcttaaaaataattgctagtagtaaagcttcatttttcacaaacataatttgatctcaggtaattgatagaagaagaattcagggaatttgttcagggtctgtttacaactgactttttcaagaactgccacatgcaataatccaaatgcattctggttatgaaataaagcaggcagaacttacagtcagcctcagaatgacttattgacagctacaggtgcagcatttttttttttaacattgtaacccttttgcaaagtttttattgaaatgttttatgatatagtgtttttgatttgtctatttgaagaatcatagaagacaaaaccttaggaactttacttattctaaatttcctgttctgttattgataagaaagaaaaagagagagagagtgagggagtcagttattcaaatacacctcctttcattcctactggtgcttacaaaccaaatgcagcttgtattttaggcgcggggactcctcagctccacctaaactgaggagggaaaggtatgtcataatttttgttctttctcaacagttttcctttaataacaacctgatttatgatgttgaatcatgatcctcgcactttggaatgctccttgtaatcaatcacttttactagaccttctttctcataaaaacaagaatcaagccagttaattgcccaggcatgcatctctgcttacagaatagtcatggaaaccctggcttgtcatgtttaggaacttcccctgggttatgccaagggtcaagggttgatgtcacagccacgtttggagctgtgagctcccactctgctcctcagcatgtggagtgacatttattctctttgtggctaactagttaatgtgaatccccacagcattgctattgaagcaaataccatgactggggtaatagtaacattttgaagatgaattcagactataagaactgagtttgttgctgaaatatttcaactacatgagagaagagggagggtgccttgtcttattagcaaacaagtaactatctggttgtaggttgtacagggactttggcaaaaaaggagggaagctgaggacacaggcacgaagatttaggttggaattaagagggcattttccgcaagtggagaaaggaaagcgagttatcaaggtaggtcatggaattaccttgccagaggatttgtgttgttttctggtagttttctgttgttatctggttggaattgtggacctatgactgggaccatattgaggcttatgacggtctctgtgcttcccccagtccacacctcccctgtcccttggggtcagtggaggttctagtctgcataactatgctggattagctcctgaggtctcccagcccaaaacggttttttaaaaaattctacaccagtggttttttttccccttcgatagtctagagccacgcagttctcctcccttttctttcagcagcaccaggaaaggctggaatggggactcctagcatctgtagagaggcgtggctctcatactaggtgacttctggggagcccatgtcaagaaataccagtttctgcgtttcagaatagtaaatggcccaacttggagctgcagctcctccctctcattgcagtctctggtttgtcctgtggaggcagcggagatgcccctggctggtgttccgcgaatttgccggccccggggacctgcccccactgtctcagtggaaagtgtgccactaactgccgatggctgagtgtgcagatacagcccaggccccttcaggcctgtgggcctccgtgcctggactttgttctagtccctcccgggtttcctccgctgtctcatgagttcgggctttcttcattcctcacttgatgattggaagagctgcttgacccatcagcgtttctgtggcatctctcctttcaaaacgatccctgtagagggactggcaactagtccatagtgtcttgctagttactagtgtctcacgctgatttgcacatgacataaagacgctaataactgcctcatgctgatttgcacatgacgttctttatgctgactattcccttccccgagactttcagtgaaggaacttctgttcgttgcaggcatggttctcaactgcctccatcgggaagcatcctggccctggtgccagggcttccacggtatctggggtttactccttccttcactgagttacctgcttacattcctgttttccatatgaaactccttgaacataaggactgtgtcttaatgatctttattttctctccaatatctggacttttgtacgacacaaaggaaaacagtcagcctgtgtgttttcagtagaagcaatttatcatctttctaactgtataatgctaaattccaaacagtctaagcagctctcttggagtttgcagctaatgacagaaatagtacagaaagtcatttaacctttaatccagtgctctaactcactaaatataaaacattcttaaaaatacatttgtgcatttgccaattgtttattagatttctgctcagtgccagagacgatgctgggcctggaggagaaagtttgaacaagagtaatgcttttccatcctcacagaatgcagtgggctgtcagaagcggtagggaacagctgggcagatactgtgatgtgtgacatacaccacatgggagggaaattcccgggctgggtgggcaggggttgaggaggatgttctaaagtatgtgtgaagggggcagtgtgaactgcaggcacactgaatgagaagcctgagggttgaccaggaatgttgtcaaaagactaccttggaagttggagtgaacgactcagccccatgaaatgagagtgggagtctgtcatccatctgtggcagatactccctaggatatttgttactcagtgtgagtgtagcctgcttagtctcttttaatttttatttgttctttatttcttaaaaaaaaaaaaagctggatacatgtgcagaacgtgcaggtttgttacataggttatgtgtgccatggtggtttgctgtacctgttgacctgtcctcttaagtttcctccgttccccctccactccccatcccccagcaggccctggtgtgtgatgttctcctctctgtgtccatgtgttctcaatcttcaactcccacttacgagtgagaacatgtgatgtttggttttctgtttctgtgttagttttctgaggatgatgacttccagcttcatccatgtccctgcaaaggatatgatcttattccttttcatggctgcatagtattcattcctttttatggctgcatggtgtatatgtgccacattttccttattgagtctaccattgatgggtatttgggttggctccatgtcttcgctatagtaaatactgctgcaataaacatatgtgtgcatgtgtctttaaagtagaatgatttatattccttagtagaatgatttatattcctttgggtatataaatcattctactataaagacacatgcacacatatgtttaatatataaataaatgggattgctgggtcaaatgatatttctggttctagatctttgaggaatcgccatactgtcttccacaatggttgaactaatttacactcccaccaacagcgtaaaagcgttcctgtttctccacagcctcgccagcatctattgtttcctgactttttaataatcaccattctgactggcatgagatggtatctcattatggttttgatttgcatttctctgatgatcagcgatgttgagcttttttaaatatctttgttggccacgtaaatgtctgcttttgagaagtgtctgttcatatcctttgccaactttttgatggggttgtttttttcttgtaaatatgtttacgttccttataaattctggatattagccctttgtcagacgggtagattgcaaaaattttctcccattttgtaggttgcctctttactcttatgatagtttattttgctgtgcagaagctctttagtttaattagaacctatttgtcaattttggctttcgttgcaattgcttttggctttttygtcatgaagtccttgcccatacctgtgtcttgaatagtattgcctaggttttcttccggggtttttatggttttagaataagtgtcatgtggcactgagaagaatgtatattctgttgatttgggctaatttttgtattttgtagtagagatggggtttcgccatgttggccaggctgctttcgaattcttgaactcaggtaatccacccgccttggcctcccaaagtgctggggttacagatgtgagccaccatgascagcccaaagctacattttaatgtaataatattttctatgcagtagttgttcgtaatcctttcagggtcatggtgctctttgagaatttgatgaatccaatgaagcttcttggaagaggtcttagacccacacacacagacacacatatacacacacacacacgaacacacacatatgcacacacacatatacacatacatacatacacacatacatacgcacatatgcacacacatatgcaagtacacgtatacacatgcacatacgcacatacatacacacatatacatacacatgcatgcacatagacgcacatacagacatatgcatacacactcacacatatttcacagccttgtatttcattgtatgggctcataatccctggggygtccatcccagacctgttgatgagttaagaacctttggtttagaggaggcaataactggtcagactgagacttcaggaataggcctgtccggagctagggaactggcctggctgttgggcttttgggtaagtgacattccagcagttcacatgtggtgacccaggatggagagtctgagcatcagttggactagatcacgtgcacagggtggaggtctcagtctgtctagggggtgctcagtacagtgagtggacgtcatggtcagggtttggagcgagactcgaaggagaagctgcaagtacagagtgtgttgaccattcttctgctccctggacataccctgcagaggctggctgttaggggaatcccaagagacaggatctctccagttgcttggaattccaattattttctgatccaaaaatctagcactcattggtgaaggacaagctgcgagggcctctgggtgctgggcgagcagccaacagcagcacgaccacctccaggcctcacctgcgagccccagtgatggtggattctgcctttgggcaaaagtgagagccccctgagtggagaatgtgcatcagcccgtggtgctcccactgtggaggtggtgggggtgctgataacagggagggcgtgggaggcagacacggattgcagatactatcctcaggtatacaggtgtcgaggccacattttcacccaggtcacactcttgcgtgtgctgaatgtgtgtgtcgtcgtgaagtgaaaatttatagcgaatttataatttaacactgaattcagttttctcttcctatttgaagcaattacatgactttgataactgtttagcttttgtttcaaaattttaaaatgtagcattaaggaaaatctctccaactagttttttaaattgccttgtttctctgcagtagctcatcagagtggttggggtcattttacccccacccgtgatggcctcctcatcctcctcctgcttctcctccccctcccattcgccctttccctccttttctctctccctcttttcctttatttagctctgagcccctgcccagccctgtgctgagaaccttcttgtgcatggttatttcacttagtgttcaggaggccctaccaggtggtccagctagtaggcttgttttacaagtgaggaaacacacctggagaggttaggcagcttttctgatgtcacacagccaatgtggttgtagctgggactccaacccaggtagtgccatctggagcctgccatttcctgtgttttgcagctttctcagtgagtgcaaggccagctcagtcttccttctgtgcactctcaaaggcatggcctgcaagagctgtctgatgactgattcattgctgttttcccttttctaggagtgtttttattctttttgcctgctgaacctttagaaaagtaacggtagggcaatgtgttaggattctccaaagaagtagaaccaatagaatgtgtgtatatatagatactctcatgactgtggaggtgtggtgagtctgagctctgactgggcaggccagcaggcaggggactcagggaagagttgcagttccagtccaaggccgtctgctttagacccaggaagagccgctgctgtgatggaacctgcaggccgcctgctggaggattccctcttgctcaggggaggtcagtcttttgttgtagccaggccttcaactgattgggtgaggcccacccacgtcagggaggacggcctgctttactcaaagcccagcaattaaaatgttaatctcacccaaaatcaccctyccagaaaaatccgragtcgcattcaaccacatatctgggcactgtggcccaggcaaggtgacataaaattaaccatcacagacagcaacctaaatactgttgaacaagaggccaactcattttgtcagatacctaagggcatgttaatgtaaactttctgcaagtttgtctctttctcatagacctaacgggaatattgggaaaaatttgaatggaagttcttttgcttcaggaaagaaagtaactttacaggaagaagcaagtcaagtatgaaaaatagagtgagacctaggagaataaaatctttaacaagcaagtgtcttattccattgaacttagagccctggacctgtgtgatatgtcaattcagtcttgacagtttttctgcagagggagctaataaaaagaactgtaagaattagttttttttctttttagtggagaatggaagaaaagtggctgactctttggaaggtaattctttaaaagcaggaaaatgtttaaagcaggagcagtaacatctgtgaaagtgagctattggcagctagagaaggactggagaaaatgggcaagaatgagagattccatattttattgggtaaaattctttagccagtgaacagtgacaaggtgttaaatttcatctgatagttttagaggttatttatcttgtagacttttaaagataccttgcagagtggtgtgagttgtgtgctttgagaaagtcgtaaatggtttccatctctgtggcatttctttagcaaatcctggttgtttctagtgctaagatcttcttgggaacttcagagaaagcgttaggtcttttgggattaaagtcctgttgtgtagtacctgaattttctttcatctctgagtgtttcccttgtctgaaatgaacagtattggtgttacctaaggggctaatcatacagcagagaactccagaaaaatattaactgagtgtctttaccacacaagatactaagtgccaaaacacttaaatggactgatacctggctttctaggttacacatgctgaaacgaacactgaaagtgataattcacttatgtaagcagttacaaactatgcaaatacaaaaaaataaaaaataaaaagaaatggcagtacatttgtgaatgcttgtggtgtgctgttagttgtattttagtgaaaggtctgtgcaatgaatattatggtaacagtcgctcttaatctgaattcagcaagttgtatgtcatcaaaagattagtgaaacagacacaattcctaaagccgtctaagtctgccagtctttccttcctgtgacacaagttcgtctgtggcctacaagttgttggaggtgtaacctattatttgttggccagttgttggaggtgttgggtgtgtggttttggacacagtgggcatgggtggtcccagtctcctggagtggacagccagacgaataccgtagacacaggaacacaaacatgttggagcgttcgtcgtatttctgggggttgcagctttgtctcagtttgctgtggctgaaccaaggaaaaaggcagatgcagacttctacaagaattataattctatggaagattttgaggagatgaggaaggctagcatctttcaggatgcaatgtaattttggaatataaggaatttatttgggttgaattacctagaagtttgtcactgacctgtgtttctgaaccatgaagcatagatatgtgggctaacaaatagtttctcttgataaataaactgttaacaagtatatataaaaaagagtctatagagaaatgtatacaggggatgtgaatagggagttcccagaagggaaacctgaattgtcatagtgtaatgatactaaacagcactgatgatgagtaaaacaaaaaagcaaaggaaaaagacagtttcatatgcttcagattagtgaaaatttaagaagtctgattatataaaatgctcccaaggacggagagcactggggatgatgaggttgtaagaatgactttggagagcagtttgccaataactaggaagtcctttgctgttctgcacctaggaattaattttagagtaacaatattacaaaaattaaccatcagaattaattttagagtaacagtgttacaaaaattaaccatcagaattaattttatagtaacagtgttagaaaaattaggagtctcatgtcagatttcacctcacttgtcctatcagcagcatttgacaagattgattattccttccttcttgaaatatttgtattacttggaaatagatgtagctgggcacatggctgtccagatagagtctagatacttgtacaatgcaaggtgggttctgcccagtcctactgttacatgctagggtcagagataaattctacaacatcatatattacaggtttaggatgaggtttcactggaggaaggtgagatgtacatggaccaagggtttacgtctcatccttttatcccatacagatgcactgggtgagttggcgtgctttttattggaaggatccttccattttgtgggtttcctttcttgtaagcatagaaaacagccatgatattaggggataagcagtaattacagtaccttcccccaccctagcagtggggaagtacatatttcatggggaacctgaatgaatgtgggttcagtacctccagctgggctctgtcctagctcactgctccagaggactcctggggtccctttgggacgtacctcctattgtactatgagatgtggccatgtccagcgaggaagtgatgtctgtgatatacatcactgatacacatcagcgtaactgatgagatggaaattgttcatctttgcttacgttctttccctctttccatgggctgggatgtgctgaaccatctgtttccctgccctcacttagagcagagtgacaggattgaaagaccctgggttcctaacatatcttgggaagcagagctctgtgtcaccctatatcacctgccttggatgagagagagagagagggagagaaagagagagagagaaagagaaagagagaggaactttgactgtgcttgcacctctgtggctgtgttttkgggtctctttattatgcagtctagctgtgatgcagtatctcatagtcatcttaatgatcttaacgactatgagggccagtggagcttgcccttggtatttgcatcccttgaatctgcctcatctcagtaaagggcaactccattcttcaagtgcttgggccagaaagcctcagggacatttctgtgttctacttctcttgtagcccatcagcgaatcccattagctttaccttcacattaaaaaaaaatactttgaccaggcacagtggctcacacttgtaatcccagcactttgggaggccgaggcaggcagatcacctgaagtcaggagttcaagaccagcctggccaacatggtgaaacccggtgtcttctaaaaatacaaaaattagctggatgtggtagggcgtgcctgtagtcccagctactcgggaagctgaggctggagatggtggtgggtgcctgtaatcccagctgcttgggaggctgaggtaggagaatcgcttgaacccaggaggtggaggttgcagtgagtcgagatcgcgccactgcattccagacagagtgagactcctttcaccctaatgtcatcactgtgatagggctgtgtcatttgcttccaagaattcttagataatgtctttgttaaatcctattctttttttttgagacggagccttgctctgtcacccagcctggagtacagtggcacgatctcggctcactgcatccttccaggttcaagcaattctcctgcctcagccttcctagtagctggtactacaggcacctgccaccatgcccggctaatttttctatttttagtagagacgggtcttgaactcctggccttaggtgatccgcccgcctcagcctcctaaagtgctgggattacaggcatgagccatcgcaccccacctaaatcttattctttacaacaaaatgatactatttcttttcttaatcatagaagtgtatttttacaactgaaagagtctttgaaaggttgaaatgaaacttgtcctccaacaatctttatatgacaggtactaagggatgtgtgtgtgtgtaagtgtaatttttctgacattctttacaagttatatcttcatctgggttacattcattattaaagacagcaatacttttatctatgtgtttgaacctcagtagtaggtagcactaggaacttgtcaatcctgttgaatcattttatgatctatctttttgtttgtaggaacaatctaatttgaaccttatatgaaaaattaatgtaggttctcctttacaaatctccaagggaaagaactctgtcatctttttttcttaatagtaagagcaggtgcttccatttatcattcaaggtgtactgttgcctccttttttctttagcaaagtcagtgttaaaaaaggcttcccctgagaagtcaaaggctgctacctgacatctggttgagaaggctcggttctcttgtgagctgggaggagtttcagtggattaagcactcttatttayctctttttcctccagagaccccattaaaatggtagggaaaaataaaaagtacatatatcaacaacacaaagaacttaaaggccaccagcatggaaaagggattttacaatgtttctggcagcctgcaagctgataaggctatgtgactactaaattagtgtgggggctgcagctggggaggctcaccttggagactgaatgctgggtgggtaggagtcccacgtggggctgaaaatcacagggttccatgggatgcctatagtcagatcacttcacggattctctccttcttccacccctgccgtgggtacaaccaaggactagaaaccatatatttatccctctgcctcatctctgaagaaatggactgaattgtctggggagaacccctgttgctagtttggaaggcggcttcttagaaggggaattactcccatgcccactctctgagtcagacccgtctgcccaggacaccagcctctccaaggtttctgttgtttcatatttaagtatgatgcatgagcattgttggccagatattccaggaaagcttctgatcaaagagggcaggatgagatgaagaaacaacaaaacagcccccaggaatcagagaggacccggggaataggggaggagaaccctattccgtaatgagaggttttgaaaaggtcatcttgttaaagaaaacgttttagaaggaaggaactaccaaaagcaagaaagaaacattgcaaacgaaaactgtgacccatggaatgaattcaaagaagcattgattggaagtaagttcagaaaattgcccagaaagacaacaaaaaatgaaataccctgtgtgtttaaatgctagcacatagggatgggactcaaactcccttcctgtgggctagagtgtgagtgaaaatggcctttctcttcattgtaattactctccccatctctcagagaatgggtaggcctggggcagctggtctcagcagacctgtctgttctcctgtgatgtgggaaggcattgaggagcctaggctgacagtgcttgtcctcctgaccccagcatgggtctccttgttcatcatctgcctgcatgggcagccctgaccaagggctttatactcacagcccggtctacacaggtcacgtccctgagaggtgacccggctttggactctatgtggatgtgcacttgatggggcttgaaatccaacattagtggtattttcccaaattctgaaaaagtgatgctaatcttctgcctttatatgggactcaatttgtagatagcttgctttctttttctttttttacagacatggtcttactctgttacccaggctggagtgtagtggtgtgatcatagcccactgcagcttcgaactcctgggctcacaccattctcctgcctcagcctcccaagcagctgggactacagccacccactaccatgcccagctaagttaaaaaaaaaattgtagagatggggtcttgctgtgttacccaggatggtcttgaacttctggcctcaagagatcctcctgcctcagcctcccaaagtgttgggattacaggtgtgagccaccatgtccagctcggcagctttataatcctaataaagcatttgtgggatttgggtccatctttaaatgtcctcaagaagcatatgtgtgtgtaactcaaactcagaacttgagttctgaaacccaagttcatgattccttccttcactgtgatgtgggcacttctccaaagtgaggtattagtggaatggaacttggatttttaaaaggtgtagtggaatgcttatataatattataactaagtaaaaccttgaaaaaatgttcatgagaatgtggtagaagtttctttcttttttttttttttgtttcttatgactttctaggagtttgccttaatgagttgaaagcatgagcgatgattaccaagttgtgtgtaaaccttcctccacctgaaattgcagagtgtttttctccctgatcatttctttcctgtcgtagcgttcatctttgatgccgtagttgggcgcagggcaggttttgagtttcctgatgtttcatgtgtggattggtccttcaatttgaagaataagataatgatcatagacaaggatttggcttacagctgagagtgctgagttggagtcttggaagagagacgtgctgcagaataaagtttatagttttaaaatttctagttagaagtttaaatggtcacactgagcaatgccaattagcttccattgcagtgaattctaaggacttgcaaggcaacttttatttaccagaatttaactgaattaatcagtggttaaggtaactccatggtctaggaattgtaaattggttatacttagtttttattttatagcaatatttattgtaataggtttatggtacatttgaatattagagctttgagagctaaatgttaactgatatagtttttcttataaaattagcaagattcttgagaacgtttcttttctactttttaacctaaagtggtctgtatacgtttatggctttatagatacgtctaccatggagagcaattcatttaggtagtctgtggctcataaaagattgcttgagtcttgtgcagacacatataaaggaaagctataggacctctgggaacttgaggctcgcaagatgtaaatgtcagagccgtccctagagctcccttgctatgactttgaccgtttaaatttcagcattgtgcagtgacttcatagggtgcttgcatattttaaaaattttcacttaactgttaacttggattatacgcatgttagaaacaaccctgtggaaaatagagctttcttcccgtagtggatatagacgtctgtgttaggcacaggaccatttatcgctggattataataattgttcttcttttgtaatgggataggaaatgcatatttatggggtacagttgtatattttgtcctaatcttgaaacttatgtgagtcattttcatattatctccatcatgcctgcattttaaattactgatttatctgtttgcaaaagctttggagaatcagagaatctactggaaagactccatgtgagattgggctctgaacacctgggggcttgaggctgtttctagtttttttttttttttctgagacagtgtctcgctctgtcgcccaggctagagtgcagtggcacgatttcggctcagcctcccgagtagctgggatcacagatagctgccaccacacctggctcatttttctatttctagtggagatgggggggggggtttcaccatattggccaggctgatcttgaactcctgaccttgtgatccacccgccttggcctcccaaagtgctgggattgcaggtgtgagccaccgcacctggccgctgtttctaatttttttccgtgaacttggtcaagagttaatgacgaagaagcacctgttagcatagttaggaggaacaaaacagggtgaatgaaaggtctttgtaaagcataaaatgagtccagattttagttcatttggcttgtatatcttgttttcgtctcagtgaccctagacatgcaagagggccacttttaaaaagggtgtagcctttgaagaatgatgactacatctataacgaaggaagagaacacaagaacacagttttatgctcagcctcccaacgtgctgagcgtacaatatttttgtgtttgtatttccatgtgagtatgtataaaataaggaaggtgacattttgtttgagaaaaaatctagtgataaaagtggacaaacagatgagttattctttattataagcggggtgaggctgggacgttgccatataaggtaaagctggactcggccttgtttgcctgagttccgtgcatgttggttttgctcttggtgtgatgatcatccttgtgcgtgggcggatgttgactgagaggcacgttagtgatgaagcagcaggtccggccactgcttggcttgtatcttggtctccattctactggctgttctgtgaaagctcattggaagtttcaatctagaagtcatgggtatgaataatcaataaccagcagattaaaaagatatatgtaataatttagtatgtttataataaaacaagagctaatattaattggttggtgtgtacctgggttggttatattttatttgcatatgtctgtcctttagtccttagaacaccccttataagcaaaatatcattagcaacctggcaccctttgattggctagaaaagagtctaagagaaattgagtaaattattcaaagtcatgcatccagtgatggtggatcccccgttggggcccagatctgccccacacccttatggccaacttcccttttgtagtaattccactgctttaggtttgagccggaagggttgcatcaagcctttgaagaacctaaacaatgcacaaactacttgggtcttggaccttaaatgggggctgagtgaagtcctgggtggagcccgggctgcccacgtggagggctggctgtgatgggtggttcatctggggctagggtcttgctgtcatttatgctgactttgcacatccatctcttggtgccctgggaaggctcaggtccctcagggatgcaggtgtagcccagtggggcctttgaagatctgtagcttgggagacatgccaaagagatatgctttcctcaggtcttgggttctaagcacttgtagaatgttgccctccacagtctgatacttctttttcaaaagatgccttggccgggtgcggtggctcacgcctgtaatcccagcactttgggaggccgaggcgggtggatcacgaggtcaggagatcgagaccatcttggctaacacggtgaaaccccgtctctactaaaaatacaaaaaattagccgggcatggtggcgggtgcctgtagtcccagctactcgggaggctgaggcaggagaatggcgtgaacctgggaggcggagcttgcagtgagctgagatccgccactgcctccagcctgggtgaaagagcgagactctgtctcaaaaaaaaaaaaaaaaaaaaaagatgcctcaaatacattccttccttgttcagagggctgtcacccctattttgagtcctatcacttttctacttggataactgaaacagcctcagtttccctgcttttagactcttttctttccattcaaacccttatactgttgccagattcattttatacagagatgtcccatttgttaagcgtctatgttgacttcctgggtgtccatagtttattcctaccactcagtattatttcccagtgctgtgcgcttggagtgtgccctagtgtgaccatttgcagtgcagtcgtcccttgagatctgttgggggattggctccaggacccccaaggataccaaaatttgcagatgatcaagtctcgaacagaaaatagtatagttcacacataacctatgtacatctttctgcagaccttaaatcatctctggattacttatagtacctactacaatgtagatactatgtaaatagttgttacattggagtttttagggaataataagaaaaaaaagtgtacatgttcagtaaagatgcattttatttcatatatttttgatgctcagttgaattgaacccagggatggggaacccatggatatggaggggactacttattctccccatttctctatttctccatttcaccttcagtccacccctcttgttattttgtgcccatttctctgcaaattccttcttcttctgaaactgtataaactgttcatgtaattcggggcctggtttgattttcccacctggaaagcctttctctgatttccctagcctcactggtttctctctccttggaacctcctgaattgtacactttataatttctttgtggtttgtgaaaagtttctaaataggctgtaagacttcggattctttcatctccttggtgcccaagcatgtggtatgtgtcargttgctacttagagacacattttcagtctcagttttagtatttacttaagcatggtgatgaaagttaagaaaaacattgaaatcaaacctmcatggagaaaactgctgtgattttaagttgattggatactttgctgctgtgttgaagtgttttttttgttttgttttgtttttctttctcctttgtcttgccagcaatcaaagagaagtacacagactggacagaatttctcatacgtgacttgactggttcgaggacagcacccgccaacctcctggaaggtgtatgtattgttgttatacatctaatgtatctctgaagcaccccagttacgtgagctcagacctgacagcacctttgcatatatccttcagcagatgcgtgctttctgcagacactgccatccaaatagcctcccttcctcttttgtcctgaattacttaggtgactgatttgaatggcattgatgaaacttcccctgtgatgcaatcagcaaatggaaaatttgctctatgtgaatccaatttttaaatcacaatatgctaggatgtcttcctactgtcctatatctttaagcctctttcctatgtgagtgaatataaatcaaatcctgtagaatcactgttttgaacaggtgacaagatcatgtatgtgctaatatagtctcttggagtacattgataagtcgttccattaaatgttctattttgacgcataaccccaagatttgaacatacacacgttaaccaataattgaattaacttctcttgtaaaaacaagaggagaaatggcagatcgtatttcagtgtagccaaggaaattttaatgtattgaagaaaacatagtttaatctgaaatcttgatggtttatttgaaaataattttatgttgaaacatcttagtatgtatatgtagtatttgtatttgtataatggaacaggaagagaaaggcactgtgtcataagtaattattgaattacctagtctgtttttcttaagaatgcccctaaaaaggggaaaacttaatgaataacaagtaataaggtgtggattttgacagtatcatattctcttaaccttaaactttccctcttttcataaatgatattgacattttagaacgtcatagtctaatatagttaacgggttttgttttgtgaagattttgcctgatgtatttgttatatatcattagagatactattttaattgttcattaacaaatcaaaatgatgatagttcatcctttcaaaaggacaaattgtctcactatgttaattttctaaaacatatttgcctacaaagctggctgaacaaacacccttttcatatgctatcataggctaagaaggtttcttagaaggggcagtaattatacattctgtaaaccaattaccagcttaagtgtagaaataattttacatagtagtctaatttagctgatcattactgtgtgttagacatgtcattgacacacactcatgccttcgtcacataatcaaagtatgagagcattttggtcattagagtagcggccagtagagtaagatgaatgtctgggaaaccgtcatggtgtaaattgaatgctctgtattagaattatctgtctgttggaaaagtagaccgtttgctaccacgttttctaggtccaggcaaatttgggtagaactcttcttaaaagcatactgattgttaacaaaagcaattttatctgggaagggtgatttgtttggtgagaacttagcacaaactgttattttctattgacttgtgatttttttgttgttggatacggaatggggtacatggatgtgtgggagggaggaaagggaaggggtggggcatgggctgggcaaggatggggtggagggaacgccagactgttcgccagtaccttggatgatggtgtgaaaaaatattatcttctgctgtcatctgtttccatgagaaccttaaaataaagtttaaaataaggagttttgcttctgtttaaacagcctctgcgagggaaaggccctatagacctcattacagttggttccttaatagaacttcaggattcccagaacccttttcagtactggatagttagtgtgattgaaaatgttggaggaagattacgccttcgctatgtgggattggaggacactgaatcctatgaccagtggttgttttacttggattacagacttcgaccagttggttggtktcaagagaataaatacagaatggacccaccttcaggtaagggccaaagcttttgctgctgtaaagtattttagaaaaagatgtgatattttcctggatgtgtttctagaaaatgtatgagctttctggtatcttttatatctgagtatgtgaatattaagcactttaacttcacartgctttccatagagactaaaacctaagacctcaatcaatagtgttctcaaaggagaaagcaatgttagaggccttagggaaattgatctagttccttgggaatcactggttcagaaaggaaagacacagtagattgagacttgaggatattctccacgtttttctttaggaattttgatagtcttgtaagtaggttccgaaatctctggccatctgtgtacccatctctcagtctgtccattcaccaatccatccacctactcatccacccatctatccatttatctattcatccatccattcatccacctatccatccagcattcatctatttatctgaccatccattcatccatccatctaaatatccaaaccacaatccagtctgaccaagaagcagcattgagtagatagaccatcatgttttctcctggcatgtaagattttagttagcttcaaatgcactgtcaaatggctttgcagaggcttaattggaaagaatcctgccttatgctctctgtcatacctacctagttaaaaatcagcgtatttacaaaataaccattcttgaatgtttactatgtgccaggtgattttacatctggtacattgtttgttttgattctaaaaaaatgctgcatgtttgttgtgaatttcatttcacagtagagaaaattgagactggagttcagctagttgtccaaggtcccctgttttaagggacaggcagtgcaattcagattcccaggtgctgggcccctcccacccctcttaccggcctcctcttaccggcctttgaatgggaaacctcagaacagaaatactggattcttgtagaattagagatgccaaggaggaagtacgtattttttcagaaattggtgaatcttcattccggtgagttttgtagctgtatttggaataaggacatggctctttgctttattaaaatcaccagagaatttcctcccatattagttgccgatgttagtgttgagtacatgaaggagaggagttatatttatcttttctgtcactcagaggctctaattgaaaacacttcctggtcctgtgtcccgtgtgtttgcatttgcattaagtttgacaggcttagagacgcgtaatgtggtattttattagtattattgctgtcaaaatgttgagaagcagccaacacctccatctctatcctgagtaatttttgactctgatgacaaacaaagagcctgtcgtgttgtgaagaaggatgtaagcccgggtttgccctgggattcataacccagcaggaaaaatttactttgtgcgtaaagttgtgtgtatacatctctgcttagtatctaattgctttataaattttaggagcaatatctacttgccagtgtacaaatttacagcaaagcaaaggatgactagtggcttcttatgttctctgtgatgtttctttcctgggaagttatgggactcacrctcacgagcaggaatggaacatgcctccgtggaagcttaggaaatactcgcttatgagctgtctccctctttagataatttggggtctttataatatatgaataaattgtgtttacttgtcttagcattttctggaaatgagttgttcatttaactgaagacttcttgggggcccctgaagattctggaacaggcagggcatgatggctcacgcctgagctcaggagttggagaccagctggggcaatatggtgaaaccctgtctctgaaaaaaatagaaaaaactggctaggcatggtggcatgcacctgtagtcccagctacttagggggctgaggtgggaggatcgcttgatcacaggagaggaggctgcagtgagccaagattgctctgctgcactccagcctgggtgacagagtgagactctgtgaaaacaaacaaacaaaaaaaagattctggaaaagacattcatcatcaagaacttacttccccgatatttaaatcatcaacaggaaaggttatgtacaggaagaagaaactaaaaagtgacaagacactccaaaagtgtgattttgagttcctcagatccagtagtttcaagatggaaactggattctgctacatcattcagcagaacagcatccctgggaagagaggctgtactacccctgttgtacacatggggacagattctagtactttgtatttgtataaattgatttcaagtcccacggtgacttgtgtgacttacgtggtagcaccacttccttaactggaatctaggcgagaataaaacttcatacctgcatagaaaatactaggccgattttctcgttttcccaaacactatgaaggcactggaaagtgttctgcttccatgaccgatggggagaagtccagtgggaggggggtgtgcaggggagaagagcatactccccacgagctcttccctgctgccgggaccatctgctctgcactcccactaacaccaccaccattgttaaaaataatcatcctttagttttacttactatttatttatttatttttgagacagggtctcactctgtctcccaggctggagtgcagtggcatgatctcggctcattgcagcctcaacctcccaggttcaagtgatcttcccatcgcagcytcccaagtggctggaactacaggcatgtgccaccatccctggctaattttttaatctcttattttgtagagatgggatctcactatgttgctcaggctgggcttgaactcctgagctcaggtgacctgcccacctcagccttccaaagtgctgggcttacaggcatgaaccactccacgtggcccttgttttactctttaaagggtacagtatttctcaactgttcagcaaaatagaagagaaatgggtcatagaaagtagctaggaagttagccttcaaaaacctgggaaaaggaactagattttatactctccacctctgagaaacacagggccattgagcctttctctttttgccctgaatcagaggaaatagcattctggtgcttggggaaggaggaggggaaagaaaccaccttaccctgtaccatggggataaggatatcttgctgggctgctgagtggtgtaatgtatatcaagagattggccttttctagacatttaatctgtgatcagagtcttaaggttgtactttgattttccaaggaatgtaagtacgtcattgaggttagggtcgtttaagaagcccacctgctctcctatttctggatgtttagaaaataagatagacttttagatattcttgcagatgctaaggagatgaaactttttgagtttctttttctttctctatttctagaatttattcccttgtttttttccttcaaaattattttatcaccccctccccccatttttttagtgcttgttttagatcttggagtcaggaagtttctgaatccaacttaaatactttctgcctgaactattacttagtccaaaagtgagttggactacattaatctgttcaagctgccataacaaaatgccacaggctttatggcttaaacaacaaacatttacttctcagagatctggaggctggaagtgtgagatcagggtgccagtgtagttgaggtcccaggagggctcgcttcctggtttgcagacagccgccttctgactgtgtcctcacatagtagatcaagagagaactctggtgtctcttataaggacacagatctcatttgaggaccccaccctcataactccatctaactctaatcatctcccaaaggcatccctttggggttagggcttcaagtaagaattgtgrggagaaacatttagtccataacactttctctgacgtttactatcttttaacaacatagattcatctttcttcactggrtaggacctggaggagcagaaggacatagaagttttttggagggaggtggataaaagaagagttgtttctctaggtctttgtttattgatgattatgttatgcattactgcttcctgtggcacttattaggaaatgccccatcaaacccttgcacaaaaggagattgcctcgtttttcttgtaggcttctagtttcagaggaatcgggacatgttttaattgctcacgaccttcccagaaacagaaactggcatgatttactttattcagttacctgcaacacgatcattttaagaaaatggtcgatgttctttgaatggtactatttattgtccattaacttgctagtataaccagcatgactccatctcayggaatgcacatggggactgttgttctctgctggttgtgtcaggctgtcaaaactgcagttgattttcaccttttcatgaaagaagtctgccttgctgtgggctgggttcattccaggatttaacaccattggaaagaaaacagagaatcttcaggttgtaggacagaggcaggacccacctggcacctgggcttcttgttacctttgtctctggtgtggaggaggagagatggcatccagtggacagaggagttcatttttcagggatgacttggttggtctgccttcctgggccagcgtgcaggcaaccccactggggccagagcatcctctccgtgagttctcatagcttggatctaaccctggtcatgttggatttccattcctcctggccttaagttttttttttcttgtttgtttggtttttttttttggagatgaagtgcagtgcagtggcacaatctcagctcactgcaacctccgcctccagggttcaagcgattctcctgcctcagcctcccgagtagctggtattacagacgcctgccaccgcacccagctaatttttgtttttgttttgttttgtttttttaaattttattagaagtgaggtttcaccatgttggcctggctggtcttgaactcctgacctcaagtgatccacccacctcagcctcccaatgaaggtgttttttgaccattcttataccttctcttctgtctcagggcatccctcccccattcagagaccaccatcaagggtcaagggtataactagtcctgattcccaagcaaggggccaaaggtgtcagccaggtagatcatgcttttcctttttgcacctgttgggtcttcaaattctttctttggtaatccccattgttttctgtgagctggtccttttcctaccatgcccaggttgaactctccatctgcctgcccagcttgctggaaaggggcatgtgtttatggtccctgtcccatcaggagctccagcctgttggcaatttctctcctgatcctgcgttggcgtcctcagggctttgctccccggggtcccctgagtggccttctgtctctccgtggtttggatgcagtgcccacgagcttgcctgagtgcacaggtatccctctcgctctcatggagcagcttgcagggggctctgtgaactggtccctgtgcctacttttggggatcctgtgataagcagtgtcttcctgagtgcccccttctcactgtggacatcagaggccccattctttcagtctccacagaagtgtgtgttgaggcccattgagtgttcccaattacgttagctactactaagaagaatttagaaaggccaaactagaagaaaaaagttcagcagacaggaaacactagaaaggattatagacaatgcacacacgcagaggatgtgtggttgtgaattaccctttgtgtgtctttgtgtaagtaacaatgacttcgggcagtgcaccgatggcttggctagttctggcaggatctgatacttactgtaattatgactgaataaactgcggaaacaggggcttaaagctcaaggtgagttcaaaagctatgaggatcaaaatagatcgcttcatgctaaaaagcagacatgcaagaaattaaaaatacagtcccaaaggtttaytgttgctttttaactgtgcttaatttcatattcatatcctaagcgtctgtctgaagtagcctgggttgatatattgaaggcataaacatatctacttccagtgagggcttctgcaaatcctattttgataaggtcttaaatctgttgagatcaggccataaaattctcctgcagtttcagcaataggtaaaaacagtgctcaacgtttttttttttccttttaattttgcattcagactgtgtaacctccatctgtaaatcttgccccccctcccacygcctggggaaaaatatgggcaacatgtggtgtgttaagcaacatttcaagtgtaaatattaaacttggtaaattttaatttaccttttaataattttctgacttacagggactatttttagcagatgagagcttagagatttagtgaaaatatgttgtcataactgcaaatgccagactagagtcgtttgtagtttagaaatgtatcagataataagttcctcatcagtgggcattgctttcctaggtgatakgtggaattttggcccatggatgactgaaggtttttgctaatgtgattaataccattaaattacttacagaatgccaactaaatgcatacaaatgttccctgaagaagagctctattaagtttattcttcatttctgacagcagaatcccaagttgctatttaatttcagaaagtcctttcagcaggtggctgctcatggygggtatgggstgtgaacactcacggtcactgaccgtgctgaggtatcaggaaagcctgggaattagcatgcaggaaagagtcacccggcagaacgtgttagtccttcaactcttctgtgatttgctgttgatacagaaatctatcctttgaagatggcctctgaatggaaatgtactctggaaaaatcccttattgatgctgccaaatttcctcttycaatggaagtgtttaaggtaagatgttgattcttagcaatgtatctaccctttttgagaataaaatcrtctacaaagttttccggccgggcgcagtggctcatgcctgtaatcccagcactttgagaggctgaggtgggcggatcaygacatcaggagatcgagaccatcctggctaacatggtgaaaccctatttctactaaaaatacaaaaattagccaggcgtgtggtgtgtgcctgtaatcccagctacttgggagtgtgaggtaggagaattgcttgaactggggaggcagargttacagtgagctgagatcgcaccattgcactccagcctggcaacagagtgagacttaatctccaataaaataaaaagttttccataccaaatccttttccacttgaaaaggcaccttcttaaccagtttccattttaaatgcttaaggttttatctgtttcatgttgctttttwaaaaaataatcttcataatgacccatattacaagatgctgattaaaattgtttaggtttactgactttctttgtagcatattgttatggaaatattttcaccccctcacttcctactacagaaacaaaaggaaatatagcaagtctaattttgacrtttagtaaaaatgacagaaaatgactcatctcgtggtggttcagttttcttgatgtcccgaggttctgctaagtaccaggccttccaccaggtgctcccgtgaaaatgaagggcttgtgaaatgcatctccaccaaaacggctaccaagttctttacacttcaaaaattatgcttcacacttacgtgaaatagaatattaggttctggacaaagatggtccattcaggttcatccarggaaatcataaaacaggcccatggagtgtgggcggcgacccaacaccattggcgtccttggacagttctcaatgtggttgtgacgggcagacatccagttgcttcccagccctggggtggcacgtgtctgcagagtcgtacaagtttcatgtagaagatgtacttaatgtggtacagcagagtttaaggatttagtaggggacgtgggcttcctggattttactgacacctaagtcctcactcagccttttaagcagctgtggcaaatcattgaccctttcattcagtacttcccctgtttgtaaaattggactattaagatctcccccttaacttagccatgtgattatgttgtgatgtttaactgaatgatgatttttacagtgtttgggggctcctgtactggaggaacagtgtaaatataatacactgttagcatgatattgaccgacagtgaagccgacagttgtggtggccaatgttgttattttttgcctcactgaccaaatctttctctctcctcctctttgtcttcctcttcctctccttccctcttctctcccttttattcttccttcctttaatactgtcctgcccttacaaaaacgatgaagagaaacagcctttaatgttggacctctcagctctgccacccccaccagagacagcctgtcctcgtctcccctgcccctttctcttcaccgtggcctcagtcatctttgaatgtgaatcaaatccaatcacatccttcacccttgaaaaaataaattttattttgacgtaccctatacacacatgtgaggagttgaaggagtgagccaatgggaaattacagatgcccaccctccggtctaagcctcggagctgccaggccagtgragcccccgctgcagccccaggtctgcctccctgcgggaccagggcacccggggcctcacagctgtgcgggtcctgcctgtgcctctctttgtggcgttccagcctgtgtatgcttccctaagtgggatgctgagtcctgttgacaggatgggaagtgggcacygtcctcattgttcagagagggccctttccctactctgaagagggaagaaagctggatgtggtctgggcaccacactggctttgcttttcctcagagtggatgaggattcagtaggtgaagtcgtgagctaattttttttttttttggagaaacggtgtcactctgtaacccaggctggagtgcagtggggtgatcatagctcgctgtagtgtcaaactcccaggctcaagccatcctcctgtctcagcctcccaagtagctagaaccacaggcatgcaccagcacacctagctaatgtattagtttgttctcaygctgttagggaagacatacctgagactgggtgatttataaaggaaagaggtttaattgactcacagttcagcaaagctggggaggcctcaggaaacttaaaatcatggcaaaaggggaagcaaagatgtcctttttcacatggcagcaggaaggagaataagagctggatgaagggggaaggcccttatcatcagatctcatgagagcttactcactatcaggagaatagcatgggagaaaccgcctgcatgattcarttacgtccccacaacatgtggggattatgggagctataattcaaaatgagatttaggtggggacacagccaaaccatatcagctaatttttagattttttgtttctgtacagatggggtctcactgtgttgcccaggctggtctcaaatcctgggctcaagtgatcctcctgccttggcttcctaaagtgcagggataacaggtgtgagcgactgcacctggtctgtgagctaatcttaagaagacgaggggttaccacacttgcttctactgaagttgcagcatgaactctcagtactggaggtcacatcccttagaaatgtgggcaggggctgcatagtattccatggtgtatatgtgccacattttcttaatccagtctatcactgatgaacatttgggttggttccaagtctttggtattgtgaatagtgctgcaataaacatccgtgtgcatgtgtcttcatagcagcatgatttataatcctttgggtatatatccagtaatgggatggctgggtcgaatggtatttctagttttagatccttgaggactcgccacactgtctttcacaatggttgaactagtttacagtcccaccaacagtgtaaaagtgttcctatctctccacatcctctccagcacattgggacatggatgaagctggaaaccatcattctgagcagagtattgcaaggacagaaaatcaaacaccgcatgttctcactcataggtgggaattgaacagtgagaacacttggacacagggttgggaacaccacacactggggtctgtcgtggggtgtggggagggatagcattaggagatacacctaatgtaattggtgagttaatgggtgcggtacaccaacatggcacatgtatacatatgtaacaaacctgcacgttgtgcacatgtaccctagaacttaaagtataatttaaaaaaatacattaaaaaaatgtgggcgggggttggttggttcttgttttctgattttacaacttagctctcaggagcaggctgaagttcactgtttctttgcagtggaatgaatgttctcatcttgtctagacagctggaccaggagtaggacccaacttaggaatctttttagtgtagtcaaaataagctgaatattgttaacaatcttggtctggctgactttggcattgtgtccgtaggttgcaaagatgataaaatgctgtctacatttccttctcactaaaagtggctaaaaatgtctgtcttatccatatactttattgatagtttgtgtgggtgtagaattttaggtgagctatcatttgtctcaagaatcagaggttttggctggggcgttggtggctcacgcctgtaagcgcagcactttgggaggccgagacgggcagatcatttgaggtcaggagttctagaccagcctggccaatatgataaaaccctgtctctactaaaaatacaaaaaaattagccgggcatggtggcatgcatctgtaatcccagctactcaggaggctgaggcaggaggattccttgaacccgggaggcagaggttgcagtgagctgagattgcaccactgcactccagtctgggcggcagagcaagactctgtctcaaaaaaatgaaagagggtaggggggattagaatgtggtggtcagcccctggagtgtggcttgtgggctgcttcttgtcctgtagtatttcctctttggctggttttccagggagagcttttcagtctcccaatgtcccacctggggctccaggtctgactgccagcgttccaggagccacgtggagagaagagggctgggtgctggcctgcagtgttggttcctgccccagcctgttcagagaaggctgagacagggatcagggaggctgtggggggcgtctaactgcctctgcttcccagtcacctccccatgcttatatcttaagctcctrtcaaccccccggtttcggacatatctggtgggactcgtttcagagcctttcaaggcttctgtaggagccactgtgttggtgctcagcttttctgctgaaggcctgggatttggctttgctgaatgtgtgaaattactcacttcttcttcatcagcttttttgcctccttacctttgtgtgctgagtgggtgtgtcttttttaaaaaaagtctctggactgtagttttggttagagtttaggaggaggtgaaatgaatgtgggttttcagcctgctgttttaacctggcactgctgttgaaaagaatcttgttgtttggactctagggtacgatcaagctgccacatccttcctggacatgctgagcctggggagatttttcactcgctcccctgtgcagtgtctccttccgtgcccctccttgctgtaccaggaggtgcacttgttatgtttctgtaacgccctttgtaccttgatatggtttggctctgtgtccccacccaaatctcatcttgtagctcccagaattcccacatgttgtgggagggacccggtgggaaataactgaatcatgggggtgggtctttcccatgctgttctcgtgatagtgaataagtctcacgagatctgatggttttaaaaatgggagtttccctgcagaagctctcttctcttgtctgctgccatgtgagacgtgcctttcattttccactatgattgtgagacctccccagccatgtggagctataagtctaataagcctctttctttagtaaattgcccagtctcgggtacatctttatcagtgaaaatggactaatgcatacctattttgttctgttaaagtcctactcatctttcattttcaaatatagattccccaraggartccttccctggacccctgaccctggcccagatgaacttgagcctctgttggtgtccttcagcagcttgttctgtcacagttatgcttaatcatttgtgcagctccttgtataataccggcctctttttgcctaactttgaagctccaggaaggcaaggactgtgtctttcctgtccattyttagaaacatactttyttgaccatagtagcactcattaaatacctgtccaataaatgsgtgaattcatggacatatgtyttcaactccttgaatttaatttttttttttttttttttttttggaggcaatcttgccctgtcacccaggctggagtgcagtggcatgatctcagcttggccccctgcaacctytgcctcctgggttcaagarattctcctgcctcagcctctcaagtagctgggattacaggcatgcaccaccaggcccagctaatgttttttgtatttttagtaragctggggtttcaccatgttcgccaggctggtcttgaactcctgaactcaagcaatccacccacctcggcctcccaaagtgctggatttataggcgtgagccaccatgcctggcctgaatttaaaatttttgagttcatatatagattaaatggacatgcacacttatttagaggtatgaatactaagactcaaaaggtatacacattaatcattctaatatatttgtaattaaaaattaactaattcattaaacatttattgtctttgcacaaagctattatgtgctgttgacctgattccagagtttaatagtttgttcatattttccaaaatacaattaccttaccttcttccctcactttaatttcttcccataagaattcagactattattttggtagggtatgtgagcattatcatcttattcagtattttgtgcataattaaggagtgctttaagagcagatactgaatattacttttgggcctctcatgaggcagggtgtggggttaggcactttataaatagacattagttgcattgaatattatgtgttcttaaagctggtgagatactttcattaatgttttctcttatttcagttcaatggaagagacacaggaggtttcttaactatattttgtaatgagtgagaatctacacgtttaatttggagggtgtgagaacaycattttcttagtttgcaaaggctactgtcacaaattcccatggactggatgacttagaatgacagaaatttgttctctcatgcttctggagactagtgtgtgaaatcagggtgtcggcaggaccacactcccctgaaggctctgggtggaagcagagggcggccctggcttctggggtcgcctgtgtcctgggctttgcttggtctgtggccacctccctcggttccctgcctccaggttcacatggccttctccacatctgttcaaatttctctctgcttacaagacaaccgtcatttgactggccctgtgtgaatcccatccaactttgtcttaactcaattgcagttacaaagaccctattttcaaataaggttgcatgatagcttctgggtgagtatgaatttgcagggagacactcttcaacccaatctgatcgcatttcatgtatgtacagaaatcttagaaataacacagtggcactctctactgacttcctctgcttrcacgaaggtaatgttcagagaaatggtatggatgcatgggatgaggatccaactgtcttagcagttgcttcatttatttaaaaaaaaaaagagaaatcttctctcaagtttttagaagttctagcaagcagtattctttgtgcaggatccaaaaagagacacacacacacacacacacacacacrcacacacttacttgctttttttctctgttatcactgttgatcatcactgtttctcagcaggcagacttttttctagtttctttcattacggtaaaaggaatatgtgtttgaattcagcagtgagtcatctgagatgcgtgttgttatggaaaattgccatagcgttcagctgttacgagacagaagtcaaagctaagsacatttaatggccggagatgagcggtatttccaagaagttctttttattatttttacactttagatgaaatgggtatttggatgggatgagtcccattatgctgcggttgctcacgttggggggatgtgttcacacgtctgtgtggttgtyggtgtctgtgcatgcaatgtgattgagctcctgggtaggtgttcctttctgtcttgaatacaaactggaacagtatgagaacaagctcatgattattatttctactgttatttatctttgatttaagagatcactgtgaatagctttggatgccatactttactgggaattctgacttaccttatttggmaaatacagatcatttccaaaatgtacattcagttgaaggataaatagttgatgaaataggtttaaaaaaactcaaaggacattaaaagcctcattttattgaaaaataaataatgacttttttttcttgaagacsaaccctgttrtttagaggcctaaaagatttgccaaaactatccatatactatccatgtctataacaagtctgtagaggtgactgcactgtatatcaccgtggctctcagtggattttaatttagagcagatgtctctgcatcacacagctgggtgagtctcagcttttggaacacaaagaaatcttccttttaaaaatcaacttaagatatgtttagaaagtagataaaggccaggtgcggtggcttatgcctgtaatcgcagcactttgggaggccgaggtgggtgaatcacctgaggtcaggagtttgagaccagcctggccaacatggcgaaaccctttctctattaaaaatacaaaaattagctgggcgtggtggtgggcacctgtgatcccagctactcgggaggctgaggcagaagaatcacttgaacccaagaggtggagattgcagtgagccgagatcgtgccactgcactccagcctgggcgacagagcgagactctgtctcaaaaaaaaaaaaattagataaaacctttctttgacatagtcactttgaccaattttgcagcctctggaaaccatcatttgattaacttatgacatatcccaatgtccactcaagcaaaacgccccagtttccataaaagctttttatttttgtcttttgcgaaggactacyaggaagggtttctgtcrgtttgtttctgtcatcaaacaatgaagtttattacaggacagactcagtcttttggtcaataatgtctttgttgcctcagttttccagttcactgagtgtatactaagagaccactaaaggattttttggggcttggtaagttttaaaactagggctagaggagactagaaaataaaagcctatcagtaattgtaacatgtcacgtgtctgacatttacgagcctccatattactttttcgttcccagcaattcttataaatcgtattccatatctgagatcctacgtgtttgcaaatrttaaattgtacaagtttcactgacaactcatttgtccaccaaaaagatctataaataagaaacagcaattcccaattttctagttaatggaaataaaatattgtttccttagaggaatacagaaatatagctgggagaagacagaagctctctagcttactttgttcatgaccacascttgtcacagcaaggaagggacatayctgaaatgtcactaacatctatgatcctttttttatcctttaaagaagggaaattgttggaacttytttgtgttctttaaaaaaatattgaaaatctcagtgtgtttgaaattctaaatgagctactcagagatttgccttagagtgcagggaattatgcataagacaactgcacttctttgggaggctgaggctggcagatctacttgaggtcaggagttctagaccagcctggccaacatggtgaaaccacatctctactaaaaatgcaaaaattagccagaagtcacttgaacccgagaggcggaggttgcagtgagctgagatcttgctactgcacttcagcctgggcaacagagtgagactccatctcaaacaaacaaacagaaagacaactgcacttgagtccaaagccttggcatcctccttgtagcctctctccgcttcacacctctgtgttggggatccccacatctgccccaggtttggtaatttactgaaaggactcacaggattcagaagtcattacactcatggttataggttattacagtgaaaggatagaaagcagaatcagcaatggggtgaagtccagaaaaccagacagaagcttccagagccccctcctggaggcgtcacacagcacccagctgtgacaagaggtgccaggtactcttctaccagggcagttccttagacactcagtgctcagggtttttactggggactggtcacataggaaccctctgcctggcacagaccagaattcccaactcttagaaggaaaccataaaccagattgtttgtacacacagtttagacacagcaaaccactcttatatttaggaaaagttttagattggtataagctattttttatcagccgcatttccagattgcagccacagacccccccttgcaggcgagccccctctgtgaggaccacagcctaggcctcccaggtgaacccttctctgcacacttccattccacccatcaggaaattttgttggctctcccttcaaactctgtcctgaactcactcttctgtgtagcctttgccactgcccaagtccaggccaccatctctgtcccatggactgtcccatcacgccagagcttgtttcctggcttctagtcattgcgtcccccgactgcagccagagggcttctgttgaaactgaagtcagatggagccccacttttgctcctgcctccctgtggcatgtcatctcatcagggcgggatgcctgggtccagtcgcctgatgctggaggcttcacgtacctgccgtgccccctccagctccccactatcccactgacacctgcttactcctgcctaaggcctttgtataatgcctggtctgcctggaaggtcacccccagattcctgcatggccccttccctcacttcctacgggtgtctgcttaaaattagaaaaccctggactgggcgtggtggctcatgcctgtaatcccagcagtttgggaggccgaggtgggtkgatcacctgaggtcaggagttcgagaccagcctggccaacatggtgaaaccccatctctactaaaaatacaaaaattatctgggcatggtggtgcttgcctataatcccagctactagggtggctgaggcaggagaatcgcttgaacccgggaggcggaggttgcagtgagctgagatcatgctattgcactccagcctgggtgacagagcaagactctgtctcaaagaaaaaaaaaaaggaaagaaaaccgcactctgttccactatctccccttctgcgcactctccctgctatcctggttcagcactgatctcagcactgattcccccgactattatatagcactttgccttttattttttaaatttaatttaaatagttttttgcatttggcctccttcccctagctagaatgcaggctctacgagagccaagtttgtatttccatgactgctttatccccagtgccttccgcagtacccaggacatcatcagttctcagtaaatgttcttgaatggggattcatggggatataagtccaaaaattaacttagaaggatcaaaacataggagaggtcatcactataacttaaattaagcaagcctcctgtgagtagttctgaataatagagatgactagcctaagaggggaatggctccatttatgggatggtgagtttacaactaaggatggcacttttgtaatcaactaaaaataccccagctcagytctttgctaagaagaggaaagagttgagagcactgagaagagtatttggcctcccaattaatttcaattcctcattgaaattaagaagacatctcaggggccaggcgcggtggctcatgcctgtaacctcagcactttgagaggccaggcgggaggattgcatgaactcaggatttctagaccagcctgggcaacatggtgaaaccccatctctacacaatatacaaaaattagtcgggcgtggtggcatgcgcatgtaatcccagctacatgggaggctgaagcaggagaatcacttgaacccgggaggcggaggttgcagtgagctgagattgtgccactgcactccagtctgggagatagagcgagacttcatctcagagaaggaaggaagggagggaggaagagagggaggcaggggagggagggaaggagggagggagggaaggagggagggagggagatctcagcattwaaaaagaaatcaaaacataaaattaaaatctcagcattaaaaaaacaaaacaaaaacaaatcatgttccacgaaatcctgttgctcacaaacctgaaatgtcaaggtttgctgcttgttgaaagtgatcacggactaggcttaatgtctacacatgttttatgtaagtttttttttttttttttttcctcttttttaaaatgtccgtcttttcagattgtttgatccaggcactaacctgctactgtatactgttttctaactaaacaaatagagaataaagatataaggaacttgaggaataagcccaagagagcactgtggtctggggatacggttggcatccagggtttctgcttttttataggcagctaattcttttctgctgaattgatcgctgtttcatgtcatgcttctcaggagtgtatgtagctgacgggtgaggtgcggctgggcagtgactccctagtgcttcctgcttatttccgttttatttgaagccaaggaggagtttgtttttgatgtgagtcatatgcccaggacactaattccaatccattctcttatcacctccctgaccagttcctaatcagaatctgtacctcatggaggttacagggatccaaggtcatgataactgaggcttgtactgcatctggactcagaacagagcaaatgtgtgcctggtctaagtacttccgtaraatacccagtgtcttggtgtccttctgcagcacagtctctgtcgtctttgacataagtatcgagattatacacacaycactgataagggataaaaggcaccctggaaatccgtaaataaaggactagcagtcacggcagtgcactgcattgagtctggtttggttgggtctgaaactgtacctgaaatggtttctttaagtatcttgctttctctatttctcgatgtttaataaaggaagggacacggacatgtagagaaggctaaaataagaaatgctgtgtgaggccatttttccccacacaaaccaagaaagaaataaagaccttccctgcatggacaccctctctactaagagtgttcatgctgctcatagcactgaagattccacatccagtgctttttttcagtgttttcttagctttcaatgatgtacctgtcagtgtgattatagatttaacccttaggagggaatctctcctacattttagcatcggagacctagattaaaggctgaggagagaagattaaatgtggccaagagagagaagcttttctttctcattccgtctggtacagccaaaggggtaaggaagacgcgggcttctcttacgatagattgtgaggctgcagtttctatggtgactggtttctttttcccttattcagcagctaaatgcagcaacaytcaaacacttgtagctgagtttggccttcaggtgggacacttacattctccaggcatttgccttaagcccatatatagagacagagcttaattttttccccaagtcatttagcagttaatgtttgtgggatacatgatggatatctccttctcatcatgttatccccaaatggctttgaaatagaggctgttggccgggcacggtggctcacacctgtaatcccagcactttgggaaaccaaggcgggtggatcacctgaggtcaggagttcgagaccagcctggctaacatggtgaaaccctgtctctactaaaaatacaaaaatttcctgggcattagtggcacgtgcctgtagtccacctactcgggaggttgaggcaggagaatcacttgaacccgggaggtggagtttgaagtaagctgagatcgcgccattgtactccagcctgggcgacgagggagaaactctgtctcaaaaaagaaaagaaaagaaaagaaaagaaatagaggctgttttgatggtaggtgattttgttagcagactggtgcatgtccctctgtgatctcggtgcyattgattgaacttgggaggtttctaccccatggctggagccgggtctgttctctcaggcatccccagtgtctgggcctgaaagcayggttctgcagagtrcgtgctcccctacctcctgttgccattcccgtttctttacagacttgaagaggtttgttaaacagaatctctttgggtggaaaaccccagagaagtccagttcgttgaatacccgttcctggcaacatacagaactgcgaggtggggttcatctgtgggatcctttgcctgttctgggtacttgaactgaagcacrtgaattccatggcaaaaaaggaccagcggggccatctagtttttatgagtattggagaaaatcttataagagacacactaaagagggcaacattggtcaaacaataaatgtaactataaaaatcgcaaaatccagatctatacagagttcgccatcgcagctgcttgatcactggggcctgagctccgctgtctgcagtccgttagatagcaacttgcttttaatcctaaacgttaagaatttaagaatttagtcaactttcagttatctgctccgggagttctcactcccaaatggcttctgcttaccgcggataattctggctcttgccagttcccggggaacttgcagggagggtgagatcatattagcatgaacttagcgtaattggtgtatgggatttggaggtgtgcaaaggggatacatctcttgtttataaaactagacacatttcaaagtgatcattgtgcctgattttttattttttgggccattttctattccattctctattaataaaaataattaagaaaagattataattcttttatctacagaagatcttattgtggatttaagccacggtaaaattgtttggaggtggctcccccatcccccctccaaaaaacattaaaaaaccaccaatccttttgcaagttaggccacccgtttaagccccgtagtgcctttcatgaacagacacttgctccagggagaaacctgatgtaaagagaagtttgagcttctctcttttaactttaggacttcagaggtttgagagctaatggaaaatgaggaccccatgtaataaggggagcccagtggtgtggccatgccaccgggccttgccyttcagcrctgtcacccctgcccccagggagggcacactgaggaggctggcctactttgctgggtgtcaataaaaggtgtggggactgttcattcctgagctttctctcttccgtccttccgccagccaccctactttgaatctgcctgtctcaatgacataaagtcaaggataagataaaatctgcctccagttttgtcgccagtgccatttataaccagaaaggccagcacgaacatgtcagataaacctttacatgaatatatgatgtcctgcacttaacaacttgatgaaaggaaaggctcagtttaggagagtggaaacctgctttaaagctccttaatatttaacaagatcttgcacttgtggtgacctgcaaagtctctagatcacaacaggatttattcttttccctgccggcatctggattctcctaaaagtaaatccatccagacatgcctgcatacgtaacccccacccggcaaagggatcagaacatttggtcatttcgcctgtgagtctgtactgattcatgcactccctgatcctcagtcattgctgagcatccgaagattctgagagactgcaggtctataaacaatgggacagggagccaaggcatggccagagtgttacaaaccctggctttctgtgtgataagccactcaccttgaggaygtttttggaatatgcattaacctttcagacctttcgggatagcataaaaaggtacgaaggaaaaacataattgaagccatagatgaatcataggaactcaaaaaccattcttcattggaaagtgttgcagtgaattggtgagcgtttctagtgattcgcacccacgggctgcagaccttgtgctgggtactgtgcatatactatctcacatccccacagtaacctgactcgagaggcacaggagtcttactggttaagttcaggaattgccaggctcagagaagttaatttctagtcatacctcatacagagagaccatgggtgagccaggatgcacagacgtacctcaaacccaaggccacacttttttttttttaatgtttctttgttaaactggggtatttaaagactgcgcaaactcagtattattataacaaagaaccagaaaatgaattctgagagtattcagtgttgcctattcagtatggtatttgaactggagtatgttgctcaactccttattactcagttgcttttgacgagggctctcctgggattttggccaggatgatttttttattgtactaagtgacaactgcccctgccccttgccaaataactgtctgcactggggaatgtggtagatgccgcctgtgtagaattagaaccagtggtgtaagccggaagagtggccccatttttcttgtcagtgattggcttagggagagatttgtgaccaatttgggtcagtaataaatgaggacatctgctggtagtttctggaataggtttccttgctttgaagaagcagcatagggaagagggggccttgctctgcctgagaggcctggagtttctgcagccatcttgagcccacaagggaggagctggactggggaaagctgtcatatttagggtgtggaaggaggaggatgaaaagaaccgaggccatttctgacattgctcatggctctgttcaccaggcttttctattcacttgccttttctctggacccctttgctgtgtgagataatggatttccttatggtttataccaggtcgagtagggttttctgtctggtctttgtgtgagaaggccctttaatagataaaggcttccttggggaccagtaccatttcaggtgactggtstgcttgtctgtaggttggaaatgattgcttactccttgcaaacagagaacccattgctgccatagtggtagtaggcagtgggttaaggagtacttgagttattgttattgtcctgtgcatgcaaagcacctcttgtaccaccataytgtggtcaccattgtttatggttattgctgtcattcataacagcatctttgaatcttatacactagacattcaaagtggaggcagtgggagggtaacagcagcaccaggtctgcagtgtagactggcagcaccgggtctgcagtgtagactggcacaaatgtaagtgtgratttccagktcttgctgagacagcatcagagtgagtcaaaattaacagggttggttggcactgctgatcacaccaaggggctgaagggtgggtactagagtgagttaatgctggagacagaggcagagagaatccactgatgctgaggaagctcatcagaagtgtagggggaggagaccacaaggtcaggtgtctcatcagcgatacctgacttctctcttaaccgaatctgaatcartggtcctcaactcaggggccaggggcatgtgcccttcagtggacatgtggcaaagccaggagacatttcagttgtcccaggtgggggatgcagtcagcatctagtggatagaccccagagatgcagttgcaacrtcctacagtggcagaacagccccccaacaaagattctggyccccaaaggccaatagtgttgaggctgaccatccctgtttctcacctggaagtggttgatggagggagccgagggcagctggggtgtgaggaaggctctggagactgaagctgttattagatccagtccaggctgcttggcagtgggcactttccagtggggaggcttcccacttgtggcagagcacgtagaggggtttgcaagctctctgtgtttactggcctccacgttggtgtctgggaagggcaaaacagaagctcagactgctgggtggagaagttttgygccttcccagctcttgcttctttctgtgaagcatgctggcgtcatgtttccatgacagcagttgagttaatgcatttaggggccccctcagcgtccaccacatcctgcctgttgtaaattgtgtggttcaggttgtgatctatgatactacggtcctaaatttctcattactattttttaacttgattgaatgcacagctactagacaaaatcgctctttacctctgtaagtaaaaaatagaaatgcttattagtgttcagcaatagattttaaaattacatttttgttacaaatacttcactggctaaattgaaatcagtgtgatcaaattgaaatgtcataatactattgatttaataaatgctggcctcctaatatctgtttttcaatgaaactagtattacgggagtaattttctaatgaacatctgagcactaggtcattggtaaaacaaaagaagaatgatatcataaatggttctggatggttttttcagcgggacctggcatgctgatacgaatagaggaattaaagcgtagctcattatatattaatttgaatgtaatactaactaaaaccttccattgacttcactgaagcctagtcttagaaattatgcagattaatggaggccttgaaaagaagcacatgcaatatttgagttccctttggaccaaaaaactggcatgttggaactgaaaaaattatatactgtgcagtatttttgtgtaagtacaatacactaaaagattttgttgcttaaaaaaactgggcagggtgaatcctatatctgttttttgtctattttattttatatccaaataagccgaaaggaagaagcaaaggaccgaaggttgacactgagattgctgctgcagagggagaatttcctgcagcttttgattgtggaactcaggttaagaatgtggttcctggagccaggcacggtggctcacgcctgtaatcccagcactttgggatgctgaggcggttggattgcttgaacccaggagtttgagaccagcctgagcaacatggcaaaaccccatctctacaaaaaatacaaaaaattagccaggtatggtggtgcacacctgtcgtcccagctaccygggaggctgaggtggaagtattgctggagcctgggaggcggaggttgcagcaagccttgattgcatcattgcacttcagcccgggtggcagagaccctacctcaatgaaaaaagaatttggtttctgcataaggatgatttcactgccttttttgtttttacatgaaaatcctcaccaagtacattttaattttgttgtattaattaatgagaacttgttctcccctgtgcctcatctttcacaattttatatcatgtgagatgtatttatctaataaagtggcgatgggaagaggcattagctattttcggagtctgtgatagccacatagtgacattttaaaagcataagcttcggttcttcaagcccctcaagtaaatgtggagatgagtcaagttcaggcaggcccagcagacatgaatgttctttcttttctgtcttctctttctcctgtctctctgttagtaatactctccattgctgtctgtagattaatactcacagccacgtgtatactgtattttataaagaactttgctgttcaccctgaagctttggcacctgccagagacatgagttgctgctgactcatgatgactatatccaggcaggtgtgtttctcccgcagcgatggttcactcctcctgaatcaggtgctgtccctttccaggcacagcaaccactggcaaggcagggacttcatcagaggcagatgttgaaagtggtgggtgaccgtgggtagtgagtgcacccagggcaggctctgacgttgtgggatcctcctgacccctgttttaagtgaaaaaagtgagacataagccaaaactataaagtcaggacaccaagatattgcagtttgtccatactcctttttccagcgtgatactctacttcctgtttctcactgtacagttttttcttttcttttcttttctttcccctcccctcccctccccttccctttccaacggagtctcgctctgtcacccaggctggagtgcagtggcgtgatctctgctcactgtaacttctgcctccggagttcaagccattcccctgcctcagcctccccagtagctgggattacaggcgcccacygccacgcccagctaatttttatatttttagtagagatggggtttcataatgtaggccaggctgctctcaaactcctgacctcagtgattttctaagtaaatttccagcttctcagggtcagcaatcacatcaactactttcctgtgcgtccatcataggatggtgcctgtcacatrgtgtttaaaataccagtcccaggctggggttggtgtggactttgcagccagccacgtgtactagattaaccacgttggtcagagtaacctgtcttggttaacatcgataacatcgcatggaagtcggtatcgatggaggataattgatgaagcacygtggacattttgctgcacatatttcctaaatcttcattgcttactgtataaacacacaaaagtagtcatggtatttgttaattgttgatgaaggttgtgactggctgtaggtaaacattttggaagtaatttttaggactggaatgcactcacatgctttttycttaagccactgaaaagtgcgaggaattaacagcaaaacttggaggttttaagtaaatgatcagtgttagtagctatcactttttaacttagcaatagctctctttgaaagaaaattctagggggctttaagtaggttgtaggttgtagtggtattgtttgcttgtactaattattgattttttaaaaatcctttttggtctttgttccgtggtctgttatataacctggtggctagagggtgggctcagactgaatcaggctgcttgggtttgaagcctggcttctcttggtagctgtgtgcccttgcttagataacttcatctctctaaatcttaatttcctcccacaagagggattccaccccacagtctgtgtcagcagaaaatgacaatgcagggagcatgcctgccagtatttacaacatgttagctgtttctgtccacttgatattacagcctgagcatctcttatccaaaatgcctgggaccagacgtgtctctgggttcagattttggaatatttgcagtacatttgtctgttgagcatctgaaaacctgaaaycgaaaaggctccaatgagcatctcatgtgagcatcttgttggccctcaaaaagtttcaggtttggggcttgggattttcagagttgggattccagtttgtatacrcagaacctagttagtctcagcacagagttactacatcttagtaggagagtgagaactgctcaggctctggagggaataaagctgatgaaaccagggtgcagaaaggaagttgatgtagatagaaccacttttaccacgtcagtctgctgaaaataaggttccctgaagagacattgccacagtagcctgtgaagacagtcttccaataaaatgaatggcattttacttttgatcaatataaaactactttagggcaaaaataaaaatgggtagtgatgaatgtagatgggaatgacattgctggcatttattaaaggagagcagtttttctgtacgcaatttgaccagactccagtactctgaagtaaacagtatttctttaatgtgacaggcatatttgtaaatctactaaggacttagtaatatatcctgataacgggaataacatcattcttgatccaataattgcaaagtgtgaatgattctctagagctttgcaaaggccaagaatgtctctttcaaatgacagtgaattttccattatctcttagtacataatcggtttggcgaattgtcttcaggacccaggaactctctctgtccttgacattgaggatgatgagttgggtgtttgtgtaaatgaatgcatgccctccgactgcattaacagcccaaagtaagtggtctggggtgattagatttgtttttcaatgagaatagctgcatcttttctcatatactaatatggatggacatttacaccacagaactcagcagttctgtctgttggcttatttggaaattcgctggtgttgaattcttcaattatcataaaaacttgttattccttaggagtgtcaagtgactwsttttgccttttagatcatatttcagtgcttccatccagtatccagagcccagtctccatgcataaatccactgtgccaccttcccagaatctttttttttagacggagtcttgctctgttgccaggcttgagtgcagtggctcgatctctgctcactgcaacctccacctcccgggttcaagcgattcttctgcctcagcctcctgagtagctaggactacaggtgtgcaccamcatgcccagctaatttttgtatttttttttctttagtagagatggggtttcaccatgttggccaggwtggtctcgatctcttgacctcatgatccgcctgtctcagcctcccaaagtgctgggattacagatgtgagccaccgcgcctggcccccagaatcttttatcatcatgagtcacatgattttcgtcttccaaattaagcttcactcctataaatcctttgactactgtgatcgtagtgatacttggtttttatatgctagaagtaaaaaaatttgttttgaagttccttctcagtctggatcttccatagctgttcttgcctctcttttccttctccctttgacaaatggagggtgttctgtgtattccatgcaatagctgttagtctcctgtgcggtgyctcagtggtttctgatcagtgcttattggatgaatgakagaatataggatyggaatggatgtcaagacatcattgggtttttgtcatcccttcagtttaattcgataaatatttatggaagcctttcttgggtgagccacgtagcataaatgagggagtttggcatttactggaaagttctgcacatacagcatggatatctttcatgttttttaaagttctccaatggccagaagtttcagtggcaaaccccgtcagaaaatattgtcacgctcttgcagtmaaacgtttctgaaatcgtcattcatcaataatataaacattagagtagcaggtttagccaaactcttaattgttttgtctttattcttgagtcttctcaatttccgttacgttgacttagctttcaaactggtgggatttctatatggtcatagagggattttttttttttttttttggttgttgattagaaagtgattttcagaaagtgaaagttagggctggaagatacagcaatgcattttatagtttccaaatttatttctgaaatacggagttgaagttcagtaggataagatatgtggctatttgaggccagactacaaatacctgtgtttggatgctgcaacctctcagaatgtctggcttctcttttcagtatatgaaacaagagtgtttaaggggttttgtgtagtttggaargaaaaacagatgcatttctgtgagtaagaagtgtcttgactataacttacgaactgtttttacccacaacacttctaacatcacatgtgtgggttttttccacaccaaccagttcttcaactctctggacagcaagtgaatatcctgcagtttaattcatttctgacactgtctgaaagcagtgcagaccccacaagtgargggctcggtaccataagatgcctccactttgatgccagttacaagtcctgggcttcctgtacttgatggctataaattagggttcctgaaaccccctccttggatttgatagttttccagaaggcctcacagagcagtttccttactattacctgtttattgtaaagggtaccatacaggatgcaaatgaacagccaaatggaagaggtgcccggggtgagggctggaagggggtcccaggcacaggggcttctggccctgtggagttggggtgcccccacctcctggcacatggaagtgttcatcaacttgaaaaaccccaactctgtcatttagggtgttcatgggagtttcattatgtaggcacgattgattaaatctttggccattggtaatgagctccatatccagctcttctcccctccctagtgggtgtggggtggaaaagaacttacaaccctctctaattatgccttgggctttctggacacgagcccccaccctgaagctgtttagggtcccatcaagaatggacccattagaacaaaagagctcctatcacctgggaaatcccacaggatttaggagtcctataccagggacaaagaccaatatacatttaccacacagctgaaacctgggagaaataatttaagttgtaggagatctgagccaagactgacagaggggaaactagtttctaaaatttttggaataatgctcactgagcattattcttaaactgtttaagaatattttaatgtcatgctatttttattttcatcccgcatccaccatgcttggttttgatgttttatgttcattgttatagatgagcaaagatgggaagtttaatgatggacgttcgagcacaggacactctgggagaaaaggaagagattgtgtgttgtctgcaggaagtggaagtgatcccctcttaacctagagatgtaattagatgcagaggacgctgaagtcattacccataagcatttccaatacagtccgcagccctgagtggatagggttatctcagggacacattgctgtctgctgtatttccaagcarcggcagccactgcctggtgtctgctagatgactgtgaacacaggaagtcctcagagagggcagggcttctggggacacagagtttccacacagcacggggagctatgattgacagagcttcccagaggacttggagtatgagataaaagatgggtgtggatttggctaaagactccaagtcagcggtcaaggtcaggttgagggcctgcgatgtagaaagggcttagggttatgggtaaaccctgcttagaaagctgactctactcagagagcaaaggttggagcaagmgttttgtggaacagagagaagcacagaatctggaatggagggaatgaagagggcgggtagaccagaagccccgtggctgtcaggatgccyctagagcagagactctcaggaaagccggggtgatagaggcagccagggagaagacccatgcttgtccccgtgcaccagacctcaggaatgcctcaccctgtgcctgtggctggtgaggggcaggctgcaggaggaaaggggtcctgcacagagaaggaggctcctgagaaacactgacattcatctgttagccatcacttatagttatgaatgtgccgggagtgactgagggcacctctgagttgtcaaacagcataataatgactgcttagacttgctgagtacattcaggctacgctttattatttcataattctataataattccccttttccaaagatgaaagggtttatacttaaatggggaaggatatttacctgcaaaagcyrtgatcgggactcatttcccgctgatgggtactggggacatggttgtctgacaggaacgttcactttttgagatggagtctcaccctgtcacccaggctggagtgcaatggtgtgatctcggctcattgcaacctctgcctcccaggctcaaatgattgtcctgcctctgcctcccgggtagctgggattacaggcttctgccaccacattcagctattttctgtatttttagtagagacagggtttcaccttattggccaggctggtctcgaactcctgacctcgtgatctgcctgcctcagcctcccaaagtgctgggattacaggcaggagccactgcgtccagcccacttttaatctttttttttttttaatgtttaattttttttattggtacataatagatgtacatactttggggtacatgtgattaatacattcatataatttgtaaagatcaaatcagtataattgagatacatatcaccttaaatatttgtcttttctttgtgctagaaacattcaaattaactttgaatctttgaattcggatgctagcaagtcaatgttggtttagttgtgatggcgcctcacctgtggcttctggccctgcctggacatgatggctggtgtgtgttaatccacattcgctctctgtacagtagcctttgattccttctgtttcctgatttgctttcccccagccacctttaaaaataaatgttttgaaatcaaaaccacaaggagataccgtctcacaccagtaagaatggctgttattaaaaagtcaaacaaataacagatgctggtgaggctgtggagaacagggaacacttacacactgctggtgggaatgtaaattagttcactcactgtgaaagcagttttgagatttcttgacttaaaacagctaccattcaacccagcaatctcactggtggctgtatacccaaagggaaacacatcattctatcaaaaagacacaagcactcacacattcattgcagcattattcacaatagcaaaggcatggaatcaacctaagtgcccatcagtgatcgactggataaagaaaatgtggtacatatataccatggaatattgcatagccataaaaaagaatgcaagtatgttctttgcagcaacatggatggagctgaaggccgctattgttagcaractaatgcaggatcagaaagccaaatacctcatgttctcgcttagaagtgcgagctagaccttgagcacacacggatgtaaacatgggaccagtagacactggagactactagaggggaggggggaaatgagtcatgggtcgaaaagttacctattgggtactatgttcactacctgagtatartatgcccatgtaacaaacctgtgtatgtacccctgtatctaaaataaaacctaaaaataaataaattaaaggctttgtttgcaacataaacaatgcacatcatcacctgcacctaatttccttgtacttttccttctgcatataatttttataaagtgtggattgtaagttcttaaggaatttgtaaatatttagagtggccagttcctttgattgggttttgtcgtatttgaccgcatcctgtcttgttctgattaatgtcctctttggacatggccccagcattcatcatgcatcccccaaaacagagacctttgccgactgccctggggacatgaaaaatgaaagggtccatgcagttctataggcgtttacattctgttaaccttggcaactcggtgcactggtggagagttttataagcagttcttctagtctgatctcctcttggacgctgacggtactgaccagcttttgggggctttggggaaacaggcactgcccgactgggctctgtgcagtcctcagagttggatatagagtggcgtcgttggagtaattaaaaacccactttagatttgcaggtaaaagaaagtaacaggtccccagatatttttgtacttcacacccaattgatgtatttggaaatcgcaggatttatttgcaggtattatttcctcagggacagactgcaaatacattcatttatccactgctgtttatccagactgtgagttatgaggtgacctccatctccgcaagataaattctggtatccagagtccagccaacctcctctattgctgtgtagctgaagtggatattgaaatttgttatcttaggaggcgggaaagccccatctctctcacataaggttgctgtaagcaggttataaaactgccagacccctattaggaatggggtgttgctcacctttattgagtaggagacaggttctaatcgtctgtggggcaggtttggattcttacctgcaggcatctctaagatcatgggatcttgagtacccctacccttactcgtgccggtgagctgtgtgccagcttacttctagtaactggtaagctgtgtgctcttagacacgggaggtggtggcagaccttgggtacaaggtgctgactgaagccctgagatgtgactccagtagcaagagacctggtgttttctgaagacaycctgctgtgttaggatgacagattgcctcccttactctgctgtgcttcagttaatagcaccaaggacgagcaaagcagwgtcatgtgaacttttgcttagtgtaaatttaagcatggccaggaagccttgttgcctctcccttggaaaagcaatttagcctgcagaaaataattaaatccgtggtatctggcaataattagaaattcgaaacagggaaggttaattgtctccataagattttggttgcccaataaaatgctccaggagcgcatccggacagtggctgaggtcatttacaataccgtggctttcaatattttcatctttctccctgcaggatcacgcagatttgcgaagccatttcttcacagttgggatgaagcttgagacagtgaatatgtgcgagcccttttacatctctcctgcgtcggtgactaaggtgggttttcctccctcgctcttcgacccagcccctagagtggatcaaattaagcctttcaactcaaagacgaccagatgacatatgttcgtgcaaggctatcagcaatgccaggcgaagctaaggaagattgccgcccttccagtccagcgctgctttaagctgtttttattactggtggcacagagtgactctaatcagatgccccctcttatcatggatagggtgaattttccttgtcttctgatagttgtccactgacgagttgcaggttgtaatcattacaagagtaatttgttcttcctgcatgggtagtagtaaatatgatctgtttatacttggaaaatacatgaaaatggtgcaaagcaaattctcatctcccttttctcagcatttctgtgttttttctcatctgcccttgttgactaaagaaaaactcatgcttctaagatctayagattcacaataaaattaccttttaacataaagacatttttataatgatctgttagtccttgaagattgtaatatcccagcaggtcatggtggctcatatctataatcccagcactttgggaggccaaggtggaaggatcccttgagcccaggagttcaaaaccagcctgggtaacatagggagaccctgtctctacaaacaataaaaaaattttaaaaaccagtataatatccattccccattaaagaagttttaatgacataacctctggtaaaatcaaaattgcttgtttctaccttaagtattctcttacaaatggtgcgggaaacttaacattcttggccgatgtgtgttttggtgaatggtcttttgtgtacttcactaggagaatttaattaaagatttaaatctgttttaatttctttttcttaaagatacgggattttctttaaggaaaatcacttttcatgcagtgattagtgtttgttacttgagtcatgagtttttaaaaatttatgatttggtaacacttgaggaatttagtagtgtgataatgtattacagaatatggaaattggttataaaaatgaaatgctttctaaatgttttttctttagtgaacataaattatttttataaccattaaagtagcttatttcaaggataactttcggagctgggcacagtgactcatgcctgtaatcctggcactttgggaggctgaggtgggatgatcacctgaggtcaggagtttgagaccagcctggccaacagggtgaaaccccgtctctactaaaaatacaaaaattagccaggtatggtggtgcatgcttgtaatcccagcttcttgggaggctgaggcaggagaatcgcttgaacctgggaagcagaggttgtagtgagctgagatcttgccactgcactccagcctgggcaacaaagtgagactccatctcaaaacaaacaaacaacaacaaaaacaaaaagaaactttaaatatttaaggttatttaaagaaaaatatattggcttttgctttataatctggaggttgaaagtcatgtattcctgattagcatccgttaaaaaccttttatttgaaatggcctttggagttctttactgtgtatcctgtcagttgtcggatatttttccaaaatggaccagtggtgccctgttgaatcccagccagaattcccctttgttctgttagtgggtgctgcagtcatgccggctgcccatctgtctgcagatgtatcacgctacagagtcgcttcacctggtatttatcaattaaactcaacagacttgatgtgcatagcctgtcagcggtagcgtctctcaccattcttttttttttttttttttttttgagatggagtcttgctccgtcacccaggctagagtgcagtgacatgatctcggctcactacaacctctgcctcccgagttcaagctattctcctgcctcagcctcccgagtagctgggattataggcgcctgccaccacgcctggctaaattttgtgtttttagtggagatggggtttcaccgtcttgaccaggctggtctcgaactcctgaccttgtgatctgcccgcctcagcctcccaaagtgctgggattataggcgtgagccactgcacccggcctctctcacattcttatgcctttaaataattcttatgcctttaaatagttgtaatatgtcatgttagaatgtgtctactaatcaaaattaatttcagcccaaatctctttttctagctgaatagacttccagtgatagttggtttttcacagtaaataattttctctaaatagatcttattgaggggagggagaaagtatttttactgatttctaaactgtgttttcctttttattttgctttttcttaccctttgtagcaaagataaaataagtcatgccgtttcgtatayacccctcctcttattgaccatgttttgtataacacatggattggggtatgtgcatctgtcttttagaacctaggtaggcacctctccaggttcaagactcatcttcatgtaatgaggtatcagaatactcttagcgtagaagatatttataataattaaatgtatttctttaaatatgaggaaagtactttggaatattatgtttgaaaatataacacactgtgctgtcattactcatcacaatgaaaatttcattttttttccaccttgggccttttcttcgtggcataactgttgaagaaatatgtaaacgatgttacaacaaacagacaaggatgcagacagacgtgtagtggatccagtattaaatgatgaacctccagcagtccagccagggtgtgtttttggtgttgagatactggcagatggtgatgatgtcatctttgtaagcgaagtgtgttgtattgattagaggaaaggatactggcattagaagccttgggttctgtttctgtttctgccatctcttagctgtgcagtcttgggcaagtcagttaactgctctgggcrttagttctgagtcctgtgggttatggactggatagagcacaaaacagtgcttcagaccatttaggaacatgagccctgatggatttgatgaaacttactaagcttttcctttggagtgttcccacgtgaacatgcattttaacggttgtggaaattccttctttacagggtaccgcagctccaccaaaatcacatgctctttatatacgtatgtgtgtgtatgtgtatatatgcaagayagactaaataacagtaatttaacagatatttattgagcattcataggctcaattctggacaatgttcccattgtggagcttttattttaatggagggagacagactataaacagaatcaataagtaartaaatctagtatgttacatattaaatgctaaggagaaaaatacaccaaggcagggatgttggggtcctgggactgtgccccccggtagcagtgaggaccccaggaggccttggtgttagtttccctgttggtaggcacttggctttgcaccctgagccagatcgccrtgcatcagttttcaggactgtccagtggagtccaggtgcccagcagagtgaaaatgatagaagtcaaaggattttcataatcctttcaggtggtgggaggatgagattctcaacagggctctcggacatgacctcactgggaaggccccatctgatcctttgttgcttgaagttgactttcacaggcaaaccttcagtaaactatttaccaaaattagcacaggcaagaacagaagtgaatttcctttcctgcttcactttgaactaaattgcttccagaaaaaaaatgaaggggccaggaatcatagctttgtaaaactctcaaggtttcctaagaaagactgggttatgtctgttgaattgggaaagggatctttttttctggcctgttktagatactaagttacttaaatccatcttgcttttcagtgatggtccatctgatttttaccctctgctttgtttatcggcatgtcttgttcttatttcttcattgatgtttcttcttatattcagtggacatttatccygttcctatgtacaaagcactttctatgcatttggaaatacttgtgttaacaaaaagacatcactctcctctaataacttatgctctatggcattggaagactgatgtgtaatcggtctaggaaggaatgagagttttcaatacagaagttgaagtctgaaattttaggagcgcagagtgagggcggtttattccagccagatcagaagcattgaaatatgagatgtaccttgaaaacgcactgtgttttgatagcttaaacatggcattgggggttgttgtagtccatgaggcttagtgtgaacgatttcctctcgggctggagggtggggtgttctgagggaaaaggtgcaggaggaggctagaaagctccaagccagatcttggagattcttgagtgatctggtgtaaagagtttggtgctggctgtggacactgagaaacggtttcacttttcagttcctgtcttsgctgtcatctaagctggggtttgtctgtctgacttcctccattcatttttcttcaagctatagccattggttgacttctctaagtctttgattttgttcattctcactcttccagataacctagttatttatcttttcattaataggaccacagcagtcaattctaactttttatcagctgaattaatttagtaatggacattgaaaatgccagtttgtattcaaatcattttgatgaactatattaattgcctttggaagctctgccactattttatactagcattatatgtaactctaaagaattaacctttggctcccccattttttttcttttaggtttttaacaatcacttttttcaagtgactattgaygacctaagacctgaaccaagtaaactgtcaatgctgtgccatgcagattctttggggattttgccagtacagtggtgccttaaaaatggagtcagcctcactcctcccaaaggtttgtattctgtgaaggtatgcagggtctggagattcaggagggtgtcttactgtcattgaagtaacacctgcattaatctggggagkctggttgtgtaaagggtttagatgtagtagaaatagggcgttcttcatcagcttgacataggtgtcagttacagctccatcccctggcgaggcgagtggccttgggcttctcacttctgtccacaggagtttccccatccgttaccgcattattggcagatgtgctgctattgtgtagacttagagggtgcagcattgctaagtgattgagctcaaagacttgaaagtgtctgagaagtggctttacaaatgtaacacaatgttggtgaagcatttctttagagtgtttatttccagygagctaagctttctccagagtcaatttgctttcagatatccgacaattagatgctataatactttaaaataattacactgggagccaggatgcattaaaataattttaaattgggattcaagaaccacattgttagtgartgccagtcttagagtttaccagtgtggtttgttgtcctctataggtcrggtttattcaggaagaaagcagtaagatgagaggtgagactaagagaagaataataaaggtatagtaagaagaagaaaattggaaaaagatgagaaaagtaaacttattggggaggattttaacagacaaacttaaataataaggggttttgtactaacctttccagatctctagggattggattgcttgggacattaaccctattgggagaatcatgcagttcccacaggttgagtcccatcttgcctggtggcctcgccagtctgtttacatcatttaatggtgcctgcctgcttacctttactatgactgtactctgctgggcttttatcttcatttttccccatatttgtccttacggaggagatgcttttgaatatttccatttcagctttcaactctttgggttaaagttgtgcagtcatggagttccgcctaatggtatatggtaaacttacacagaacacagtttaccagtcactgtttttaatgcctaattcattcactcctcaaagtgaactatgaagaatctaagtcacagagagtttatataacttgcrcagggtcatttggatcgtaggtctccaggcagagcttgggtcctgggactgtgtcccctggtagcggtgaggactccaggaggccttggtgtttgtttctctgttggtacayactggctttgcaccctgagccacatcactgcttcagttttcaagactgtccagtggagacacctgtgggagtccccaggtgccagcagagttaaaatgagtcgaaggattctcatccctttaatatggccttgggggagtcatattatcaacgacctattggtagtaggtgggaagtccttcgctgctgtggaattagccataggtcctgtagagtttgaacaccctgtgggccatcttcctttgcttcctttggacttttctcatggaagtatgtgtggggaatgggtcctgtgtcattgaaggaaaactttttctagatatgtaaatgctacttggttagactttgcttattcctcaatagtattagaatctattatatttaagaattttgaaaaaatggttggctgtttcctcattgagtgaaaaaaaggaaaagtatttatatcagcattttggctgcttgatcactccattatggcagaggtttcatagttgtcaatgttktcagaattttaagatacattttctatgaattacataaaaagatcattgacatagcttagaagttcaccaggaaaatggatgtgcctatttggatacttgagttttatgatattaagaaaattgttttacattaatgcaactgaactgttaaacattcaatgaaaggactgtacaaagatataaaattaaatatttttatattttaagctttttatacataatatttagttatgatcatttcttctcttttatccaaatatttgtgatatttggtaaggtaaaattctcttcatgcattcttccaaaccattcctttctcttgttgaaagtgaaattttctttttcagaaactcaaaagaatatttcttcatggatattatatgcaaatacatactacacatcaagtagaatattgagtaatggtggctagtaccttccaataagaaactataactctttttaaaccattaaagcattcaagaagtggtaaatatcattagttcagtgtactagtctgttctcatgctgctcataaagacatacctgagactgggtaatttatataggagaaggggtttaatggacttacagttccacacggctgggttaacctcctaatcatggtggaaggcaatgaggagcaggtcacgtcttacatggatggcagcatgcaaagagagggcttgtgcagggaaactcctgtttttaaaaccatcagatctcgtgagacttattcactgttaggagaacagccaggaaagacctgcccccgtgattcaatcacctcccaccaggttcctcccgtgacatgtgggaattgtgggagttacaattcaagatgagatttgggtgaggacacagccaaaccatatcattcaagaatgtggtaaatatcattagttcaggaatgttttcttgaaatagtagaatttttactcgtaaaccagtaagaaaaagaccagcaacttacaggagtgtggacaaagaataacctcagaagagcacacaatacaagaagctcagtgactcttgggcaaacttatcataataagagaaacacagatgaagagaaatcctattgaagtggtgtctgcttatcagatgagacagaaatcccaaggagaaggaacaggagaacctcagcttggtgagacggtggaggaataaagattcttagacattgccgttgagagtgcaggaaggtgcaagctgtgtggaaggcagtttggtggattttgctaaacttttattttcccactgactcagtaattccacttctggaaatttccccttaagttataatgtagagatcatctgcataaaagtttgttttttttgcagcattatttacaatagcaaaagagtggaaaaattcaagtacttatcagtaggatattggttaaatagactttggagatccttctaatgagatctgtgccattgttgaaaagaatgagggacgtctctatgaactgatgtggaaggctgtccargatacactgtgagtggtacagtaggtatcgtatgacacttcctatgttagagaagaggcaaaacagtacctatgagtgtttgcttatatttttgtagttacataagaaaataatgagaataattattagtgtttttggggtatgagggacagaggtggggaatgtggcataagggatgaaggtagacatgacgtgtaacaataccatttttatctttttttcttttctrtctaaataaatgtgttacctattaaaaggtaacacatattattaaaaatggagggtttttataactgaaagggatcctaaagatgatttcatcaaccttacttattttatatctagagaaattgaggctcagttgtgttaaatgactttgcaaatcctggtgcaggggtgcaggggtgcaggggtgtcgggttaaaaaccccagacttaagataccaaatctaacgctttttctacacaaccgtatccacacttcactgctgttctgtcttgctgatgttttgtaatgttcctccttcttagtaattctagagagtttggggggcctaaagcaacctaattcatgtcagtggaccatggctttacacaattcagatggtcaatrtatcaaagcagtcagagaattacaattttagggaataattttacaagggtctgtggttaaaagacagtcatggcttcattcattgactcccttactctcttgtgagagtgcagtatatttatttttgtaattaaactgaatgagcatttagaggaggaggtggtggtggtgattgtggtagtggtgttttacrgtttccttttgaggtggttggtttcacatcttgcatctcaacaccaggattaagagtcatattgtagagatgtttcaaagaccattcttcactttatgaaggtatgcaagtagaagcttttttaaaagtaaaaggttattgtgtctaaattaaattcttaggttgacacgtagaatatgtgggatttattgtacatattgccaagtgatttcagatgtttccacatgtgtatgtttcccatgaatgtattgggttgtctaaatttctgttaagaacatggatgctgcctacaattacaatgtgttgcttgacttcaaaaagaggttgggaagcagctgttgaaatgaaagacttccggtggtgtaggagaaatatatgcaaataacacagatattttattgcgttgttttgactctgttcctacttaaaaaaaaaatttgtcctcacaccttagagacaagtgagctagagtggatacgagtttttcagtgtggctttctgtgtagtaaggattttcctggtaagyaaaagttagaatgttggagattttactcaattagtttaaacccaataaacagcaagtcagtttcacaggcactatgaaaagtgatcaacaaataagtagatcacctaagcaaaaatgtgtataggttatcaaccatgactttctattttaaaattatttcattaacctttcttgtgtcacatcaaagattagttgtataattagtggaggaaaagttccacccaggaacttttgtagaaaatgttcagcctttaaatttctgctgtaaaaggtgtgagcaaaggctgaagtaattggcttacgttagcactttgatttgtctctgtttggctgaccatttaatagacacataaactgttaacacaatttaggaagtaaaggtgtattttaattattattgagacacaaagcagggaaccgtaagtcgtattctcttttcctaaagaaaaacctcagacactgactgatgagcttaatccattttgtcactcacgtttcagacataccaaagggggcagaaaataacatagacgctcatggccctaccaccttacttcaacagatgctaacattctgccttgtttgattcgtgtttttcaacaatgaaatatgaaacacgaaagcattatagatataatgaagaccaagtcatccttaagtcctctgtttctcatgccccatacctcatccatcagggagtcctgtccacattttcagagtctcaccacttctcctcacagccacctgtttcaggccgctagtgagtctcacctggttcctgcagcagccccttgtttaactcaggggtctctcaacactgcagtcagatcgatcgtgttagaacataaaccatgggtctctctgctcagactgtccagtgccttccaccccaccctgtgtccaagtcaagactgtggcaacagcctacagcacccagccgtgctgacttccactgccctgtccagcgtcatctcccgactccccactcagtctgtcccagtcactctcatctccctgacgtggcacctgctgttccctctgtgcagacacctgtcacctgactcagtcttgactcaagtgctaactgcttgaagtcgtctttctgggcttccctgttcaatctcagtagcaaaccaccactcccaacatttgcatctccttccctgcagtatatcacagaccttatcatataatacacaaataagtcatatatacgtcccttgtttgtcttgtttttcattcatctcccccactaaaatgaaagatccacagcagcaggggtgtttgtcaatcacccactagtcatcctcagtagctggaatagtgggtggcacttggtaggtatttgttgaggttgaatgaattgaagctctgtccccattctctcccacccctagcccttcacccctcatcctccgcaaggtgagcaccctcctaaagattacatgcttttatgacatgactgcataggcttctttgtttatgccttaccagtatcattgtttttattaccgtcaaattaaaatagaccttatttgactatatacatatataatgcgctatgcatatctttatgtaactttttatttattaacatttttcagatttttttccatgttggggcatgtagattgtttattcattttgcttgctttacgaatatactgtaatatttgaaaattccattttctattggtgaacattgaagggatttccaggtttccctattgcaagtgatccccaaatgtacatccaatgtccccaagtgtaagaggtgctttcaggggatattcctaaatgtggaattgctggaattctgtagatagtaccaaatactctccacgttgtgtcagtttacatttctaacatggtgtttgagcattcccattttgtgtcaccctccctgttttgcggtattcccaggattaagcatggcccctctgaggggagtgaagtggatctcctcgtttcagtgaggtggtcctgatcactaggatggttgagcactgcatcctacccttactggccatctgtggttttcttcttcggcccattttcttttgatcgtagaagtagtttatatattctaacatgaattctttctcagcaatgtgcttcacacatatgataacctagtctggcttgtttctttgctttttaatggttttttttaaaggcatattgaagtagtaaattgtaatgtagtcaaacagccatctttccctgtatgcattgtttatatacctttagaattccttcctactgatgtgttttctttaaaacttgcagttttacttttccatgtttagctctgtaacctacttgacattgatttttgtattggcatgaggaaggaaaactatcttatttttcttgcttgaattgaattgaagtttttcatttccccacttgtctctgcatcgtttgttgaatggtctgctgtttcctctttgatttataatgccaccactgtcatggatccatccctttgtgggtgtgactcttaaccctgttcttttttattctgcctcttcagtctgtttgtatagccctgaacaaattgttattactttataataatatagtcttgatatctattgttgagtcactttttctttatttttgttcaaaatttttggttatttttggcaggccattcttgtacattaattttagcattggtttgtaaggttctataaagagtcccattggatttcggcattgtgttgaatttatagacttagaaaaattgatattttcttatattatctttttatagcttgcaatcttttcttggaatatttcctaggtaccttatccttctgcttgctgtggtgaatgggatttcttttcatttcttattggctgtcagctggtataagagagtaccactaattttgtatatttatgtcatatctagctacctttctaaactgtctcaaaaacagtttgtgtaagatatgacttttgtgatacttgacagtttgggaaaactgtcttataaacctatctggagctgttgatgttgttggtgttttattgagtgtgaatttatttcctttmgtggatataagtttagtcagggtaaccatttgtgagatagttttggtaatgtacatgtattttacagtattgtctgtttcagctgtattttcagatttattgccacatcagttggtcaggtcaagtttatttattgaagtattcagatattctatatcctcactgtatttttatctgttctgtaaatttccaaatggtactttaaaatatcattttgagattgaggatttgttagcttctctttgtttttgtgatggatatgtttgtgcagggtgtgtatgtggggtgtgtgtgtgtatctaatatgtgatgtgtatgtgtggtacgtctgtgtggtatgtgtctgtatgtgtgtgctgtgtggttgcgtgtgtgtgtgtgtggtatgtagtgtgtggtgtgagtgtgtgtgtttgaagttgtgttaaggtgttcagattcaggatcattagactggcggaascactcttttttcctgataaggcattttgcattaaagttyatttctctgccctccctcaagttggttagtttccttatgtggtttgtgattgttgattatgaacyaatttcaktggtggttgttatttatgtggcagttccatgtgccctggattgaagtcatctctatttatttgttactgtctctatccatccactaggaaataaacttcatagggtcaagggtatttttttaatctcttttgttcactgctgcatccccagcaccaaaaacaatgtctggtccatgagggtgtccctgattattcaaggaatgagtggctgaatttgatattaatttctcagtctgtgtcccacggaattggaaagctggaccccacatccgtgtgtgccactggcctggggaagtgcatgatctccttttttcttcttcagaaccccaggtaggtagcccatctctgctgcctctctgatccagtcagcttagtttgtctggttctattttcatagactgggctgctgcctggggccagctgtagatagtagcctcgggtcctcctgctcatctcccttgaaccaggctgtygtctgccctctgtgagctgctcactgctcagctctggctttcagggctctttcaggttttggttttttattttttactttttttttggtgtctggagattttcttctcttttgacttgggctatgtaatttttcaaaattatatttcatctgatatctgtagggagactgtcagatcgtcccgcccggctactggacttggaagcaagtctcatttctagctttctgattcattcttgagcaaaacggtcacttttgattgaaaagagttggtatagtaaaactctctaggtcatttttaatatctgaaaatacttctgattgttgaaaactaagaagaaccttttatgttatccttaaattcacttcattcttcaggatctgtaagatatttttgccattgacagctgatatttatatgatgttagaccccatcctgggcacatacctgtgtcccgtaacattgtgtttataattcagaataacatgtagaacattccctcagcagagaagtatattaagtgtcataccatgaccaagatgaaatacttctcaacataatgttttaaaagataaggaaggcggtagggctagtgcttatattattgtcttctttgtttctcttccttattttctgtttgtttgtttgtttttttcctgcactgttccatgaacgtaaaaacacagagtaattcaattgggaatgaatgaaagtgtcacttttaaagaccagtatcaaggaaggcttgaaactgaacatcacccaagactgtggaggtagctagaagatttcaagagggaggttgtagttttttagcaaacagcatcgacaagaacaaatgctttagtcagtcgctgatgtttgctgtcctgcctgtaagcctgcaatgtacacaaactcctttgtgaaacaggtggaggcaatgttgagaaagttgttttctggaatagacagactggctcctgggacaggttctgccagctgaggtctgtgcaatcttgcctccctgccagggccatgggacattcatcccctgaagggttgccacagagcccctggctttagtgggtgttcaaggaatgttggttgcctcaaaaacaacaaaaacttgggcttgaaaggagaaagatcagctgtcaattggaagagtaaggcattgcaaaaatgccccgaagtgctgctctgtgagttgtgaaactttctcrgaaaggactgagaacctgttcttagaacttaggttctgttgcatcaacatttatgcacatatctgggtcctggtatttgctgactttgaagatgattgtatcacttttcctttccaagggaggtggaactgaaaactaaataagcttgctatttacacatgctcttctaacatttaatagagtaaacattctctggggtgaggaagatctctctatggagctgtttgctctgcagtagtgagatcttcagagccttcttccctcactctctgagtgtccctccatccttgcttttacctcactgtgttatcggtgtcaggctgtgtgtctgttactcccagtagtcgctggagcctgaggattttgacacgttaccaaattgacatctacagtggttttttaaagttccactcccaccacaaacacataaaaacgcctgcttcctaacagcctttagaatggtggattcttagtgttgtttttcattctgccagccaggtagatagcaaacatggtattcctttgctatttttattttttattaagattgtatatgtatttttcgtagccacccaggatagaagaggagtttttattcctgcatgtctcttttgttagagagagaatttttttytgtaaacccttctcctacccatcttaagcctcctgaaaagggcatatggctaccatgagcatctcaagatggtcctgattcacttcctccaggaactggataaagtcaggattctactggcaaagctggaggaaggctgaggggaggcagtcatggtgtatttcatgtgctgagtggactctggattgatcgaccaatgccttaattaccatttaaaatagggcaaagattctgtgttttcaaataattttttattaatgaaataattttgtgatcattattaaaaacttggaaaaatacaaagaggtcaaagaagaaagtagccaagagtcccaccacccaacaattattgtaatatttattattaaggtttttgtacattttctctggtcttcatctttgcatattttatatgaatctaataattctgtatatgtttatagcagtcttttcatctaaagccatagcagttattttttatgaattttttaaaactacgtgccgtttcatgcctgtgtggcattctacagacttggagaagtctcatctcattttctattactgcacagaaggttatttcattttttttcctccagtgttaccagtcataatgccgtaagtgtcttcatgtataacacctttttcagtttttagggtcatttttatgggataagttcccagaagtgaaatggttgcgtcaaagggtaggagtttttttttaatgccaaatagtttttccaaagaattgtccatttacactgccaataatgatgtgtgcaaatagagctgttttatgtcaattagtttgtatccgagggaaatgggtcatcaacctcttcccttttggacctgtaagggttgaaacttcattcagaataaacactaataaaagcttaaataagtctaatggttgtggttcaacagtctctcagggaagcttgctgcaaagtttaattgcctaasgggttttatttcctttcattttcttctcccctctgctgttttcctccctccctccaggtttaaaatgtgttttcctggccacagttaagccttagtacgtcttgttctgtctttgttgattaatgagtataattgaccctgtcatctctattataccatccacagcaatttgtttttatgtcgcagttattttctgagctgtcacaaaactgccttacaaagacagctcattatcagcccaaaggaaaagaatttgaaatgatgaagtgagtaaaggtcccgaagaggaggaggaggaggggacagaggagtctaagctgttggaatgtcagggaaatgagcahgttctagggacggaataattaactgttgcttacaacatagccagcaagacttgattttatctagaaattatcagaytagaaatggctctccatagacagagtgtggaggactgggtgaatagatagaaggcctgaatgtacgtccaagaaaacaygaggcatgacattttagagartgggttgaagctcattagaagttagttatagaaagcccagcttaatgtctttgtgtagggaatagcggtgacttccaggtgggaaagttttatctgaacatgtatggaccataaagattacccacatgccaggctgtgtcagaaaatgctttgctatttttctatatagttttctctcatttccctcctccccaccccagggatctcatctagttttcttcactcttgaaattaactcaggaaatagcagaggtccaggaagagatagtggaacagaaggagatcttgactttaacaaagtccgtcttccaaaaccccagacagatgggatcrttgtgttacagagatgtgtcttcacagatggagtcgtgagtcttcttagaggaatgccttgttaggtaactgctcgtcatccagccacgttacacttttcttttaggagcagagaagggaattaaccacagagagttgggggaaaaaaatccttagtagcaacagtaaaataattagtgatggtggttctgaatcatagaatgtgacagcagagggatctaaaagcttttctctttatttactttattttatttatttttatttcgtgttttgagagacagagtcttgctctgttgcccaggctggagtgcagtggtgtgatgttggctcacagcaatctccgcctccgggttcaagcaattctcctgcctcagcctcctgagtagctgggattacaggcatgcaccaccactcccgcctaatttttgtatttgtagtagagacaaggttttacratgttggtcaggctgttctcaaactcctgacctcatgatctgcctctgcctcagcctcccaaagtgctgggattatgggtgtgagccaccgcacccagacgcttttctttttattttgtgaatttgtagatgaggaaagtggggcacagaagatttaatctactttttcctggctccctcccattactgggagagctgggtcttaaacccagataccctcttctccagttccaggccctttgtcctgttaagaaacttctccgtttgacgtgtcttgaggctaattcttctacagtaatatgaggctttgatccagacagctccagagaaactacgctcaaagtggagggttttcttaattgtagagaaactcacattacattaccttgtttgtgagatgtgttctgttgtattcagaaaggttcagaagaaagtcggctctggtcctgtctagaaatctttgatgcaggagccatttagctggaggggagctttagagagaagggcaggagaaagggcaggtggaagaactcgaagaacctctttgaaagtggctggaaagaattttcagtctttatagaatgaaacagctgtcttaagaaagaaggggacctgccactgatggtcagcaggatatgggaaggtcacgggtcagtctctgggacccaagaagcacagctgcttttttgcttaactgtcaccctcccatcttaaatatatatatatatatagggctgggcggggtggctcatgtctgtaatcccagcactttgggatgctgaggtgggtggatcataaggtcaggagttcgagaccagcccggccaatatggtgcaacctcgtctctatgaaaaataaaaattagccaggcatggtggcgggcgcctgtagtcccagctactcaggaggctgaggcaggagaattgcttgaacccaggaggcacaggttgcagtgagccgagatcatgccactgcacttcagcctgggtaacagagtgagactccatcacaaaaaaaaaaacaacaacaacaaaaaataggatatattgagattgcttawtgaaaataattcgtattctttgcttgggaatacaagtggaggcaaccagtatcttcagtgtcttgagtttctttctttctttttttttttttttgagatggagtcttgctctgtcacccaggctggagtgcagtggggagatctcggctcactgcaacctccacctcactgcaacctctgcctcacgggtttgagcaattatctgccacagcctcccgagtagctgggattacaagcacccaccaccacacctggctaatttttgtgtttttagtagagaaggggtttcaccatcttggccaggctggtcttgaactgctgatcttgtgatccacccgcctcggcctcccaaagtgctgggattacaggcgtgagccaccgcgcccggcctatgttgagtttctttaataaagaatttccatagtccctctgcatctgatttagtaactaaaagtccttatgataagtgagtttgcactcatagaatctgtgacaatatggggaaaagaaactgggggatttggataaaaaaacataagaaatctcttagagatttayttcatgtagatttccaccaacagagagcactgtcaatgaagatactaggggcatttacacacttcagtgaatcacagttggactgtgtttttcctttgcttgtttacaggaaggttttgacacctcactcctttttccttgcctgtccattggtttgattttgtgccgatgagactcccattaagaggcattttcctccctgggttatgcctttcttaggtataattcagtcctcttttctctcacctcgtctcctgtcttgccatggccatgatggacatttatatagttgcatcttccccccaaaaatgaagtgaatacaaagaaagagagagagagagggagggggagagagagagagagagagagagagagagagagagagagagagaaaggaaagaaagaaagaaagaaagaaagaaagaaagaaagaaagaaagaaagaaagaaagaaagaagccactttagtaggatctgtagttggttacattcagtgtatatgaagagttgttgttcaaatgcctctctcagtatatccaaactgcccccagagctttgcagcagagacctgcctcctgcaattctcatgttccttcagcctcagcaggtcagttccagggcaacgtttgccttccttccctcatttctctgggagcttttctctccaaaccctctactctttgttgccctcttctctaccttctgttactttttaaaaagtcgtccctggtactgttttgtttttttttttttaattttttatttcccagtaaaatctcatgttttccataaagacaccgaaaagtaagctcccacgaactcaggcttcctatgaagggagatgtcattgtctatctctgcacagtgcgtggtgagagtgtattttatgccatatcctggctcagctcttcccccttatggcaaatccccccaccggctggtgccgccatgggtaagttccacccttcctcacctggcttcagatagtgtgttatagtaacgatggtttacctgtgtttagtactttaatttttccaaaatayttcatctgagcttatgaaatctgaagtgctgttaggcatcagaggacattatcttttgggagcctaaactttcaccccttctgattttgctcatctgtctgggattttgcttaatgtgcgctgttttatctgtgttttgtcattcccaggttactctggccaggacttcgactgggcagattatcacaagcagcatggggcgcaggaagcccctcccttctgcttccgaaatgtaagaagcttctctcttacctaatttttaaaaatcatagattttgtctacygtaagttttataacttgctttttattgatgaagcacggttggagtattacagtgcactggagaactacaaaatgtctgtagtttttggaaagctctgctttcaggttgtatatttgctagggtgatgctggtctgtgctaacaaattgactaataaatgcacagtggctggaacatgctaaaaggtgatggccaggtctcacttatggaagagcccagggtcttcctgattagtaggtggttctcattatggtgagtaacctagccagcagaagggaaagaaatagaggagaaggtatcactagttctaaatactgcagcctgatagcagtgtatgttattgctgtttactttctactggtgggagctctttgcctggctgcaccatgtcacaggtgaggccagtaagtgggtcctgcctggacttgctgcccagctgtgattctgaactctggagtgaagaggacacgttttggtggacggctggccatctgttcccctgttagaggaacacttgctgtgtagcatcttatccacgaacccactgataggagagtctttgctcttgaggcctagtcttaaaatgctgtcttacctattttgatggctttaatactttctttgatgtccagttagatgctagtgacttctgtgctttgcttactttaagctactacctgcttcatatagagctaattggaacataataataggatttttgtgacacataaagtggcaatgagtgtgtgtgtgtgtgcacatgcgtgtacttacagagttattggaggtcgttttataaactacagtcatgcattgcttaatgatggggttatgttctgagaaatgcatcatcaggccgcttcattgttgtgtgaatgtcatagagcgtaccttgtacctacacaggcctagatggtatagcctatactacatacagctctgagattcatccatggcctggatggtatagcttataccacatagcctaggttatgtggtataaccatataatcatatgggaccaccattgtatacgcatttcatcattgactgaaacgtcactatgcagtacatgactgtagtttacaaaattatcaataattcttcaatcctaggaactgtgagtagagatatcaattatctctgttttaagaattaggcttaaatgtatagtctactgtgttcaacatgcttttagttaggaaagttaatttatgttaagacaaaaagattatagcctcctcttacttgagatctgtaacaacagtgcaaagcactcgctggtcagagacttgtttgctgagcatgtcttcctggagcttgcggkttcgttgctgccacactgtcattgcactctagacataacaatatgaaaaacgaagygagaaaggggtggctgcataggcagaagttcaaaagtgagtgcaagtcaaaatcggagtttggaggattcagtaggttgatgactgggtcagctggtacttgtaaatacagaagcacatcagcagcaaggttggaaatcaaggatccttctatgattgaacgaccttgagaagyagctcaaatctcagtcgagttctctccttatctaggctgcttggagcctgcctggcacctgcatgatccggggagcagtcaaaaatctaggcagaatttacacatagaatttgtggttcccagtccgggctctccgcaggattgccaccgaatgatgtcgcctttgcacaagagcggtttctctgtatcttgaagaaccgagtggtgtgtgtttaggtgacagggccagctgcatagccatgcccccatgaggactgcagctggttaactctgaaagctttgatgtcctgtgctgtcttgacttctcaccgtattgatgtcacagtcacagaatctgctggcttgtctgctttcattgagggccgtggaaacatcttatagcaccctaaaacccttttgagattgtgttttgtacctgacaaggtacaaagagaaatattccttccccgaatcattaacttttggaagaaaatccttctctctctctttcattctatatttaaagagtgatttcttctatggcagtatagtccttgccccactaaagcttctttttatcagtcctctgttcccattcgcagccaggaattgtccacatggctttgaatggtagagtaaatcaccacattcccaggtggcttctgagctttcaggatttgtccaccaagatgctctctgtttggatgaatctgcgggcatgttcaggaggaatgtctttgtttctggcactccrtttatgtaatagataggattgttgacgtatgcatcgcattggtgatgctttgctgaatttgttagcttgctataagtgctctttaacggaatgcgtattacgagttcattttttaatcacacatctcctgtgtattagaggagagctagtgtggaattggatgcatggaagacatttccccagggatgtttaacagaggctgttatgaaaggaatcgacacagtaaaatgcttggtaaataaactcacaggtaacagttttgctattgatcctttataaattaccctcaagcggtggattgaaatgaaaataggttatgtggttgtagctttcccttgttaagaaggataaatgcattttaacttacttagaggtttttcaagcggccgatgggattgtattttcagaaggaagctcaatacataatagctgtgcgtgaggctgggtaacttgcagaaacaaatagcccacctagaagatctttgcttcctatttccaaagaaatgtaaaggcatggagccagttgatttcttaacatgcattggatcacttttttcaggttacataaagatatagttatatttttcaaattaagttttagaaaaagacatgtaaatgtgaattaccttgatttctttccacaagtcagaaaaagaagtagtctctgttacttacaggaacctgtttatcttggtatccataagtatataaatctatagtattataacatgtctgatgataatttatagtagttggcaatttgggaaaattttatatttattttaaaataatgttttcagtattggctgagtaagctcatactgaattgacccttctgcctgtagagcagctctaaagtctggacacaggaccaaaaacgactatttgaaggtagtggaacgtgagcaaaaggaggcaggagaacaggagactggacgaagggaatagcatgggagaattgtcccatttttttcagacttttagcttgagggcagccacagttgacgacatgtgggagagtgatataaaattcatggtctctctggcctgatgaaccatattacaaaatttgggcaaccacagatcctggaaagtgaggggagactcagacagtggagagccaggatcgggaaccccagattccatgtgtaaattctgtctatgtttttatggtgattcctgaatcatgtaggtgccaggaagactccaagcagcctaggagaggtgaactcaattgagatttgagctgcttctcaagaggcagagtctgtagtttcagtccaaccaaggtgatagcttgataaaatagaaaagttgacacttttggtaggaatataacgtaatccagagtcgccacaacataacatttaaaatatccattctttaattcccacattgctcaagacaaatgggaaaatcagcctcattcccaatagaaaagaagaaatgggaaaatcgcctcattatcaatagaaaagataatcaacatagactaaaccaagcatagactaaacccatcatgacccaggtgttggaatgagcagacaagtattttcaagcccctattgtaactaagtgtgatgtaaagcagtggtcctttaaagggtggtcgtgagaccagcagcctcggtatcacctgggcacttttcagaaatacacattctctggctccacctacaatcaactgaatcaaaacgttggggagaagcccagaagtttatatttttaaaagattttcaaggggattctgatcctaaagtttaagaactgtagatataaaggaaaatattctcataatgaatgaaaagataggaagtcccagagaagaagtagaaactataaaaaagagaaattctagaactcaaaaatacaatatttgaaatcaacaaatttaytggattagcttaatcggaacgagagaggaaagagtccatgaccttgaaaatagaaattattttgtctgaaaaacagaagatsggcagggaaatgaaggacaaatggaatctcrggatctgagggacaattattatgtagaattgaagacccaaaagaggtggctgaataagaattaaaaaagacatttcatcaaagaagatgtatggatcacaaaaaaacatgctcagcatcagtagtcagcagggcaaatgcaagctaacaccaccgtgagacaccactagatacctattacaatggctggattttgaaaaactggcaataccaggtgctgatgaagatgtgtagcaactaaaactctcacacactgctcatgggaatgcaaaatgctgtagcaactttggcaaacattttggcagcttcttagaaggttaaatattcatttaccatatggtctagcggtcccatctctaaaaacaggcaaacttaatggtatgggttgaattgtgcctccctcaaattcatatgttcaaatcctaacccccaatacctcagcatgtgagtgtctttggagatacggtctttaaagaagtaattaagataaaatgaggtcctatggatggaccctcatccagtgtgactggcgtccttataagaaaagagggggccaggctcagtggctcacacctgtaatcccagcacttagggaggccaagatgtcaggagttcgagatcagcctggccaacatggtgaaaccccaactctactaaaaatataaaaaaattagctgggcatggtggggcattcctatagtcccagctactcaggatgctgaggcaggagaatcgcttgaacccaggaggcagaggttgcagtgagctgagatcatgccactatactcaagcctgggtgacagaatgagaccctgtctcaaaaaaaaaaaaagaagatggggattgaaccccagcagatcttaatggcttagctagtttccccacctgtaaaaatcaggacaytcttactgctgtttgtgttaggtaattaacagccgtaaagcatgctgaaagtagaaactgctaaatacacacagaggcctgaccacatgaggacacagggagaagacaacatccacaagtcaaggagagagacctccaaagaagccacccctgctgacaccctgatctctgacttccagcctccaggaccatgacaaaataaatttttgttgcttaaacttcacagtctgtcgtattttgccacagcagcctgagcagattaatatacttacgtttacatgaaaagttgtaccagaatgtttaatgtttatggcagctttaatcacaatcactgaaaaygactcaaatgtcctttaactggtaagtggatagataagctctggtgcatctgtacaaactactcagcaagaaagcagcacaaacttccatttcatgtaatagcatggatgaatctcagtgtattatactaagtgaaagaagccagactcgaaaggctacagatattgagtccatttacatgacttacagaataaaatggggattctgatcctaaagtttaagaactatagttatacaggaaaattttctcataatgagaatataaagaaakataaaggaaattataagaacagaaaacagattggtggttgccaggaactgagtgctttggagggactaattaccaaaggtccccaatgcaagggtattttgggggtgaagggatggttctgtgtgttgattgtggttgtagctgcataatgaaattcactggtctcacagccctaccctcggagaacagtatacccaaaagactgaattttactctatgtaaaaatgtttaaagtgatcttaaaaagatagcaataaacaatagcaataaacaaaattagcaataaacaaaaagaacaaaggaaaataatagcaataaacaaaaagaacaagggaaaataaagatagtttcaaataaaaccacaagaattcatcatcaaaaagaactacactattatgaaaaaatctttttttttttttttcctcatttgagacagagtctcactctgtcgcccaggctggagtgcagtggcgagatctcagctcactgcaacctctgcctcccaggttccagtgagtctcttgcctcagcctcccgagtagccgggattacgggcatgtgccaccatgctcagctaatttttgtattttagtagagttggagtttcatcatgttagccaggctggtcttgaactcctgacctcaagtgatccacctgcctcagcctcctaaagtgctgggattacaggcatgagccaccacacccgaccttttactacgaaaaattctaaaggatatttttcccatttcctgtaaaggaaaatgatgccggatggaaattccgtgttcccacttgaactgttatcaatgggtataggaaggtggaggaaatggtgtgtacttcagtgatcccatagaaggaagggtgcagccgggcacggtggctcacacctgtaatcccagcactttgggaggctgaggcaggtggatcacaaggccaggagatcgagaccatcctggctaacatggtgaaaccctgtctctactaaaaatacaaaaaattagccaggcatgatggcaggtgcctgtagtcccagctactcaggaggctgagttaggagaatggcgtgaacccgggaggcggagctggcagtgagccgagatcacgccactgcactccagtctgggcatcagagccagactctgtctcaaaaacaaaaaaaaaaaagaaagaaggaagggtgcatatggaactggaaagagaatgaattcatactctcactcgtttaacaaatagtattaggcacctactatgtgctaggcatagttctaatttctgggaaacaaaaatgaagaccacctggttctttcttcatgaacagtgggaaggacaaacacatacgtgagcctgtcttgtcgatgtaagatgcgtgtgcgtgcatttctttcyctttcttcatctgcccagctttgtcctgctgcgtcagcactggctcagtgttggtctcgtttctcttgcagacatcattcagtcgaggtttcacaaagaacatgaaacttgaagctgtgaaccccaggaatccaggagaactgtgtgtggcctccgttgtgagtgtgaaggggcggctaatgtggcttcacctggaaggtacgtactygctgggggtagcagtcgctggggggaatgtagagtttgtcgaaatggcaacgtgtggaggaaagcagcccttctcagaaggggccttacttctctttcatttaaacagatcttaaattattccgtgttcttaaatcagtgaaactaatcaaacataaatgtagtcagaggctctcatcttaactaataatttcatgcaatgagatgctggcaagataattatgtttggaacacagtggtctttttacatctatgattagaaaagcaaatgtcacaattaaattaatgtgagtcactaaaactgagattccaggtctcggttattatcaggacaaaattgtacatttgtattttaatgtggttatatcctttactttgatttctttcgtagttgtttaattcttcctcaaaatagtacctggaggatgactttctccccaaatgtctaataaacagaatttaggcttgtttgttcagtgatgttgaaactatcctttatagctatagcrtatttacaggtgcaagaaaattcacagaatgctgtattttgtgaacrgaatcctgatcatactttatatttaagtagaaaaccatattttctaggtggtgggttttcagtgataaatatttacaatggatttgatctccaagactttcccatctttctgtgatttataattctttggttttttttcctaggatttcataatactcagtagttatttcaagtatatatgcaaaaatgaatagatatgaatagtaaaataaagttagctctcctagttcatagtttaaatcttaygacttactcaataccatgattggaataaagagtttagaaggaaaatcrtagaattggtgctcagatctccatttttatttcctcactatgcatctataaaatgtctgcaaaggtcttaaataagcctacaatctcatacatatgtagtccaggggattgggaaatgtggaaaacagtcattgtggctgacatcattgtgttgccaattcccagaaaattgtttaaaacgttactgaagtttagggttccaaaatcaatgtgaaataaatggaaattcccaaaaagttgattgcttagtaggttttcaagtagaatggcctctttctggaattcamgaaagtgtagacacaggcaacgtggcaacatttctgtagcttacaggaatagaacatggctttrttttcacagctccacctagagttgggtgarctgctcttggagaagcaagattccttctgtattttgtaatgactaaatttaacttgctatctaacactatgctgagccatcttaacaagattggactcttgtttgcattattaatttgaaaacaaaaatggtcaagttaaaagcccatgttttatccttattacttagtgcgttatggttaaaattcttttgcagtcattatttatttagcagtttctactttcagcatgctttatgactgttaattacctaacagaaacagcagtaagagtgtcctgatttttataggtggagaaactagctaagctattaagatctgcctggggttcaattccattgctcttgacattttctctgttgcttaattccccagaccctacggcttcccacgtcttaaaaaagagtratgaacaacatttagtgtatatttaacattttgggcagtattttcttctttgtcctgttctctttgaatacagatttttgattttctagcaaagaaatagaagtcagctcatgtccgatctttttcttattccccagagtgttttcattgggtagtgatgaaaattagttagtgttaggaaacagatcagaaaatatacattgaccatttttccagacctgattcrttgttctaaaaagtgtttgtaaacagtctgttgagtcttatctgttgaatagtatattacctgtaattattgctcaaaatcatgcatctttttcattacttacaaaagatactgcatacaaataaagtaaaattccagtcagtttcctgggtcttgcttgaattttggttttggttttgattttggcccttactgagcactgacctttcagagtgacagcttaatggcacttagctctcattatttcagttttatctatctagtgtttcctttcctccatgttgggaataaaatgatagagtttcatcatggtcactttgtggctgctaaatttttttatctaatgatgattattccgattataggccatttatttgacactttaaatttataaagtactttgtaacaattttattagttattttcgtgcattaaattgatttgaagtgttttcaacactagactgaccacttttaggtaattaaaataattctttctagttaatatctgacttctcttgaagttgattcattctttacgtgtctctaaaggggctgttgttgaagagggagcaatgaataaactacatgagattaatgtaatatcattttaagtgcatatttgaaaagaattttaagctctcagaaaccactggtagttagcaagggtgactgatgatgatggggccagtgttccggaaaggaggcagtgccttctcctaggtcagtgttctgctgcaggtcatcatgtctgtaactgtgaatattgttcatataatacaagttactttcagtcttaggtctctagcattatggccgcacacactggctcccacactcacagctctgcctttccacaaaccaagtgactttctrttcatttccagtcctttttttatgggacaaatacattggtccagcagttcggtatgctctcctagctctttagcccagaagaaggttcgcctgcttgcattgtcttccttagcatctttttttggagtcttgtttctcagaatcatttttcctggacacctggctaaatatatacatgyrcgccacttacatgcacttcaaatgagacctggtagatttctagctcacgtttagcagttaatgcaagagattgacaagaacttttgggtggtttcattgagatattttattgaaaaaatttttcatttttaagaatggttttaaaatatatgtaacatcaaatttaccactttagtcattttaaattatacagttcagtggcctaaagtttatttacacagttatatacccatcaccaccatccatctccagaacatttttcgtcttgcaaaactgaaactctctccccgttaaagtctcccttccctcctcagcccctgactggcaccattctccttcccgtctctatgaagttgatgacttcaagtacctcacatgagtcaaatcatgctggatttgtctgaaaatggccttttacaagatttattatcaatcataaataatgctttatgtttatctactttcatcataatttaccatattgtctttttggtcctcatagacctggccacctattggcaagaatattaaattgtaggtggcttgttgttaatggaggactgaagagttagttgatagaggggctggtcctgattcctcggcttccttggaagtgtccccagggacacattaaaaggactagggacacagaggaggaagaacaggtttggaaggagacagatttgaatagcaacagttgcattttaagatacggatggggattccaggtgaggaggcatagggagtggygggaattttgacactgaggccctcatcagaggctacaggatatgtggggacggtgaccacaaactttgcttaaacgaggagacttttagaagcaaacggggcactagccagatggggcactggcaaggaggggacagcaagatagctcggtagtcacttgagccactgtattagtccactttcatgctgctgatgaagacatactcaagactgatgagaaaaataggtttaatggactcacagttccacatggctggataggcctcacaatcatggcggaagctgaaaatcacgtcttacatggcggcggcaggagagaatgaggccaagcaaaaagggaaaccccttctaaaaccatcagatcttgtgagacttgttcactaccatgagatcagtatgggggagctgccccccatgattcagttatctcccaccaggcccctcccacaacacatgggaatttggggagctacaattcaagatgagatttgggtggggacacagccaaaccatatcagtcaccatgatctgcggtctgcgatgggagcggggtcggctgcagtcacagcagtttggagccaggcagtgccaggtgtgaacgcaggctcctggtggccctgtggccttgagcacgttgcttaagccctggtttccccatttctaaaatggcaatcatggtrttacttatagcaggggcttggtttgcattaaagcagttagcagagtttccaggaagaattttccgagagagaatgaagaggaaattctcaggagccagagagggactctgtgatgracctggttccttgagaatgtgctcaagtcttaggcactgagctgctcctrgtggctgggatgaacagacaatcccatgggggtctataccgcctagcgagtttgtctactgtgttcgatgcacggggagccatccctagtagaccctcaagccaaacacagcagggaaggaggagggaagcaggtcaggccctgatgtctatgaagttgagtcagtgggcttaaattcatcggccagccgccctctggcacctgcagcggactctcctccctgcagggttctgtgctgcctctgcggggccctgcctccatggatgtgagccatgcaggtgaacccaggttctgattgcctagggagggattccagtgcttggttgagcagagcagtgccctggagcccccatgtacagtgttggataaaacaacccctgcctcaggagatgattgcaacattaattaatctatggagatcccctaaaacaggttcaagaccataggaaacatttggaagatgttctgtatatttttgttttgttttgagacagggtcttgctcttgtcacccagactggagtgtggtggtgtgatcacggctcactgcagcctcagactcctcaaataatccttccacctcagcctcctgagtagctggracttcaggcacgtgccaccacacctggctaatttcttttgtatttttagtagagatgcgggtcccactatgttgcccagggtggtctcaaactcctgggctcaagtgatctgcccaccttggcctcccaaaatgccgggattacaggtgtgaaccaccacgcccagcctgttttctctgtttttgtcctcatcatgattcatacacttttcctcctatttagaaggaatgtgatcagctctctcttccccagtgctgagtattttagccttttagttgaggcagaaatgcctttcatgtcacaagagttaggaagacaagcagacttccttacttctgagttatttagctctttcagttgttaccactgcagaaattgttgaagagagctttagagtgcgaataacaaaacccagttttgaactggggagccctgttataaattaaaacaggcatggaatctgcagttagtgtttttgtgytttgaatgggtgggaaaaataaataatgacaaaacacaccctacaggtatcaagctaggaatctgtgctgtgcacagctttggacagtaagtttttggagttcaggaattgcctccttgtaccacgaacttcacattccacactgacaagcacagcacttacgtgcaaggcaggtcygctacgtgtgtagtttctgatttctgcaagtgtgtttgaggagcagtatggggatcccataagtccgtagaatttcctcataggtatttaaacacaagaagcagtgatagctcaggaataaatctaatctgtcctttgcccatcttaagaaatgcgtcactctgcaattgtccggtggcatcttcccatttatctgactggttggtggaggtgggttagttctctgaactcatgctgttatgctggcctttccttctccacttgcttcatttgtacccagcatccaagacaggaacgcaacacagcaacccacaggggaagttccccaacctggcagggccactgtcctctcttcacctgctgcagtggcctgtgttcttaagagtggtggccggaagatgctggacgttttcttaacctcttgttaagaaggatcgcatatattctccatctcctgctttggttggttgtttcttgctttttactcgtgatgttttctttttagtacgtttctctaccacccttggtgacttctgtctctggatgttcccactcctttcctggttgctcctctgtctcctccatcttctgcacagtcctggggtggcagggctggctcacttcccaccgttggctcctccccagatgacttttcttggcctcttctttgccctgcttttctcagatgtagaggttagaatcccccagtcctgctcttcagccatctgtgcccagcgtggcctcgtctttctctgtggctttggacggtcacgctgtgcacrcggatctgagtgcccatgcccatggcatcacacayggatctgagtgcccgcaccatggcctcgcacacggatctgagtgcccgcgcccatggcctcgcacacggatctgagtgcccgcrcccatggcctcgcacacggatctgagtgcccrcacccatggcctcacactcacaactccctttccatcccctgcaaaacatctccacrtggcagcagcatttccagaacagaactcaccagcagaaccgtcagaacccgtctstgctcttctccgtgaacgtcctggctgacgaatgatgccgttattcacccaagtcggaagccacggcatcctcaaagttagaaactctacaataattcctgccctcccaccaccacccccacaacccatgagtcacttcagtccggacctccgcctgtcctcttctggcccccacattgcactcaggccctcctccctggctctgtgatttcagccgcctcctacctgctgtctctgccctcttcatggggctttgaggttatttctgtaaaatacaggcattgccttcctcctaatacacagtaggtmtgtgtttcttttttttcttaatttttttattttactttaagttctgggatacgtgtgcagaacgtgcaggtttgttacataggtatacatgtgccatggtggtttgctgcacccatcaacccrtcatctaggtttgaagccccgcatgtattaggtatttgtcctaatgctctccctccccttacccccaccccttgacaggccccagtgtgtgatgctcccctccctgtgtccatatgttctcattgttcagcttccacttatgagtgagaacgtacagtgtttggttttctgttcctgtgttagtttgctgaggatgatggtttccagcttcatccatgtccctgcaaaggacatgaactcattcttttttgtggctgcatagtattccatggtgtatgtgtgccacagtttctttatcccrtctatcattgatgggcatttagcttggttgcaagtctttgctatcgagtagagactaaattccataacatgacactcagcaacccatcctctgtaggcacatatgcttcctggatgtgtgaacttggcactttctgagtgtaaaatcttttttatttgtacagctgtataaaacagctagtgatagagtctcttataggatggtggcaagtggatgaacatcgatagagtgtaagagtcatgttagcacgtagtagtcattgcttagtaaatggaggttgctgatartattattaggcagcacttttcttttaagatttgccacctgcgggagcctgtgctccagctgaaaggagcacttgtgtctgcaagcctcctgatttggttcttggtgctggacactgtcccacagggctctgttcctctccgtgcacctgacaaagcaccaygtttttacaggcggtcctgtgaactttgcttgctcagcgtttgctgagtagatctgaggaagaaataaaatgtgtattcctaaatgaaatagygatttaagatacagcagtccattaagaactgctgtttggccaaccgaatttggggacagtgagatcttttatactggaagctaaaattcagaaactccttgactggtttgtctctatgactgactgacttgagttccagcaaactgccctccacatcccagtcaacggggtcctattagaatgcacatttctcccagacctagtgcctccaagtcccttagcagtgtctctgggaatctgcatttgcaaagtctccctcccctgatgtttctcatgcagcctagagtttgtaaagcactccagtaggtcaaatggggaatgcatggtgtggttcagagaaacccgtctgagcccaccttgtatgtttaggggaccagctgtggaacaatggtgtggttcagagaagcccgtctgagcccacctcatatgtttaggggaccaggtgcagaacacagccccttaagtttttccgtaactggcaaaaaaagtcaggtagytactatgcattttggagatacttgcaaaattgaaacaagggaacatgtaaacgtgaaaacaattacatttcaagccagggtgggtggttttaaaacctttacaaagaagaagtatggcctctatgaaaccttagggggagaagctgcttcagcagatgagaatacagcaacagtattttccagacagttaaagcaggtgacccacaggagctgtctcggggaagaggcgtttaatcccgccacaggtgtttgtttggaaggctgctgctctgttaggttttgggggccagcagcaggactggctctggctgtcrtaagtccattgggaatgatttgggaagactgttgaccagaggccggggaatcgcctctccagaaggctctgcagcaggaaccatagcaaagttcaggttttccagctgccattgtggtgcatgtgacttcccggtgagcacattctcactgaaggkgtcccaagcctgccttcatctgcctgcaggtctggggttgacctggcttttcctgtagcagcaggcaacagctactacatggtgggaattctgcaagaactgtatggggccctaacaggagggagacagttgctagacacataccccccacccagaaataaaaacgaggaaggaaaaagatagccgcccaccccaggtgctttctaaggctctggagctggactgcccaggtttaaatccttcagctgccacttrccggccgctggatttcttcckgtgcctcagtttactgatctctgaaatggggatgaaaacaccccgtatctyttagggttgttgtgaggattgaacgcttggaatggagtaagcactgtgtttgctactgtgtgggtctctctcctctctcccctccccacaccccccccatactcgtctaatcccatttctgtcatttccttcagcctgtttcctatgataccttgatcctggccaccagtttygcccaccgtttttggttttgtttttggttttgttttcccaggccttcggctccagagctgacccagggaggctttgcgygctgggcttcttgataggcatctgcaaagggaacacgcccagagggcaggtggggcttccagcgtccaggtcttgcttgcgggcactcacaccggctttgcmttctgctggtgttttgcctgttcatctcacactcaagcctgtcagcatttgccatgccctttaactttcagtggggacatttattaggcaaggttaacacattcccttaaatacttcttttccttcttctgattccagcctttaactgagctgaagcagttgttccgattttcttcctgaaggaggtggaacccatttgcctcctcatggtgggcttgtagcctccctcgccctgggtccctcctgcctctgctgcccagtggcatctctcaccccaagctcatgcatgctcgcgctctctcctgtgattcgctctgagtgaagtaattacataattttaggagtttgatagaaytgtgttcctaggaagacactcaggtgtcctcccaagccataagcatctccctttttcatcctggggctctgggtagcataggtcactgtctcgattacagtcacctgtgtcatcggctgggtggagccgtggtgtgkttgcagtgagagcaccaggtagacctctgtgtyctgctgaaccggggacaagggggtagcaagctgcagaactctttaaggttccaaagggattctcagaaatctgttatgaatttagattgtgagtacggaaagtctttgttctcttagaaacggaaatgttgattgctgtttagttttattttccttcatggtaattggccyctcattaacctgacctctgtggcaataccgtatttatgtataagagtcttactttcttctctgggtgtctatggttgtattgttacaatggtggtgattgtggaggccttggttgcaaaataggtaactcattcacaaaggccaaaaartcataaaggtttatcttgggtcagattctccctccactcctgtgccccggcctccagccaactggttcctttccctgtggacacccactgtgttagtattttgcatttccttccagatttattttatgcacatatgaatatatgttatttcccccttttaaacagatggtarcatactatatatgcacagtgttctgcaccctgccttttatactcggcagtgcatcttggagatstgtacatctgagtatattaagaggtgtctgattcttttttatagctgcagaatattccttcatatggatatacccagatttacttaagtgctttcccatagatggggaattaagcttcctcatggtttttgagacgaaggttctggataaaaataaacaagtagaatccatactgaccagatgcagcttagccaaagtcaagagattgaacatggtcttgtgttgtttgtcggggatttttcgcttgatcttarccaaaaggccgagaagcaatgtgtcaggatttttctataaaatgataaaggtcttcagtggaacattcagctttgcctatgaactttttgcartcctcaaataatcaaggagaagcattgtggacattcttttaatagattattttgcatgctattgggtctcctgtcttggaaaataattagtctgagtccagccagataaatgtagactcataagcttggtaaagggaaatgaagaacttggtacccattatttagaatgkgatttgtttagggtcagaaacactttcscaggtgataaataactgacttttccatcagttcttatttaatagatgccttaatgggatatatttggggtgggagaaggcataattgtaacctttttgagggaaaggtagccgacgcatctgacctcataaatacttgtttaattgaatgggaaagatgatcaaaggattctaaagtatggtaaagacggccctagcaatatactaatgtatacattgtactgaagcgtatgtattaaagccataatacgatgtgatgtttgaattagcagaacattggaagatgaaagttgtaattgaggaaggaataagccataaagttactttttttttttctttttttttttttgagatggaattttgctcttgttgcccaggctggagcgcagtggcgtgatcttggctcactgcaacctccacctcccaagttcaagtgagtctcctgcctcagcctcccaagtagctgggattacaggcaccctccaccatgcccagctaattttttgtatttttagtagagatgaggttttgccatattgggcaggctggtcttgaactcctgacctcaggtgatccgcccgcctcagcctcccaatataaagttactgttatgcttccttttgaagtactacttttaatgaccttgaaaatgttatttgtagctaaatgtaaatctggaaagataaatatatttagtagaggaatctaacctgtyagcaaaatgtttgagtagctaagaaacaaatgctctttgggtctgcggaggagaaaatgaccttgtgtaccaggaacctgcccggggacctgctttattggactctggggaatcaatcccacacccttcaggacgggcagaggcacttccacattggatgcctctggggagagtctctttacgttttgtctgttttgaacrtattctttcttgtttgattcctttagcaattaggctaaatgttggtcaagtcttacaatattagacagaaacaatgtctatttatttaaccttgttcaaaaataagccctgtgaaccttctagcattcctttaaattctatattctttaaattacaggggaattaaacatttaaaaagttaagactgacagtggtgataattgatttgagaaccaatcaaaagttcaaaatgatgaatgacaatgatagtatgtgtgtrtaagcacctgctgtccatgttcagagcacctgagatacaccaatatattggcttaactctaaattgggaccccacgtttagcaagtaacatactccatcttcaccatgtctacttgacgatgaaaagtcagagccggtggagctcgcaccagatttaggaccattttgtgtttggttgttggcatttagcttcgtgaagttatggttttggtggggagggaggatgtgattcagaatccttcagatgttatgagatgacttggatggtaatggggctcaccaggttattttcttttctctctccttcccttctttccttccttccttccttcctttctctttctttctttctctttctttctttctttttctttctttccttctttccttctttctttctttccttctttctttctttcctttctctctttctttcttccttccttccttcctttcttcctttcttgacagtgtcttgctctgtcacttaggccagagtacaatagtgcaatcactgctcactgcaacctcgacctcccagacgtgagcagtcctcccacctcagcctcccaagttgctaggacttacaggtgcctgctaccacgccaggctaattttgtattttttgtagagacaaggtgtcttcatgttggccaggctgatctcaaactcctagactcaagcaatcctcctgcctcggcctcctgagtagctgggactactggtgcatgctaccatgccaggctaattttgtattttttgtagagatgaggtcttgccatgttactgaggctgatcttgaactcctaggctcaagcaatttgctggccttggcctcccaaagtgctgggattacagtcatgagccaccacacccggccactgtgttatcttcatcttggttctcaatgaggaaaccaagcagggctggactaaggggtcagagtccatgggtcaccgtctattaatggagctctgatctcttgattcctggttcaaagtgtttttttcttaactattgatttggtgtcgaattttcttcttttaactagttccaaatttattctctccatagccagagctccttgaaacttttgctgctgttaaatccagtcttcttgtctttttcagagtttcatggctgtgaagccaggtcctcataaggcatgactgtaattacgaaataggatgtgacagtcatcaggtcccacattttagtgggatcttttagacattgctacataagtgacttttctatgacatagccaaagtctacaggccacaaactgagttcaaaacaaagtaactccaaactgataagttgtcaggtttcctagagaagggccttgtccacgtacactgctcataaaccttgtttttgagtttgactggttccgtttagctgtgatgcttgactttctttcattgaaggttgcctttacttggtgttaggtggagcatatcatgaaggcttagatgtgggccctgaggtcccaccccaagctccgatacattcccttaaccccagagctgttcttaggaaagggggatgcttgttctctctttcagccaatcctgctccgatgccaatcttttcctacggtccttcttcctcttttacttttagggcagagtatctctctttttccaaaccttcgttttctctgaaccccttttattcctgcctttttatatttcaaggagttttgtctctgataagattaaagactcctctaaagtcrtctcttccatatggctattttgtttttgtttttgttttttaatgtataaaggaatgtttttccccatgttagggatgctctattattgttgtccttctatttctttgttggtaagatctgtttgtacctcttgtttcaacttcttcccatgcagggctgcagactcctgttccagaggtcattgttgatgtggaatccatggacatcttcccagtgggctggtgtgaagccaattcttatcctttgactgcaccacacaaaacagtctgtaagtggttcccagttgagggggggtggatgacaccagtgatctktgtgaataaattggcagcttcataaagaaattataacmaagttctaaagaacaaataagatttttgattttccaccaagaacccatgttttcatgatctygcttaatctttaagtgtttgcatgagatgatgtcacaggttgacaaactttaacagtgagggacagttgaaagtcacagagaggcagaggaaaaatatctgaaatcatcactctcagttttttatacaattcattgtttkgatgtgaaaaaatatgttagatactatattattgtgttaccatttctttaaaagaactgatttttctcatgtagcttctcctaacagaatcttaattggttccaataatatactgacattcttataaacacttaaccaggctaggcacagtgcctcattcctataatctcagtactttgggaggccaaggcaggagaatgcttgagcccaggattttgagaccagcctgggcaacatagtgagatactgtatatacgtaaaaaaagaagtacatatataagtaaattagtcaagcagagtgacacgtgtctccagctactctggaggctgaggtgggaggattgcctgagcccgggaggtcaacgctgcaatgagccaagatggcaaccaagcaccagtagactccagcgtgggtgacagggtgagactctgtctcaaaaaataaataaaataaacagcctactcttagcactaactaatcactgatatttcaactgtactttataaagtatattaccacacgtccctttggttacagaaataccaaataaccaatattaacagttaacccagcagtaaacgcccattcatacatgtgtgcacacacgcacatgcacatttaaatacatgcaaaaaaaaaatttttttttttttaaagatggagtttcgctcttgttgcccaggctggagtgcaatggcgctatctcggctctctgcaacctccacctcccgggttcaagagattctcctgcctcagcctcctgagtagctgagataacaggcgtgcgccaccatgcccagctaattttatatttttggtagagatggggtttcaccatgttggtcaggcttgtctcgaacttctgacctcaagtgatccgcctgccttggcctcccaaagtgctggaattacactttggccacgcctggctaatagtgtgttttaacatatttttgtaggttattgtcacaaaatggtaccatttaaaaatcttctaacctaatcattgcgtttattattctaccctaatgcatatcagaagtgttatttaaaatgatgagtccttagagataacaggttttaactgttaaagagattccgtctctgacattttcttgatggaatttaggcaccaactttacttcttcctaacagcctgttctgtggccacttctgtagactctcacaacgttgctggaaacacagttccattgcatagctgacttcacattccctgatggcgacagagtttcagggctcctctagttagcattattaagagcaccagaggacattatgtgtgtgaaacaagcaggtagttcagattagagacagctggattctatgggattctccttttcctaaaccatcctgcccaatggatctgattcagttggagtaatcgtttccccttacttaaaaatatttctaaaacrttgagtgtacaataattattttaatcccagggacattcttttcccctgtctcttaaaatgatgcagattctggccaggcgtggtggctcacgtctataatctcagcactttgggaggcygaggcgggtggatcacctgaggtcatgagctcgagaccagcccggccagcatggcacaaccccatctctactaaaaatacaaaaaattaaccaggcatggtggtgcatgcctgtcattccagctactcggagggctgaggcacgaaaatcgcttgaatccgggaggcagaggttgcagtgaactgagatcatgccactgcactccagcctgggtgacagagcgatactccgctctgtctcacaaaaaaaaagctgcagattctgaccttgctcagccagcatggccaatagattctccccaacctgagtgttgtcctggggttggggttccaatcccctctgtccttgttgtccctcaaacagaacctggtgtcctagatcctcttcctcccctcttcacatggatttgggagggtgcaagtgctttgggtttttctggagcacaatcatatacaggttaaggtgaacactgtgaagtttcctcctcctttaggattttggatctgtctgttgtgcttggctctttcccagggggtcaggcatccccaccccgctaacaaagaccaggggagacaagtattccaaactcatttttcacctgagagatcctaagtctggacctttttgtagtagtaactggaattgaatatcagatagtcaagagtagcgggatcttattgagtatttttcttatttatttttgcttgcatttcttgcacatacattttgctttaaagaggcaaactccaactccaaacctgccagactctagcagctttagaagttttgttggaattaatttatgcttatgttggaagatgtaggattatctgagccaaagttagtagatgccaaaagctttggtctatttttgttaaggtgatctgaatcagttacaaatataaactggaaatgttcttatccaaagaaatcactatttgctcatttatgtcaatatttgaccaggcgtatttgcgagctactggttctccttttgtgaataacatgttttagttgaaatgcatgcctctgacagcaccttgggagtgtgctgtgatagtaacatgatttgcttcrtcacaatttttattggaaaaaaatcattccggataactgcttrcaacaattgatctgaacatgtgtgctaatgtgaggtacaacaggtgtactcttttgctttcttaaatgcacatttaaaaataaagtagctagtgtaatgataagattaaatgaacgaagttgtactaagatctgayatctggtgagttaacgtctatcctatgctagaagaaactgataggaaattgtggcatgaatgacgtaacttttcagcatttaaattgctmctttaaaatgggtacctctttgctttataacstatttttaaaaatggacttgccccactaacaaagctgattttctttttccgttttgccttttctacagcacaaaagaagagaaagattgcagtcgtgcaaccagagaaacagtacgtgcttttttcccctcyagactacactgtataccgataaactgtagtgtctttatggaggatgggaagcrtggctgtttttattggagttatctaacaaatagcaccctagtagaggtagcagtaaaacatagtgactgttayttgttatgtacctgttatgtgcaagacacagtgcctgctccccaaggcactcrcaatccagattcccatggctcactttttattccayttcgacatacctggggagtgwcccagacctacacactgagagaaatcgctgtctgtgtctatagttctcagcgtctgcaggggccccacgtggcaggtgcagtttcgagtcgcagcccctcaccacactcagaatgctgctgcttactcacctctcctagagtagcccaggcttgggaggcagaaaacttcagtccaaccccagctctgctgagtgaacctgagcaagtggcattaattctctgcccctcagtgccctggcttgtaaaatacaatttgggggtacttacaaagattaaattagattccatttgaaaagaagtgtaggccttaagttgtaggctgaacaaatacagattatgccctgtcccccatttcagtcgtgattttctgtggaaacagggtgtcccccatttcaattgtgactttatgtggaaagagggtgttagcaaagcgtgtccaggcaggcagtgtgtttttgaatagttgtgactgctagtaacatttgtagatattgaaaaataatttaaaatacgccaaaatgtacattccaggccaagggattctgctttcttaagtaaataaaaatacactgatggaaagacaggtgaaaacagcatttttcacttgcggtagtcgagtttaaatttaaataagatgaaattgaactggaactgcacgatttgaatgagaagagcagctctgtaggtatttttttgtgggtttggttctaaatgcagtttatctggctcataaccagactccacgttatccrcctgatggggaagtagagagatttcataacacgcctgtgaccgaatccaaacttgaatccatcactccttaaatgcacagcccgtggattaacggttctcacctttctcatgcatcagtcacttagagagcttggagcacacagattgctgggccccatcctcaaaatttctgattcagaatgtccgagatggggcccaagaatctgcatttctaacaagttcacaggtagcgtcaatgctgtgggcctggggacccctcttggagaaccactccatagatggccttgctaagatctcttgtaagggttgactttgagcttaaggagcttttcaaccatgtggtttctatgccaccaacctagacacccctgtgaaacctagttcacctcttttcccctaaggctacattgtaaaacacatatttattcagcaacatttttactgaactataacagagctctgtcctggaataagcctatgttacattttaagatatgccagtttatagattttcttttaaggccttatttttagtgtggccatgactcccgcgggcccggaggtcagaaatcaaaggttagtggaaagtggttttcaattagacatcgaagtrgaaaagtctgactttaatcaaatgtaagataatgtttcttcatgtttaaaatataattgaaggcagtattacaattccatagcaagagataaggccagaagcgacctgggagaaactcactgatcaggaccagctgctcaggggcaggtgtctcaggctttcttgggccatccaaagaattggacaacaacttttctgaaatgctgttttcatctggtcttactggcattgctcccatacacacattctattstatggtcctcttatctgagatttctggaagagcccttttaaattatggtaagactttggaatgtagtagttccttctaaagcttgtggtccctgatagttttattttctctgttgacagattgcygcccacagtgcctgttaagaaaatacctcatgacctttgtttattccctcacctggacaccacaggtaatcagtcccatttagggggtctctgtgccttcccaccgtgcagccgggagcagagacatgtataggtttctaggtcgatatgaatacatctcaacgttgagcctattctgtttttctccattgccactcaggaacggatacctactttttaaaaagaaaaatttctaagctaaattctctgtgcctcttcttttctgcttcttggccagtagctctagatagttctagtctatagaaaaagggtttatgtgtgacttgcaaattaggagccaaattagggctgcatatcatggggaaaaggaaagagttgaaaatatcatctcattaggcaatttcttttttgatattttatttccgttccacttgcatttttccacttgctgttagtatttaagtcgccccgagcttttgaattgttccttaaaaccctctaaagagctggttgtgaataatatatgttttttaatgtgtaaagtcttacatcttacaataatctttggaaatacatttgtgagctaccctctgaccatcaagtctggtaatagacatgtttgtacattatcatacttgattaaaaagtctattctctaagccaaaatgaaacctgctctgaattccaggattaaaaccaacatgtcatggaagaatcctactaggagattatcttggtagtaaagagcagttttataagtagctttaactaaaattttgtttttctgcaggcctggtaatcgaaaggcagagtaatcctaccaaaaaatttccatgtaaatgcagctgtggacttcattatttttcctgttttatataattcaaactttagaatggttttaaaagaaccatgacagctaccctttcatagtctataattgtaattttactccttttcttttrtatccagaagaataacatttctgcttcctacctctgctggttcctagttgaagtctttatgagagcaagccttcctagactgttaaattaccatcccagattaatagcagtggttttgcagaaattccactgtgagtgttgcttagcttggagcttgggtagagtcagggtgggggcggtgactcccttagccaaaagtgaaacctcattctacatttatagacattaagaaacttttggcccagcatggtggctcatgcctgtaattccagcactttggaaggctgaagcaggcagattgcttgagctcaggagttcgaggccagcctggccaacatggtgagaccttgtctctactaaaaatacaaaaattagccgggcatggtggtgcatgcctgtgatcccacctacttaggaggctcaggcaggagaattgcttgaacccaggtggtggaggttgcagtgagctgagattgcaccactgcattccagcctgggcaacaaagtgagaccctgtctcaaaaacaaaacaaaacaaaaaactttcttctttttttgagacagagttttgctcttttcacccaggatggattgattacaggcgcatgctaccatgcccggctaatttttgtatttttagtagagatgaggtctcaccatgttggccaggctgatctggaactcctgacctcaggtgatccacccacctcggcctcccaaagtgctaggattataggcatgagccaccacctgtaagaaagaaactttagattgaggtcttatcatttaattattctgcttgcccatggcattggagacagcaagatcagcagctctcactattccctttctgagttgaaagaagaatacaggtaatgcacacttaagctgcagtgaggtctacttcaccgtcttcagactggcagagtggagaagtgcaacaggaaccattgttggggtagatgtaggactacaggagcccttccatggtgctaacaagagtgtcaattggggtagtcactgtggagaatggcgtggccatgtctagtaaaactgaagatacagatgcgcagacctgtggcctacctggcccactcttcttactcacctgcaagactctgttgcccacgtgtagaagattttcacaatcatattcatgaaagcactgttgacagtcctgaaaaagtagaaacaactaaatatccagcagtaagagactagacagctaaatgatgctacattaattcaatagagtcaaagaagtaaaaaaatgaatgaactttctagatccgcatttaccaacttggatatatctcagaaacttcttgttaagcaaacaaacaatatcttgcaggaaataatttatggaatatgtttaatatatcatatattgtttgtaggcacatgcatgcttctgtgtgtggtgaagttgacacacttgtgtggcatgatgaacaccagattcatacaatctggaaaaatgcatcagaatttccaaggtatcattaaggatataaaatgtcctgctattaggacacagcgcctctttctcaaaagaagaaaatcatctgtttttctctgctgctttgtcacgatttggaactagagtgtggcctcctaattacagttctaacgacactggctgtcacggttattgtgttcattttgggttccattgcttttattacgcctgactccccatcagccaagacctcggacagctctgtgtggtccttttccctgaccatgtggatgaagcaagggtctaggggtcccctagggtctggggctgtggtcctaagcatggactatgttgctgtcccctgcaggaaccgtcaacgggaaatactgctgtcctcagctcttcatcaaccacaggtgtttctcaggcccttacctgaacaaaggaaggattgcagagctacctcagtcggtgggaccgggcaaatgcgtgctggttcttaaagaggtaaagcccgtgcacaatcaccttggcttattttaacaggattttttaaaaagctgtgggctcagtttctgaaggagggaataggcattggaagcagttcagctggcatttaccgagacctccrttctctccatcctgtgggctgaagccagagatacacaaatggaaaaatgatgctctgacccatgaaaggctccccatctagagggagggacacacatctgccttccctcgaattagggggaaaagttgcactagatttgaatgaagtgctttgggaagacagagggaagattgtgtgtggagtgagggcctaggactggagttgaggtttccaaagaggtaaaccagcctggaatggcacagaggacttcatgaggcagcagagggtgttaatcaccgagaatggcgctccttggccgggtcatggtgctgtgccatctttttgtttcatccatctcttccsagcacctggtacctgcacacgggaggtaatggtaagtatttcaatggtctccaggtactttgacgaggtttgtgtcatgggtcacatccaggcccatcacttggaggctgtggctccccatttcttctgctgccttcgggcgacgacctgcagagacaggtgaatcctgaggatgttgatgaaggcttcttctccattgcatttttctagcatagcctcagacagtgcttggagacagattggaaatttggaatagtttccaaactcttcccggaactctatctctgctcttttcttacacgtatccgtactttctctgaagaaagaggataccaaatggatattctctattgccaccgtaccatgatgaatgtttcttaaaattctgcaggcacagcaatccattgatccattgaacaaatgtttgtcaggtaactttgaggagccaggcaccatcggaagcattggattaaaaaagaaataggctctgccttctgcctgttggggtttcctgctcttgttagggagatgatgtaatcctcagcttgatgtacagttgggcgtccgagagagaggcaggaacacagtgtcctgggagtagagtgcaggacaaatatatggcaagtgacatttcatctggcttaggcagagtgtgtaggatcctgattgcacagcgtgggcatggccacacaggtgggcattcaaggtgtgtttcagaaaggaaagtcaggtatggctggagcttaggaacttaggctggagataaaccgtggcataaaagggtgcattagattttgagaagaaaaacaggaagctggcctgccttgatgcttcagtgtgaggttggatggagcaaattggatggggcctgcttgtgaaaggccttctctgatattttaagtgatttggacttgaatctatggatagggcaccctcagagggatgcgagactcaagctttccctccacacgagagcctcggtgtgatttcaaatatcatttcacttgaggagaaagaggccattgaagsgaagtcagagggcattttctcttcctggtcatcagtggtattcgtagttaaagacctttttatttaaaaaaacatctgcttgagagaggaagtagaggttacagtttagaagaaacctgtcagaaatcgataaggctattgttgtggtcatttatttgggagcatgtagaatgttaagcaggtggtccctggcccacatgagcgtccagtcgatgggaaagatgagtatgtaaatagaaggtagccacgtggtcccaggttccaggacaggacctggcatgcacrctgtgagatcacaccggaggcatctgcaatctgtggggactgcggaacaggtggcctgcccctggtagggagaggagcaggaacaaggctggggcatctggggtgcgggtgatgaaggagggaagaggagaggatcctcacagcacctgaaatgtgcagactgcaagggatggacccagaaagggcccttgttcgtgtttagagtctgttgcaggcctggccattgtaccagggccttcatacacatcttcatttagcagcagaatggagctgccttccttgtaaatagctcatttctgcatttggtcttgaaatcgaacagtacgcatctcactaagcctaagtggcaagtagattccatatatgagaaattcacagctaaagagaaagggtgattgagttgggagggccacaccctgggaagggctccgcagtgtggttaagcagcaggaccgctagttaatgctaagtgaataaattggcacagattggagatccctgcagatactaaactcaatccaaacagaaatcaagccaggattacacataagaatttctgccaccatcggaaataggaccctagagtgagaattgactttcttccgtctgccacagctgtcagtctgtgaatggatttccactagggcaatgttgtctgcctgtatttctgcctgtttttgttgtgagtgataggatgaggacacaacaactgacaaaaatacngagagctgatgggcttcttcgaagctgcctgcaagcctgtttcacgtgacgtgttccgttgttgaaatgacaccttcccttatctgccagctctgttaacacacaagatgaccttggcttcagcctgtcttgaggggctggctgttttactttactaaatgatttgtttaagtcagaagtggttatccctgatcaattctccgataagtgccagcggccaaatttaaagccgagtccagagcagttttctaatgacaaaactagttttttgctgatgtttgaaaaatgcatgtggcaggaagaaagaaaaacaaaacaaaacaaaaaagtaggtgagtgcttcagttctgtgagtgcaagaaaaatgtaagtgccaccaagctaatatttacgctaatgctcctctttcagtaccagagcctctgtagcttcaaatttcattttagttaaagagaacgaggtaatggaagtaaagacagagtgcattgcttttcctggccatcggtgttattaggaacttgaacactttatgtgtaggagatgtgcagtgagagcggttcaccctgatctgttctgccagaaatagacgtctcggggtgtggatgcagacatggtctttggcaaggctcagtgcaggctgcagagtccagttctgggttctgtctgagtgggccgctttataagagmggacgaagtttctggcaaaagtggtctttaatgcatggctctactcacttgatgggtgttagagttgagtggggtttggcaggaccacgagcgtgtctggcctcaattcgagggggtgcagcgaggggaggtaggggacctgggagaagctggaaccagagtcactcaatggtccactgaggtccagacgtaccccataagcaaactcagaacgaagcaggccttggcgtggaggcacaggcccagctggtgaccgcccctcacatgctgggccttttacaggatgcccatgcccagttgcatggagggtggagttgttaggcacaggcagtggtgatgctgtttatcctaagtcacgtgtccatgctcagtagggtcattgtccattgggagcatctttttctatcccaaatccttctaccccaacctctcccggagtaccagggtccccaaaagagagataaaccatgatctatgtcatatcaggagattgctcgcctcctatgaccaaaagrgtcttgtcggctgttgcgttcctttgcattgcacgaggtgttcaggaaatttttgccttgtaacttacataccatctcatgaatcaccaggcctgtagtcctcactttatagacagtgtatcaggctagtgtctgtgtgtgaaagagaaagcaaaccagtgagccagcctgggcacaagaggccaacggggagcggaacatctaatctatttactcctgtccgtgggtcctggagtgactgtttcagctgcagacacagacccatgatgaaggtgagagcagaccagccaagcgctcctggcagaaacgactctgaaaacacgcacctgggtagggcgatggagcctctgccttcacagggactccacacatcatggtggggggacattgtccttggagaaaatcccagggtggctctcagagacttggggagccttgtggtttttcttagaatttatttggcttaaaatatcagtatgtaaatgtcagtgacagtatctaacttctgtttttcagaaaaaaagagaaacatgcctttcatgtgggccatctgtgggcacccctttgtgggttttccgcatgagcttcaggggtgctgagcaggcaggggctctccacttgtgtttgctcggcagcagacctggcctgtcctgtgtgctgctttttggcagtccaggttcaggagcttaagagaggaacgtttatagaaaggaaatcgatgagctgtaaccttctatagaaaggtagaaatagaacgcctgattttctgctctcttttttcttcttttggtgcttaagagttcagagaaagccccaggaagcctggcacccaggatgctttgcaatgaggcgcttctcagggcttgtttttttgctccagtgtaactctccaccccgtttgctgagatgctggtgagaccagggcactcagctgaggtccaaagactgggtgtgaaggcgyagaccagcagaatcaaagaagtagtgcggcacccctgaaccagaatgcggtgtgccccggacccccggccctgagtcagagacgccccactgcaaatagtgatgtgacctccgacccccaaagggctcaggtgactctggctcctggtcacctgcagtttgggatctttccagtgggacctggcggtttgggatttggcctcagctgttatttacggtttcgatttctgcccctgtggctgatgcattaagcgatttccctccgtgtttttgtttggggtgtctggttctcacatctggggagtctgtcatgtgctgtttgaatttccccttcattgtggagctctgagcatttgtcctgggctatcactcacaacaacatgtacctaaaaactagaaagctttctggtcggaatcctgaaagtcggctgccccaagcagccttcagtgttcatagacttggtggtaggagaagagctttcattcttcgaagcagtcgtaagtttatcggtaacacccaggggaggaggtgttgagggagtaggaatgacgatctcgtattgaggacttttccatgtgatattggacagagggaatgtcttacccagctgacctcagcgaagtcagtcctcggaatcaaagacagatgcagacaggcctcttgaagatactgtgctgtgtttttgttgctgctgttttcaatttatgctgaacattagttaacccactaagaataatgtgccaggcttacgggtgggtgtgaacttgaacacactcacatggtctggggtgctgagggaaggttggcaaaggaaaagtgcacatttttttttttgcatgtcaggcttttctttattattttctcrtagagaagacaagataaatttgatgaactttcttatcatagcataggataagattttgtagcaatgaaaagcaatagcaaatgataactcctgagcctccattcatgtagattatatggcatcaaatacttggagtgaatttattgttaatttttagatgaacagaataatttaatttcagagcccatattgaaattattgaactaattcaaaaaatatctatagagcacctactcttgccagttatggttgtatctgccatggatacagcagcaaacagaatgaagtccctgatttcctgctgcttatgtcttagtgggggtggatggtgaacaaataagccaattacggaataatcctatactaatartaagacaagttatccatgagaggccagagaatgaagggaggaatgtgctgtgtacagaggatactcgcagagacctttctgatacggactttggagtaaagacccggatggggagggatggtctggaagggtttccccaggaagaacaatcctaagagaagaacagagcagaggaaaggcctgatctgacctgttgaaaggatcgccctggcggttgttgggaggtgaggctctcagagcgtgaggtggaagacagggaagcccctgccggcagggtgagaatagacccagagctgcccagcgtttcggccatgtgctctcaccaggcatctggataagacagtttcagggacattgtggacacagaaaagccccattggattgggttccagagargactgaagaagaggaaaaggcgctgttgagtgtagactcttcttaaggattttactgtaaaagagctgagaaatgaggtgggggaatgtgttagttcgttttcacattggtgatcaagacatacctgagactgggcaatttataaaggaaaagaggtttaagggactcacagatccacatggctggggaggcctcacaatcatggcagacggcaaaaggcaygtcttacatggcagcagacgagagaatgggagccaagcaaaaaggggaactccttataaaaccatcagatctcatgagacttattcactaccacgagaacattatgggggaaaccacccctacaattcaattacctcccacaaggttcctcccacaacacatgggaattatgggagctacaattcaaggtgagatttgggtggggtcacagccaaaccatatcagtggaggaagatgagacacctaaggtyctattagtttgggggcaggggcaggctccctgctaccctctctgatcaagcacataatgaactgaactccagtgttttgcaaagcacaataattcagtctaactgtggctagtcatagcagctgtccacttagttattttcattaggtaactataatacatgacattgtcatgtgcacagaaattattcagctcacaattccaaagttttatagagagcttgttgaatttggagacggatgatgtggcatcaagaaaagccaagggaaaaacattcaatatccgatgcttttcataatttaattgctgcctgctcccaggctgaattgaactccagaaggcattttcttttcgcagtcacaaaatgcatctcnatatgcagcaaataacatgcagctctggggttttctcagcgaaacccaatgaaaagaatctgttgaaattttattgtctgttgataaacactgtgtgygttattgcagtcagtactaattagatttatttttaaactgagtttctgtaaattgtactgacagtaaacaataaaatcagatgattattctaatacagaaaacacaaacgcaacaaaactgccggtaccgccttgtcatggctttttagcaccttggcaagccacattctcttggtgggtggctttgaggcccttggaacatagcaagatgttacccaggcagagaaaaggccgtcgccgggctgaccgcgtagtgtaaagtattttaagagtgaatccttagttacaacttgagaaagctttgttgttttcaaataaatcagggtgcaaaccaagctggttacgttccagaacacaacagacccgtgaaaattgtgacaagcaaattccatccacattctcccatctccttccatttattttgtaatagtctccattaaaagatagtgcgtgtttaggcactagtgccagactcccatctcactcaggtgtatctcttgctctcccaacggtattttgctctgaaatccaaaatgtgagctccatgcctggcgtgctccttccaacttccgcacccggacggcctgcaggaggcatgggcactgcgtgctcccccgtcttgttcctgctactgtcactcagtggagcttcacagaggatcatttcatgaaactccacaccataggcctctgctttgcactctcacgttctgtaaggtctttatccaaacagcagcagcccaggaatgtgccagaactcatcaatgttaatcattaatgatgatttgctttttgaaaggtgagcaccttaggggtctgaggtccttgtccctttcattagagaaactcattgaggttaacaggaacatcgtatctccccagggtyagcagctggaactcttagaaatgcctgctctttctgagccccatggtagacacatgcttgttttcttggacttgggagtgaggggtggatgggggaaatatgatactggatggcgctggatattccagactctcttttaaaatattcacatttcagagggttgccctagtattaaatgtccatgaattgagcctgcaagaggagagtttcacacaatttgttaccctccttgcaagcatgtgaagcctctccagaagtgttggcatgagtagattgtctccgtttcattagttccttatgaaatctgtaaaaatagaatgaaattctcagtagcctatccaactgaagagtaatcctgttgaagtacaataaattgctctttggtgaaaatggttcagcttttctgcaactagaagagttaatgggagtctgccaccccctctagagagtggttcacacttttctagccagagagattgtattttaccacgctttttgtccatggatggtgaaacaactcagtgttagcctggcaagtgttctatcagacttaatcacgkttcttcacttcatgtgggtgtagtggcgagctgttcctaaatgtcagtggtgtggttttcaaagcatccttgtgttagtaggaatgaatgcaattgcagctcagtctgcttatttttttccccaaaaggttcttagcatgataatcaacgcagcctacaagcctggaagggtattaagagaattacagctggtagaagatccccactggaatttccaggaagagacgctgaaggccaagtaagtgttttcaattctggaaagcaagggtttttgtaatacttccccatgctactttgaamcttgccacttctctttgtgacacagccctgagaaatggaacaaactgaaggacgttcgttctgcagttctatgggcgacaygtaaatttcttggcatttttgccatacagcgttgccttaagccttaggattcctaaggtgaagtagagatttccttaactaatattttattatgctaaacattcagcatcataaaaacttggtatgtttcaggaccaataggttatttgagcaaaagggggaaaattgtaaagaggatatccctcatcattattatactatgttcataaacagctcttcatttttgatattatatagactatgctaaatgcaaatgctctcttttctggcagttgacagttctcaaagataaaaggaacccgtgcatgtttggtctgggttaagtaaatggcagcaaaatctgggttggcgtggagtcaagtaactttcttttatttggaaataggctaattggaaaggtgacatttttgctttctttaggtttcttgacctctgaaattgagagcaggagccgtatcaatgtacttgaacttggttgtttaggcacatagaaaaagatccgtttctaagataattttatgttgaataattgtttagagtgcttgagaggacttttaatattcatctatgggtttcaaatagaataggttttactagttgacttcttaatggtcattgagatgtaacatttgagaaatgatgtttttttaaaagagtaaaacagttttcagtggctagaggatatctaagcckcctttagagaaggcacctgccctattcatagtgaaaattgagaaatatgaaataatttgtatgatcggtaatattttcctctatagttaacttatactagtactgtgactgaagatgtttagagattgtgccacactcaacattcattgccagcaatccacttagcattcctggtgtcatttttgaacagctctggggttttagattcagtaaaacttatttatggtctaatcataatctgccaaatcaccaaagtggaagagaatatatgtaaataagaagagggtttatttgcagaaaatggcaggccrattaacgatgctgctacatttcatcatttccttctttctcaagaaatatttaagtgagcttcacctatagctcagagaaaaacatgtttttctaatatttcatatttttctgctttaaagagatcattagcagtagtggcacattttcttataagtttgtagtagtagtgggggcagaaaacataagcaagtgtttataatggagaaatccttcttattttaaaacttttctgcaaaattcaatacagtccaygtacacctaatggacacagatataataaaagtacaaaaatcttagctcccattaaaaccttccctgcctctaaataagccagaaactcgctcccgctccacagtgagaggaagttcattttgcaagtgtttgcactagttttcatgttaccaagtcgatcagagctttttattaaatccagcctgatacaatcaaaacagacatggtgaaacccagctctactgaattgtaaaggcagcatattacctattatatcaaatatgacaaaaagttccatggcaaactcttacacagcaacttctaatgagaaaatgtctgtctgaactgggtttcaactgtgcgagatcatagcagcgtctcaaagcagctgctaatgatgacagctttacagtcagcgggagctctcctgctctgatactgtgtgttgagtcacctcttcccttctgatgtgaaatgacaactttttagatcttgacaactttgctattttctttggtgcaaatgggaggagagagagctggcatcttcccatttagctgaaaggaaggcatgttttctgtcatgaataaattaacgtacaagaggagagactcacattcaagacatttggtccaggccaggcgtggtggctcatgactgtaatccctgcactttgggaagctgaagcagcaaatcgcttgagtccaggaattcaagaccagcctggacaacatagtaagaccctgtctctacaacaaataaaatatttwtatatatatatatatgtgtgtgtgtgtgtgtgtgtgtgtgtgtgtrtgtgtrtatatagtatgtatgtatgtgtatatgtatgtatatatatgtcatatatacatatgacattcagtcctcttggttgattatgggagctgttgtacacaattataaagactgttttcaggaagagaggatgtgagattatccctagggcagtgtgattgctctcatttggcatctaggatttctggttgttttttccacctcctaagagtaaagacccatttacttgagaggatgaaggtgtctttgtagaggttttgacttgtaaatataacgaaaacttacactgttacctacaattgtctctgggtgatttttcccctatttatccaacaaccgtaccttttatagaaagaaattattgcaatatttgaacttgtgaggagtctatcattattaccttcaacatgtattgaaaagcaaaaatttgctrgcttttatgccagggaaaaaaaatggcttctcatgtagttcatttctgttctggaagagaaaatttctttcttgccaatgaatttaaatatgctcaatttacctgcattgttttgaattacaggaggaggaattaggctatatcttagaggggtaaggaaaaaaaaagccctccacctctctgcatctagagacatttaaatatgtttttcagcatgttacagaatcttcttgagggaaaataaaaagactgtcttaactcttctttgaatggcttttgtgatcatctttataaaagccaggcagaagcttaataattcttctagtcctgtgttatagttattcagaatatttaaagaggaaatatcctggtaggatttcacgtgagttagagctcactgtcacttatcagagggaaggagataaagtcagatcttcactgttaggtgcgtcatgctcagctctgtggaaatgttgtggtttcttttttttcataagcagtggttaattttgtgtgtgcttttacttatttgactttaatttttgtccttttacgcaagcatttgtcttatgaactgtcgcaggtaacatttggctataaagtgatttatgtaaaaaaaggattccctaactgagagacttcaccggaaaaggttttgtttgttcatttgttaattttgtttaccttgcgcaagtgtatgtagtttgctgtcctgaaaacgcacgaggtgaacttcgcgttaagcaaagccatgaaccagtctatttgaagggaagactgcatttctgtgtatgtgtgtacctaaattcactggatcacggtgtggcgtgtctgattcaaacaggccagcttaagacattctggaggagcagtagtctccttgggataaacatacatgcccatgtgttgcagagttcccattacttaaaggcaagaaggaagaaagaaatttctgaggagtttgggtgtcctaaggctgaaaaccagtgacccattctcccgaccctgaagtccagtgaccaagaatgagaccaatgaagtgaaagctttgttctgaaggaagcgagaaccgtacctcactattgctgatgagaacagaggctttcccacagcttgtaaagcttccctatttctgcagggttctcagagtcaccatttccttcctcttttaattcttcctccagcatttgagggtgtgagttcagcttgaagaaccagaacctcgtcctccgctcccacacccctatccctgcctgacgagatttgttaaaaggtctcataagggtgattctgagggtgaatgatggaacttagaccatagtgacattctgcttgggccgtgccggtggttataaacggattgttacaccagtgttggctttttcactctgtttttgtttttgactcaaaatccatttagattcttctcaacttttaactaccgtattagtccattttcatgccgctgataaagacatacctgcaactgggtaatttataaggaaaaaaaggttaaatggactcwcagttccacgtggctggggaggcctcataatcacggcggaaggtgaaaggcacatctcacatggtggcagacaagagaagagaatgagaatcaagcaaaaggggtttccccttatgaaaccatcagatcttgtgagacttattcactaccacaggaaaagtatgggggaaactgccccatgattcagttacctcccactgggtccctcccacaacacttgagaattatgggagctacaattcaagatgagatttgggtggggacacagccaaaacataccagctattgaaggagaggagatgatttttttggcattttatcatcccatattcctctctctgtctccaccctgctctatgcacttggacgtggaaagaaatccctactttggctaatgggaaggaagtggaaggccacacatatattgatatcagtgaggaaaaactttgcctccactcctttaggttcagagactgggagcctgaaggttaaactgaccaaagacaggtgagtgagagaagaaacagcccacttacatgtgtaacsctcataccgagggagtgctcagtgatgaataactcagagggtgggtcagtcgtttggggattctgtatccaactcagtacgggaaagggagctgggagcaaaggctttygtcagaagaacaaatagattgctttgggaaagacaaattggatttgaggaaagcaagtgagaagtaagaaagtttgtgctaatgtttgtttatgcaggtctgagtggtctttctctcttcttcatggccaggctgggaaacgtccccagagaggagatttatggcagctttactcttacgtctctctcctgggaggagaagctgcccccaaagagggaatttatgrcagtctccatttctctaaagtttctattttacagcagataatgggagctccaacaagacttcttgctgtatctgtcgaatctcaactatcttgagcttaaaataatcttctgtggactctggggttctcagtgtcctgcgctgacaaccagcaagagcatctcctgtgttttccactgttgatctgtgacttcctttactgtctcaaagtgtgcttccgagagcactgccagccccagcccctcctgatgtgctcagcttgtaggatgagattgcgttcttccctccagatttctctgcaacctgagtgatgcagaggtgctgggatggcaaggtctatctgaggactgagatgaaagctctccttcctggacctctcccttacaactttctcctccgtcaccttttttgtctttgctattccttagttccaactcagtaatcttttgcttgttgcttctattttccttctttctgagattatttatattgccagagagttttctrttgtgtgcgagctcagctgtctcttaatattttcctcttactttgtcttcttgggacttgaaatattgcttcaaaaacttagtgtttatgagagccttgccgggccgtgtatkaaataacatcggcgtctcaccctttggtctcacagtgtcagtagaaagtgaaaagcattatctcatgctttttggtggttctttttttttaacttttttttttattatactttaagttctagggtacatgtgcacaatgtgcaggttagttacatatgtatacatgtgccatgttggtgtgctgcacccattaactcatcatttaacattaggtatatctcctaatgctatccctcccccctcccccaccccacaacaggccccagtgtgtgatgttcccctacctgtgtccatgtgttctcattgttcaattcccacctatgagtgagaacatgaggtgtttggttttttgtccttgccatagtttgctgagaatgatggtttccagcttcatccatgtccctaccaaggacatgaactcatcattttttatggctgcatagtagtccatggtgtatatgtgccacattttcttaatccagtctatcattgttggacatttgggttgttcttttcacacatcctccctacaaagttatgtcattggtatgctgtttktaagtctttcttggaaggtaaaaatacaaaacacactcttcttttcacttttggtaaaataaagagtagaatgaggctgagtgcgttggcctgtgcctgtaataccaacactctgggaggctgaggcgggaggatcacctgaggtcagaagtttgagaccagcctggccaacatggtgaaacaccatctctactaaaaatacaaaaattagccgggcatggtagtgggtgcctgtagtcccagctactctggaggctgaggcaggagaatcgcttgaacctgggagatggaggttgcagtgagccaagatggtgccagtgcactccagcctgggtgagagcctgtctcaaaaaaaaaggaaagaaagaacaggtcatccccctacccagccatccccaggtctgtcacrtggagctcaaacccctgtccactgtgcctgggaagatcrtgtaaggatcaagtgatcaaatgctgtaagatccttgagaatatgtcagtagcttcattacataaatgcagatttactgttaattcccagccagttggtaaactcttagagctgtcttttgcctctcctttttttttaatagggctgtatcttcgtatgttcagcatgcctttgaaagagttgttccaacagttaccctaatttgtaggccaactccaaaacaagcctgtttattggttcaggttggagttggatttcacaatcaatttatccttaatgtattgatagcatctggatgtgtccatgtgtactcaaccaatagtgctcagaaatgctcatgtgatggaaagtctgctgtagagtcagcttggtatagtttgagtcattatatgactacatgcctttatattatttctaagtgcttttgaaacaatctcatacttacagaaatattggaggtacagaataaagatactattcattctcctgattgatttgggataagttgaaggcctgatgccccgtcacccccaaatacatgttgaatatcctttattccaattgcttgggaccagaagtgttttggatttcatcttttttcagcttttggaatacttgcagtatacttatattatgttgacactcaaaaatttcagaatttggagtattttgaatttcagattttctgattagggatgtacctgtacttttttttttttttttttgaaatggagtctcactttgtcacccaggctggaatgcagtggcacaatctcggctaactgcaacccccgcctcctgggttccagcgattctcctgcctcagcctcctgagtagctgagactacaggcgtgcaccaccatgcccagctgttttttgtatttttaggagagatggggtttcaccatgttggccaggatggtcccaatctcttgacctcgtgatctgcctgtaagcaggcttttctaacgggagtggctcaggcctgctgtgttcacccttttctgtgcgcttgtggtggaacgtaggctccaattccagtccagcatgccagggttcatcctagccttttccttccctatacttgcaactccggctgtgacagtggaagcctggcctgtgctctccacctttggagtatgtatttatttcgtcaggccccagcgtctctccagtatcctcaccctcccaacagctgtccccacatgcgacggcctcccccctgcgtccctcccgcacttccatccttttccctggtgggttcctcccagatgggtttcatcaaggagggcccttgggaccaatgcctttggaagggaggggaaggcagtgggattgagaagacagagatcatcccacagtgaggccaggcaggcacccgcagcagctctggggttaaaggctcttcatggctgtccggagttgggccccagtgacctttttacctcctccacagtcagtccctggatggggcccttctgggaagggcagggccaaggcagctttttgcaaaaccctaaagggggctgggcacagtgactcacgcctgtaatcccagcactttgggaggccaaggcgggcagatcacttgaggtcaggagttcaagaccagcctggccaacatagcaaaaccccatctctactaaaaatacaaaaaaaaaaaaaaaattaccactataggcgtggtggtgggcacctgtattcccagtgactcaggaggctgaggcatgagaatcgctagaacccaggatgcagaggttgcagtgagctgagctcttgcaccattgcactctggcctggatgactaagtgagaccctgtctcaaaaaaagcaaaaaaaagcaaacctaaataaaagggccacaactgaaggctttctcccagcaggtggggcaacaagccccccagtgaaggggtccaggcagcacgccatccgccagcttccccagcccgtgccctatccttactcagtcccctctacccctcacygccatggcttctaaacagaattgttcaggaagggcagggaagagaaaaggagcccgctgtttttaaatgatgctataacttaaatcttcatacctttagatgggcttttccctattgtgaaagtttttactgaaacacttgtttccrtgaaatcatcccaaactaggaagagaaaattaagccagcctggttctgtttcccccagataaccgctcccttcatccgtcgctccgatgtggcagcgcgtgtgtgtgcttcgtcacctggaggtttgatgagcagtctcatctttgagccttgttctgcagtttgtcctctgacctggcttgcacatttctcctgcgttcttatgtctcattattttatttttctagggactctaagaatctcgatagtgagctctttccaacaaagttgtggggccaccaaactcgtagtggataaaactgcaagggaaaatgtagccgtgaagcacttttattctacatttcccatttttactctccatttcccacaacacgaggaacatacggtgttcccagttgtgctgtttcttttgtttttttttttttttttttttttttcgaaaatgcaacaaaagcaataagcaagaaccgncccaacgtgggtcctggagtccctcttcaaaggcacggagagggaagtctctacacatagggtcaatggagggcctagaaaaaccaacagccattcaaggctgtaggatttaaagcatgatcttatctacagaagattactttctagttctcactacatggaaagtcaagctcgacccatcagagaaactgaagaaaaacaaacacccaggggctgggatatgaaagaccctgaataaatatgaagtaaatttagtagagtatgcagatawaaagtacaagttggaatttaatccttaattttttttgccgttgatactttaaaaaaaaaagatttattagtggaaaagtatttttccagtctttagaaagacattcctaaaaagctggaatttcatatttcagtagtttggtgatatgtgaacgaaataaaaacctatgatctgttgccagttgagaagctgaccattactttgtccccatgatagggttaaaaatctgtcaaaaggtgattgaaacctacaagtgcttgtgttttcagccaggcattatgtatatcatattcccataaatatttggataagggctgtagtgcctaattttaaaacaagaacccatcgaatctgctttttgtagctctggttgccagttttacactggtgaattcattacctgcggtttttcttggggcaggagaaagtttttttcttaaaagtgatgagcaacaagtgacaatatctaggttccagaagcatgtctcactctaaattctttgttgtgtgggtgggtgtggggagggatgcgaggagcttaatttttattcttcactaaatagttacgtttaaggaaagcagtattgcacttgatatttayatatgatggcaagacagtgccatctcttcaagcaatgtttgttgacgtttttggattcccatatataaaatcagttccttgtggataactataaaaggcgtttggatttccagaactctcgttttcctagtgcgttgaaaaggttttggggaaaacttccatacccttcatctagattggtgtttcctctaagatcagagacaagtgcttaaggaggacctcagagaaaccttagaagatgtgaaccgagaaggaaaggtacaagcaggcagcagccatggtcaggagaagctgctgtgtgggtggtggggaggtgcaggcaggcagtccgggggtccccattcttgtcacccccccaccaccggaggaatgagccttgtctcagtcagcccaggctgtgcagcaaagagccacaggccacatggcttttgcaacgatgtttattctctcagtgctctggaggcctaaagtccaagatgaaggtgccagggttggtttctccttaagcttctctttttggcttgtggatggccaccttctccctctgccctcacatggtctagtctctgtgcatgtacacccctggtggcttttcaacttcttcttcttcttcttctttttttttttaagagacagagccccactgtgtcgcccaggctggagtacagtggtacaatcatagcttattgcagccttgaccgcctgtgctcaaggaatcctcctgcctcagccttctcagcctccccagtagtgccccaccgtgcccatagtttttaaattttttgtagagatgggggtctcgctatgctgctcagtctggtcttaaacctctgggctctagcagtcctcctgcctcggcctcccaaagwgctgagatgacaaggatgaacctccacactcaaacttttcatcttcttacaaggccrccactcctatgggattaggtccccacccttataacctcgtttaatttaattacctcattgaaagccccatcttcaattacagtcctatcgggggttatggcttcaacctatgaatttaggagggacatggttcaatccatataataagaatgaaggtctcctatgtgaggcccctcagttagatttaccgctttttgcggggggcggggggagatttaactggagaaatgccttttattttttcctaatacacaaatagactgtagctttccaaagacctcagtctaataagaaatagagatgcatatgaagtactgttgattccagcgtgcattctccttgcagtatgatttcatccactatctatcactcaatcaagatttgagtctgtggggaattgcggtgaaggtgtgcatgttcagaaaggattcgatttactgcttcggagaaagcaaccgaagccatggagggggttgctggggggactggagagcaggtggaagcaagttttagttcctggagcaatctttcaccatcccaacctagaggagaggagtggccagttaccctcatgggcagagtatggcaagcggcattaccatttcacgttgctccctttacacttgagagatacagcagccttttcctttaactgccactcatccaccggagaccccttacgattctgtttacactgaagccacttgctgccagtgtctgcaaggctgggggtcttcactcggtttccaggtcccaatcatacagtcactctgcatttttaatggtagcttttttctttctttttttccccttataaaatccattgtgtttctgtccatttaaatgtgaccttgcttacctatcaccattctgcacagatgccatttatgaataatggaaatcgtccccatttcaacaatatgatacacagtcttgacaaagatatcctttcagtgttctgaatttgcatggttttcaaggcagaatcctgatcccatatgcactcacatttttcaaaaatgaaatatgatagcaacaggaaaatacccattcgatttcactaacctcatttcgagagccatgcccatcaggtatgtatcccgcaccgctcatctttggtatgaagttgtatatagcaaaatgaaggtgtgctacatgtgggggtgtttatggaagtggattctggtttagcactgttacgacacatttgttgcacactagtgagcacttcttataaatatctctgtgagaaataacagaagcaacatgggaaactgcacgcgatatgctttgtcattggaaaatgaagttgctgccttcggaatgtgtggtacagaataggcctgaatcataatctggtcttgccctcgcttttcttccccacctattttctagatacagaggcaaaacatacagggctgtggtcaaaatcgtacggacatctgaccaagtcgcaaatttctgccgccgagtctgtgccaagctagagtgctgtccaaatttgtttagtcctgtgctgatatctgaaaactgcccagagaactgctccattcataccaaaaccaaatacagtaagtacaaataatgaaaaaagaaatgcatgagcccagagacctaaactgcactctaaggtatttggtttttgtttcatttgcttttttctttttgaaccttttgactagtcttccataggaattgctatggaaggatttttaaggatttgctgtagcagatacatgygtttttagcctgacatacggaggggatgggatgatttaaaacaggatgaattttcattggtaggccttggaaaagaagaagaggaactgtgtgtactgtcatgagtttcagtggattgattgattctacagctcaatggatggcaggagagcacagtaaaattgatcacagtaacagtaacccagatgactctttcagtccttactctgggatagtgtaatgatgctttcattgcccttcttgatacgggggccacatccttgtcataatcggcttctcatgtttagacgccttcctcagcaccctcactgaagagagccatggaggactcagaagccaccatcactttcttttctgccagttggctttgcctctctcccaggacacagggtgcaggactcagagctgtccccactctcctaccttcagctcttgcctcttccatccccagtcccattcgaggatgtctggccttgggcaaccgcttcccctgagccctgcccttctttctttctgatgaccttctccatccatagtagccactcccagacacctccacctcctgtgcctgagtcctgttctctccctctgacccacagttctgagtttcctgcgtctcccctcagttctctctaatgcaagggggagtgacctggaagttagctctgccagccacgttccagccagctgggatgtgacaagggcttggccatgtggccagtgctctgtgagccacagtcacttgtgacgtttgtcaacatgggtgctggaaccaggaatctgaatgtactggaaacgctgtgsagagtgtgactttctttgtattttattatctctcagtgtgtttctacacacacacaacacacacacacacacagagtccccttgccactctgccttctgatggaggccagctgtgccctcactgatcacacagacctcccctcattctgtgcacagggcctctcaggtagggcccgcaggtgtgttggcccagcaggtcacctggttccggaagagcttgtttctccatcactgcacctttttccaggggagggcttcactgggaaacagcagctcctgagtaagaaaggcctaaccgagggctcgcctttgccgtgtacggtgaatgcttacctgccaggtgggcttctgtgttcttccaggacactgggaatggcagggaaggagcagggtcccacacctcccattcagcattgccgaaatgaactcagagatgtctccggatctcatataataaaactcttaagtcccaagatcctttgggttaatttataatgaatgttactaaaggctgaacagaggctccagtgggaggaggacagaatgatattttgggggagtcaaacactggaaaagcaggggtcacccagtctcgttctaaggctccaaacacatactggcctttggctgcattccctaaaaccagttctcatccccagccactggcttctaagaagccagcctgccctggccctgtcatgcacgcttggggtttgggaggggacagaggcttgctcatttgccccgtacctggagatggccacagagcaatgctcgcccacggcagtttattcctgctcactgagtaacacggtccttatagaactggacacgggacattgttccaagctctcctgccagctgctccttttgagagattgatgagaacaggccggggctcccggagcaggtgtgcctcctgggagttacagggctgctgctgtgcggcttcccgacagtttttccaaatgccatgctgtgatcaaacgcaggggaggaggtgggacatagagggtcttaggcctgaaggaaacctatgcttgttagtcctgatggtctcattttgtaagtaaggaaattggggtgcagaaaggataggtgacttacctgtaggacaaagcccacgactcagtactgtgagaatgcactaaaatcatgctccctgcaacggggctgctgcaaaccaggggtggtgcatttgccattttgctttggcccaccccattcgtagataaaggttccttggctgcattcagttattttgtggctcatgggcatcacatagtgggacggttgaaccttttattaatgagtaggcgtctgggtcgtaattgaatgctggatccttagtggtggttttcattagctgatgatacattttgtttataaaaaacattaatyactactaaagttcaataaataatttttgaattaagatgtacacctgtgtctctgctgtagaattcagaagcaatgtgagtcccagcaaatgagaaggaaataaagtatacaatgatgtaatagagaaggaactctgagaagaggaaaagtgcttggtgaatttggcccacgtgttcaggatcatagcttatcttggtcggaccaagagctgggggagtccctcatgccaggaccacgccagcagatgttcacccagtgcttgctgactgaccagtcgctcaagattcagacttgggagcaggtgtcagagcactccggtggatgtcattgccaccactgtatgcagtgtctggggtccagacagggataaactcccgtgggaactgtggacacctttgtctctttcaccttctgcagaagtcagctctggcttacaacaacataccacagaccctgagctttcactgcgcacacttacctcccacagtcctggaagctggaagtccaagatcagggtgtcagcagctttggtttctgatgagatccttcctgggcctcaggcagccacctgcaccctgtgtcctcatggggcctctcctttgggtcttgggtccttggtgtctctcctggacactcttaggacctcattaatgtcctattggattagggccccacccttgtacactcactttgggggttcgggacatccagatacactcactttgggggtttgggcttcaacactggggacgggccaagttcagcccgaacaccttccagacctgaagctttggagcagtgcttctcctgtgggtctgttttctcagaatgacttygtaaggcacaaatgaactatcagatgaaagaatcgtttcccttctttctctctcctctctctgttcatgtctgtgtgtgtgtatagccttcaaaagtttctcatcttscttcctacagcctattactatggaaagagaaagaagatckccaagccccscatcggggaaagcaaccccgacagcggacaccccaaacccgccaggcggaggaagcgacggaaatccattttcgtgcagaagaaacggaggtcttctgccgtggacttcaccgcgggctcgggggaggtatgttctgcccggggcacctgccagcctgtagctctgtcatctggccctggccggcaagtgtggctgcttcacagcagaggtggccctggagattgtggcaagatggtcagaaacactgaagaagagccccctcctccttacttgctgaaaacaaatgtagtgtgtccagctgctttggctgggaagggcctcgtagggcccacgggtgggaccactggctccatttccgagggtttgctaggtggtctgcactgggcccagggtctgaccgcggggccaccgctacaggcccccgggccaccagccccttaaatgccttttcctccttcccaggaaagtgaagaggaggacgctgacgccatggacgatgacaccgccagtgaggagaccggctccgagctccgggatgaccagacggacacctcgtcggcggaggtgccctcggcccggccccggagggccgtcaccctgcggagcggctcagagcccgtgcgccggccacccccagagaggacacgaaggggccgcggggcgccggctgcctcctcagcagaggaaggggagaagtgcccgccgaccaagcccgaggggacagaggtgatgcccgggcgtggggacagagggcttcccgctgggtctgaagaagcacacctgttacacttcagggccacgatgtggggaaacctgtttaaaatacctccaacagcagcagctgctctagctagttcccaagtcaggaacaaaggctggcacttcacctctgggtggaggggcctttcggcatcagaatggagtgcccagggtggagacagcgcctctttcctggacggctttagtgccacctgggttcttgtcaggaggagggcacagtcctcagtttcctttgaagtctgggtttccagaaattccttccccgcatctcccctgactgcgctgtgtcttgctcccacgtcccctctataggacacctctgtgatgttttaaaatatttaatcagtgtttcaggtctcccctagccccatgggtggtgtgagatcagcagaaagggccactggcaccaccattacagaaacactgggggacactgtctcgtgtctgcttggacgtgccccttgtatttctcctcttttctctaatcagagatgcttcgttcataagcaggcccaaggtttcctgaactagggatgcaagagcgactgtcactgtgcctgccttcttccatctgaaggcacatgagtcattgcagggggcatcatcactgagccaagaactttctcagggactgagagtgtgtgcagctttttcaggtgcccagtgagggagcaaagggaggcagtggcttcyggccaggaacggccgaggcctggagagtgctggagaggaccmagccagctgactgtgccgcagctgagctcctcctgccctttctctgcaggacacgaaacaggaggaggaggagagactggttctggagagcaacccgttggagtggacggtcaccgacgtggtgaggttcattaagctgacagactgtgcccccttggccaagatatttcaggagcaggtacggtggttgccgcgtgtcgattgtttgatgtgctgagactctgcatctgaaatgaacctcgtgtcctagccggcttcctcgtgacacctgcgagggggttcttcggcgctgctcggcaggtgtgcgagacccttctccctccaaggcccctgctgagagctgcctggcagggacgagagacagagcctcattcctgctcctctcaggccccaccagtgccatggtggggggcggaggggtgactcttccaggctctagtgacaccacccagcaggggtgggaggtgcctgttgctgccaggtgaggggtgcgagtccacgctccccctgccatctccaccgactctacagtgggggctctttaccaccaggcaggggtgagagtcccagttccctggctggccctttcagatgccaggtcagtggtgggatggggtgcccagttgccacctggccaggccggaagtcaggatagcacactctgccttggctgctctcagtggggtccgtccagccctccctgtgatgttcagctgcagaagagatgctgctgtctcacggttttttgtcttgctgggccaccccttggccaggcctttgtctggagagaactggttttggttgagcctcctgtcagtgccttttggcaaatctgggttgcagcttcttcagctccaagtctcaggggcatgaagctcacacacaaacagcaaccacaacaaccagagagctcagcactgtgctgtcagctgggggcccaggcccctagccggtctgccctcctttctccaccttccagagtcttctgtttgtgaatttgtatataatgcccatggatcttacttaggcctagtgggagaaggagggaacagtgtatccacctggcctgcccagagcagaagcccgctggctggtgtgtcgtactgaatgctgctttcgtcattgttttcttaccttcctcacttctttctgcataaaatatttttaagaccatggtatggtgatggacaaatgcaataacagtcgatataatttctaccttaaaggagcctatagtccagcagatgaaatgagtatagttagctaaaacacaagatcatatgatgctgtgtcctaaggaagaagagagggtttttatttacattatcccttaaattaatacggaaacaagttgccactctgcacacacaccaccttgcatcctgcctcactggccttgcagaaaatgccaggctcttgctgtactctgtgcttaatttgttgaagtttcttgcgttgtcctggtgtaaatatctgtgttcaaagacctcatgttaaaaaaaaagtactgtttttcatataatgttaaagataggtttattcagtctctttttagatcatataaatcagtagtctagaaagaggatatttccagcattaaatcaggaaacataaaaggtctgtgacttcctgtgtacccagaaaatttcccagcttttctcccaagttcatgcagcaatgaactggaaaaagcaaattaaaatggtctccagtgccacccaaagagagtagttctttcccctgtgtcccgagaagtccaagagatgaagtagttcatcctattgacaaccactagaaccttctgcagacacccactaagttcatgctgaaagaatgattaggccggccatggcggcttatgcctgtaatcctaacactttgggaggccgagacaggcagatcacttgaggtcaggagttcgagaccagcctggccaacgtggcaaaaccctgtctctactgaagaaaaaaaaaaaattagctgggcstggtggtgggtgcctktaatcccagctacttgggaggctgaggcaagagaattgcttgaacctgggagggagaggtagcagtgagccgagatcgtgtcactgcactccagcctgggcaacagagtaagactccatctcaaaaacaagcaaaaagaaagaaagaaaaaagaatgattggaggcagagggagtcacctcctcaccttctcacactggccacccttcctgtctggacaactctgaaaagcaaccagggagagacttccttagacctaaagaacctgggtgatgagcttgtccctttaaataacacacaaacaggaaagaaagacaattgtaagaaatacaagggcttaggtgatcgggggcttattgataagccacatctccattttgaaaacaaaattaaagcaataggttgaaatgctgtgtaaagcgctgcccagcacagcacgttgcctgtctggcatttattgacagtggtgctgcggcgagataagcgttgtattcaaatacgtgacaagcgctggtcatgcatgtttggttgcgctgatcacgcaggtttggttgcactgatgcgtatctgtcagtccctgtgtgcattcaacatacaccgattcagtccctgcgaggtgccttctgatagctaaagatacaaggtgtggcattctgtattactctaatgttttggttttatttttaggctcaaatgcttagttttcacaataaaaaaaartttagttaggcctgaatgaagagcagatttctcatttctagatcccaggttaggtatgagggcttataccttgaaacgtcaatagctcctgtgtctgtctacactgtgtacaagttctcagtaataagcaagaaagtgaaacaaagctggtatggggaaaagcctaaagtattgagtcttcctttcttatattcctaagcccagttgataacaccagagaaaagtttcatgccttccctaagctaagccttctaggaaatggaacactgccgacactgtcccccttgtagaatcaagttgctcttttttttttttgagatggagttttactcttgtaacccaggctagagtgcaatggcgcgatctcggctcactgcaacctccgcctcccgggttcaagcgattctcctgcctcagcctcctgagtagctggaattacaggcacccgccaccatgcctggctaatttttgtactagacagagttctgccctattgctcttctaatattagtaaaagccttgcctttcatccctacttgtttctcttacgagagagaaaaatagatagactttcattgatcatcatctcattcctgtgtaatttcacatttcacattaggcaagttcacctgttggaataaaaagccattgcccactgggctgtctgaagtacatgggcacttgagtccttttctgtcccatcagacctttaattactaatttttactaattggttcatcgtcatttagcccaaatactccagctctgagttggtgaggcctccggtaggtcaccgcaggcattgtctgagattacaggtgagctagaaggaacccagagactttcttcactggcatgcgaatgagatcacagtgcacagcatggtcatcgctatgtgcacgcaggccctgaacgttataaatgcagagattattataatttgcaaaaattctgaactccccatgaccagcgtctgtgccttttatttctgaaatgttatggcaaccgcttaaaaaatctatactccataatctcatgctgcaaacctgtacattacacagtaaaaatccactcatctataactaagcacatacaacactctaaataaaattttacctatgyattcagctttcatcagtcagagacagcgcaataagcagactgytcaaatgctcaactgaccttaatgaaaaaatttcaggatagtttataggyttagtccagattaagctgtcctttctctacttctctagatctcaatacctccattaggaactaccagatcctcacccgagtgctctatcaaaatcgatttaattttgccctgtgctaagcatgtcgtatatcttatcatatttcatttctttacaattagtccattgatggtagttctgtgtttaacattaaaagtgatctgccggcagctctcagttctataggaacatgtttataaaaatcaaaccacctgtgaggtatgctgttayctaaataatccttgaaagaaaaaatagtcttccagataaagtggctttctgggctcgtcatgattttacctttggtgtctccccagtttcctggaattctatgttccagggaactagctgtgttctttcagtccctcttggccttaataattcttactggtccctgaagtctcagttcgaagccctttcagcacccctataagactggcttggttgcctgtcctgtttgagcccttagctctgcatccatatgttaatatccctgtatcctaatagtctgtttacttgtctgccaccctccagattcatgggrtgtccagagagggaacctttcctttgttcactgtgacattccccagaggccagccaagtgcctgccacttagtagatgctcaataaatattggcaagtaaatacatgagtgtgtgcatctgcactgaaatgtggtacatgcattggccaccttcactgaaattttctgtaaagaaagagttacacgaatattttcgtgctgatagtcagtggtgattgaatcaccatcatgcccaagtacagatgttaaagactgagctacagttttcccttcaaagtttaatgtcagaaaactacagttctcatgccaacactttctctaactagctatgtgatcatagttagattggctagcttttctgggcattaattttcaccaggaaagtaaacttcctgggaaagtaaaataagttctatttctattctttcctgttctatggatgtcattgaacataatggttaagccaactgtccatggtttaatgacatccacagaacagaacagaatagaacatcagccctctgcctacttaaaatgtgtktttatgaggcccatggtacctggaagactttgagtccctacacccatgccctcttggtgtaatttgatgtattacatgtggatttggctctgaaagtggaattggcctacaggccccaggccagaggtccccttggtttcttcgcgacctagagccaaacacttayttcacagtactcccaaatccccccagctgcaatcagccttttctgtagcatctgaaaagaaagtaaaataacatgtatgagcactatagagcaagggaaaaatgatataaacatagcatgaaaatatagtgacagttttctacagtttgtctcctgctttcagtgtgtatacaagacagatctgtttactttgtgatttgataaggtcacctttggtcttggttgaacgtggcttcgagttgcttacatcatagctagtgctcatctgtaatttaaaaataaaaaatgacactcacattgatacttttaaagttaatgttgcatttttattgctacagtacttattagggaatattgttgcttttgaatctgatctgaagataaattattcctgctcttaacattagtcttttgaatctgatcagatgatgaatctatgcttgcttagaagattagtctgctcaaggctaccatttatacacactttgcctttttgctttagatattttcaagacagctaaataaaccgttagtttaagaaaataagctgcctgtgcgaaagtcactgacaggtgttgtcggagacgtatgatcttgtgcttttgcttggctattaatgtccttgtggcttatggcagccctgggtataattcttctgcaagtggcagaaattccagtatgtagagctcacttaatgctctcacggtaccactgatcatcattgcctggggcctgcaatctctcagacccctcagtgactccctctggacgattgagatcatcttggtaaataggagggaggattgcggttaaagtcagcagtccggtcaaatgacatctatgtgaatgaaccagattactataggaagcaagctgctgaagagacagagatgtccagtggaagggtcttagagctttggagtgggtctttgtatgcttcctcctgcagcaaattcaactgaacattcattgaatgaatgtcttcatgccctgtgtgtaggtagagaaaggctgaggcaggacacagtggggcaacagatctgtgtacgagcgacacctcgctctggggagtgtgtgtctgtaaakggtgtgtgtgtgtgtgtgtgtgtgtgtgtgtgtgtgtgtgtttccctttatggaaacctgtgctgtcgttggcatatctgtcttgagcatcttctcacccatcctaatggtgaaatgccagaccttggcagggagctgagggagccttgtcttttagtagagattcctttgcttagtgctcagatgaagtctcagcatcacttagggaggacctggccctgcctggggtggagagtgacttgccctcccagcaaggggcgataagcttgggaagcaattcccgcagcaacccacctgttccagctctttctacccaccagggtagrtatgtgagtttcagagtagccagagtgcccttagccaaaagctcttgtatttgtattgttgttttttgttgttgtttagagagtctcctgctgtgttgcccaggctggagggcagtggtatgatcacagctcactgcaacctcaaactcctgggttcaggtgatcctcccacctcagcctctgagtagctggcatcacaggtttgcaccaccatgcccagctaatttttaaattttttgtagagaccgtatctcaccgtgttacccagacttgtctcaaactcctggtctcaagcgatcctccagcctcagccttccaaagtgctggaattataggcgtgagccactgtgcccggctacaaaaagattttagtaacacaaagattagacagtcatcaagccgggctggtatctctaccaacaatcccctgaattgaatgaaacaagagcatcctgttgtcatgtttggccccggactggagcctgctgtgacgcatctgtgtaccccagtgcacactgccccttctctaacctgcctttcttttcctgcaggatattgacggccaagcactcctgcttctgacccttccgacggtgcaggagtgcatggagctgaagctggggcctgccatcaagttatgccaccagatcgagagagtcaaagtggctttctacgcccagtaygccaactgagtctgccctcgggaggtggcccattattgctgggatgcggtgttggtaaaggtttccaggactgaaactttgattttccgggatatgttaaatggtacagccactaagtatcaccagaaaaccagaagcccaggatcttctgcctccgccagcctgtgagctgtttccatgttttcaaagcacagcagcagtcgcttctggggagtgccagttaaagtcatgcatcagaccctgccagacgtgggcctgcttcttggctcacccacgttttgcctttctcctgccccaaatcaggcagctcccttggagcagggtttcctcagatgaggactgcattctttgaaaacaaagaatgtcgccaaggaagaaacctcacgccatgctgtagtgtttcctgtaatcacacgagcacatttatatatgcagtttcccatggataggcgtgtgaccctggttgagtggcacctgcggtttcatcttggtggcaactcctttgcaatgcagctggcagcgacatccttataaaaacatgtgctaaagctctgtcctctgttagaggtgccttttaggaatacggggagtgaaggaaggccggcaggcatctccatgcaactagatggtttgtttgtttgtttgtttgtttgttgttcattttgttgtgttttttgagacagggtcttgctctgtcgcccaggttgtaatgcagtggcgcaatctcagctcactgcaacctctctctcccgggttcaagtgattctcctgcctcagcctcccaagtagctgggattacaggcacccaccaccatgcctggctaatttttgtatttttggtagagacagggtttcaccatgttggtcaggctagtcttgaactcccaacctcaagtgatctgcccgcctcggcctcccaacgtgctgggattacaggtgtgagccactacgccccggcccaactggatggtttttgattgaagcctagaacatctgtagagacaaactctacccagtcttttctagaccctcaactatctccagtgttgttgtttaatcgtagccggatcagggagtgagtcttttaggcaaatgttggattatatatcaaaggaaaagcttagtttcagagaggaggaagggaaagagatgtgagggaagcatttcatcaaccagctacgtcccccttagaaggatcactgcagcaggtcaccgagcaggagtccctctgagcgtcccttctgtctcgttctgccctagctggcagcatatgaaccaggcatgatgcagcaggagcagtgaatctggagtcagccacttggcaccctggtttcgctgagaacaaactctgagatcttgggtgacttctcatcactctggacctccattcctgtgaagtgacaggtgtggaccctgagggtgcggtggtgagcacactgtctcctgctggcattcaccccactcatgctggaaaggaagatccagatcgtacaaaaatgagaaaaagaaagaataagaagggtctggtcccagttctgactcggccattcttacagctctttctggctttgagtttgcttgtggaatttcctgggcagttgtgttaaatccgccaggtcacgtgcagacaaagctgtggctgcgagagttggctggcctcttggaccagaagccatctccatatcctcatgagcgattccatatctccactcagaccctgtggactacagtgttccgctgtggtggctgccaagatgccttcttaaacttatgcaaggaaaccaaaccctcccacagttcccaagcagacactggaagcagaggcttctcacccttcctgctttttcaccacaatcaccttgagctcgtcccttggactagagtctccacagttccagtaaaattctgcggtgggctgatgagctgcttgcatttctgtgacatttccagatatgattctcagtgggattttggaaactttgattgctcaagctcacccttcttaacattctgtaatggttacagatgagaatggaaaacacatattttatggatgaggcgttttggtctcccctgcagtcgatttctagaatcaagttttagagttcggctgatgcatctgcctggggacctcagatgggaggagtgtgtcagttgtaccccgacagaaatgtctctgggatctgtggctggcttgccccgggcatctctcctttaagctcaagttttgaactctctgcggttttccacccctgccttctcagccacatgcttttggccttaaacgctcagtcttgtggagttcaactctgtcaaacgattggaaagggcatccatttccagatctttggcattttccccgcgctgactctttgatgatccttcactgtggccttttcaagctcagctgttcctgttgtatttgagacgagggtgagggaatgtggtggccacaaaagaacagggacttgcagcacaaatgtcacttctgtctcccttttcagtggtagcacggaggaggaggtgctgcgttggagggaggggatcctccaggagctctctggagcccatctaggaagctagagtgtgtggcccgccaggagctcaggaaggatacagccactgtcgcaggggaaagtgtttgcttcccgtggagccaagcgcccaagactctccgtatccttcaccctgacagtttaacttcagcgtttctctgtgcagttgcggtcaccatgggtgagcactgtctgtgcacgtgccagggaggagatggctgggaccactgcacaggagggcgcagcctggcgtcgccatgaaagttgtctctgtgccatctctccggtccttgaggagagcccagaaagattttaggacccaggaggtgcttttcctccagctgttgccagtgtccttctgagcctggattctccggggatttccgtcgtggtggatggacttcacatcagcagcagttctggtacagaattgtaatgtgttttcatttctctgtaggattcacctctcaccagcgtctgtcttaaaggtagggccaatttcatggagcatttttctgtgtgtgtccttgttgcttttgccagaaaaagtggatttgacatgcgtgccccgatgccaccatagcccctaggccaacaatgtcatggtctaaacaccaaaaagtgatgccccgcattccttccctggatggtaccgtttcttctccgtctctctttgatgattctttgggaccaaagtcctctccttagtgcgcctacttcctgtgggcatcatgccacttggaacttattggaactggcccgggagactctgcagtctgcgccgtttgaaaaccctgagaaagagatgccacctcaacttgaatcatgacagcccatcgctcagtctcaccctaaactcatggagcttgtttcagctcctcacttcttgactgtatttgtactatgttgaaaaaatatcctgtccacaaagacataagcctaacaacctagaaaaacaacagggtactactggcattacagaacttctttgcctttcaaaacaaaagcaaaacacagtgaacttcaccacggagctgcacagcgtggggaactcatccatcactttcaaaattagagtcatttgatccaagttggagtcagacacagtatttgagctgcacggcttctgggttctcccaccttatttgatcatattcraaagattatttcctgtgtttgctttgatttgttcctcagtacattaaaatgatccacaccttgaacactgccctctctagaaggttgattttgatcagccttttgaagatgggtgtcgtttccctaacttatctcacagaattttgagtgttgtatttggcaagttctgagatttgccttctgtcttatgccaaacacccctttctaagagctgtccccgcttagttttagaagtactaggggttttcatacttattttatagaacacccatttatatttatttctgtatatagaactaaaaaaaacagtagtgttaaaaatctttgttgtggtttgagcatctttgctgcttttggattgagatggcgaatcaaggcttcacttcctctctcttctgtctttagaaagctgtgatcgtgcgtgcaattatttgaaaggcaacatagtcaattaagaaacctgtagttgttaaggaagaaattgttggcaagatatccatactgcccatatctcgttggtgcaataattaaatagcaaaggaaatctgtattggcaactattataattcaataattcttttgtttactgcccttttctgttcaagaattttctggaaattactccctttcacatggttgaactcttaagttgaccagttctcatagctctatcactagaatggtttgcagataccccaaacatactatgataaaatcaaattgtgctacttttgacccatgtaatttacctaaaagttgtaattgctgacagagtactgccttgaattttggtttaaaacctctctagtttcaatgacaagtaacaactcaaataattccatattgtttgaggaagaggccataatccttctgaattgttggcactaagtaatgggatttggcccagtaagtatgacggtcgtgtcgcctaaccaacgcagagcagtgctttttgtgtggctgaagcgatgtgctgacgaaaaaaggaaaattctaggacaatcgttggctaaaaatcaccttaggatgaaaaatttgaggcaaatttttttaaatgacagaaaaagataatcatctcacttgcttgaaacaggagccagcatgatctctggaagcatcaactatccctcgtcgtgattgttgaaagctctttcactgttttgcattctagtttgaatagtttgtattgaaattggattcctatcttgtgtatgtttttggtgcgtaaaagggaaaaattggtgtcattacttttgaaatttgcaggacgaagggcatgcttttggtttgctgtaagattgtattctgtatatatgttttcatgtaaataaatgaaaatctatatcagagttatattttaatttttattctaaatgaaaaaaaccctttttacttcaaaaaaattgtaagccacattgttaataaagtaaaaataaattctatggtggtgtttgggtctttgtgttgaaggtcattcaatattatctttagcgtctgcattagttattttgttctgaattttttgttttgtttttgccacacactaaagccttatttctaggttgttaacgaccacggctctcaaagtcctgtgtgacctctcagagtcacctcctagctccagaatggaactttctggtcgaggaacttgtgtttattctttttagttgttaaaacattctcgtgtatcctcacacaactacctctagccctcccactttcaatcatttccgttattctgggatttcctgatgccttagtagaaagactgctttattactatgagagcaataattaaataaccacatttacatttatcatttttctttaagtgtcacacataggttttaggcaatgaagttgggataggaagagagacctttgccatcctaccccatctctcggatctctcgcaggcagaacctgtccccttcctctgtcaccacaggttcaggtagcgtctcctagggacagggttaagggagaaggaaagcatctcctagggacagagttgagggagaagaggagaaaaagcactgaggtaacggaggtggaggagtgttgaacgatttctttttttcatacatcccagatgatttcaagtatcttgcttcaccttgttttttactttattgctttctttttagagacaggctctcgctctgtcaccccagagtgcagtggtgcagtcatttacttctctttaaatattatttttgctctgatggcaatcacattctacatatagaaatttttcttttgttttaattatggaaactttttttttgagacagggr

SEQ ID NO: 6830 - DNA, 101365 bp, Homo sapiens
  misc_feature (1)...(101365): n = A,T,C or G, or insertion/deletion polymorphism (see Tables 1-2)
tgatggccactcagaatttacacacatgtgtctcacgttttcccctggaatgattattctgggaaatgcttgacttgccaaattttccgtgaactgttctttctccaacttccgttcatttgattactaatttaactaatatttattaagggcctcccatgtgcccaacacagggtagccactggggatacaatgaggagagaaccccaaatgtggtccctgttccctgtgaaactcagtctgggggaagcaggtgttcatctgtgaatcacagagaatcaggagaaactcaacagcaaaaactgctgtgcaggggcccagagatggtacaacagcaggtggatttgacctggttgggaggccaggacaggcttggggaagagagaactaaaaggatgatgtctgagggtagcaggcattgactgggagaagagagagggttgggcattatgggcagagagaacagcctgttgtgcaaaggtgcctgcaaggagctaggctggagggttacccagtgtacgtgacctcagtgacttttcaccccaccttaactctgcttatctttagaaaacaggacatccgaggtcagaagttccccctcgtgactaagcagctaagactggtgggatccaagatgacagttcccttgacctctgaagaacctctaacttcattataatctaatttccaggctaaatgacactcttaccatcatgaccacagttgataatcaccatgccaatggctagaacaaaccacgaaaggacaaaaaggaaggtggcaactctggttcccagaagttctccgcccattcccagagaaggcatgaatattcctccccttgttttcaatgctcaacatctttattaaagatgccctgtatctgtgacttcccagcactcacaagctgagcagtgttgtgggaagtcaggaacccggaatggagggaccggctgaagccatggcagaagaacatggattgagaagatttcatggacatttattagttcccgaaattaatacttttataatttcttacgcctgtctttactgcaacctctgaacataaattgtgaagatttcatcgacacttatcacttccctaatcaatacccttgtgatttcctatgcctgtctttactttaatctcttaatcccatcatctttgtaaactgaggaggatgtatgtcgcctcaggaccctgtgatgattgcgttaactgcacgaattgttggtagagcatgtgtgtttaaacaatagaaaatctgggcaccttgaaaaaagaacaggatagcagcaatgttcagggaacaagagagataaccttaaactctgagcactggtgagccagatggaacagagccatatttctcttctttcaaaagcaaatgggagaaatatcgctgaattctttttctcagcaaggaacatccctgagaaagagaatgcgtccctgggggtaggcctctaamatggccgcttcggggggcagccgtcttttatggtcgaagctgtagggatgaaataagcctcagtctcccgtagcgctcccaggcttattaggaagaggaaattcccgcctaataaattttggtcataccagttgtctgctctcaaaacctgtctcctgataagatgttatcaatgacaacatgtgcccgaaacttcattagcgattttaattttgccccggtcctgtggtcctgtgatcttgccctgcctccatttgccttgtgatattctattaccttgtggagcacgtgatctctgtgactcacaccctattcatacactccctccctttttgaaaatcactaataaaaacttgctggttttgcggcttgtggggcatcatggaacctgctgacagttgattcgtgagccaagctcccacttctcaattccatggccattaaataaagcctgcactgcttgatgctcactctcagttttgcgtactgactttgtgacaccaaacggagaataatacctcatttttttgagaggaccagctttgtccgtaacagaggcaggaaggtgggcacagggagtctgatctttgttccaagaggaacagagcctttggaggtttaatagcagagagggccatgtgatgtctcaaacatctctgggtgtagttggaggagagattccggggcccggagaagagtggggttatctgttaggacaaacctacagcagtgtccacagagggctgctggtggcctgctgggagatggggttgcatttgaaatggaaagaagttactgtatttggaatatcctttggagtcaactccacaggacttggaggggattgatgtggtgggtgagagaggtgactagggtggtccagctgtctgacttcctaactggctatccagggtggatggtgatggctttcagtgagctagggtggaactcctcttctccagagcatttcagagccctactggtcacttgtcacaccatgggttggaagacaaggaccctcttcctgtgtttcagagtactcatctcctccaggtgtggataaaacaggtaaacacttagcacagcagctggttctcaacaaatgatagctgcctgctggaccccctgcctctgggtcactctcgtggagctgttggcctcttgctgcagagacctatcacaagctgacactcttacttccttgtgggggcatctgggactcctgctggggtggggatattttgtctcaaccttgaacctcctcatctttatcttggaagatggagcaagaggggaagagagctggcgctcagcagaggttgtgcttttctgaagccaggggaactggccctcctctaaactagctgtgtgaccagaggcaagtctgctttcctctccagacctcagtttacctaactataaaatggagtggggcacaggactggagattgcctctcaacccctctatctccaaatctctgcatttttgtttatgctcaaaggaacgtgggtggaggctgggaccaccttgctcctcagggtcaaatcctgggccgttgcccaagccccagcccactcattacatctgtttcaaactcttgccacagtcaccttttggggatagacacctccactttgtctttctggcctacctgtcacaggagccttccatgggctctagctagtccagccttttctcctcctgcctgggaggctcatggcaggccgccccctcctgcccatgctcgtgccattcccaaccaggaacactgcttcctctctgtctcccctgtggaagcctcagcttggatccacggcagtgaaatctccctctaagcttctccttcccagagtccccagagtccctggggtcccccctggcgaccttgcatgttcatttagagcacatttctctaccctttccttacctggttttcagactttctcttgcccatgtcaggtttctcaattgcttgctggcttcatgcagccaacacggactttctgcatccctctcccccagggccttagactgaaactgttgtgttgggtgttgggagaaacacctaagacattctctcctgcgcgaagactcaaggaagacactgggaaacccagaccttgacttcctaggagggtccccagcttacacctggggatttcttcctttggccccattcacctccaaatctggggccaccttgccctctccccaccttctggcccagactctgagctaggcccccatgtccccttttcctaacaaagccttcctcsrtggaagagagcttggacacacaatacttgccgataaaagcaaycattgtagccccagggaagggggcgggggtaaagaaacggggagaggttttgctctctgcttgccaaggctggctccagggaaggccgcagcccactccagcgaagcaggctgctggggccccagctgtgacctgctcctcttgacttgctttccttgaggcaggaacaagggggtggaatggagctggggcccctgagttttctaggggagtctttctgagatggccccacagcagaaaaggggcaatccttacgccatgactttttccttctgtcccgcagggttcccactctgcagcttggaaaactgagaccctgagaagggaagccattttatccagagatcatttggtgggcttgggtttgcagagggccagagctgtgaagctccagcctggtcatctcccagccttctctctctctctctctttctctctctctctctttctctctctctctctttctctctctctctttcctatctctctctctctttcctctctctctctctctctctctcacacacacacacacacacacacacacacaccctctaactttcttgctctgtcatccctcacacacagaatcctgtctggaccttgactttgcacatcatttttttttttttttgagacagggtattgctctgtcacccaggctgggtacagtggtgtgagctgaagctcagctcactgcagcttcagcctctcaggctaaagcaacccttccgcctcagcctcccaaagtgttgggactataggcgtgagccactgcacgcagccaacacacatcttaaaagaccagaaagaggagaaagaggaactctattcttcctgaatttaatatagatcaatttggttgtggcatttccaaataactggatgctctgatgtagcttggaatgcttggaatataatatactttagctttctgaacctgcttcttaaatgcactggtcctccaaaaccttggcatcatttccaagattctttattccatggttattacaaaaaaatctcctttccacaactcccacccctggattgcttgaaatatagtttatttgcaagttattagttacatatttacagagtaaagcaagagcatggatcttctgttgggttgtttgtactgactcctgacctggtctcaacaccattgcaagactagcatcaagtgctcatctctcagactcttggttctttccaccttgggatgccacagttgctactggtgtcagggatggaagtggagggcagttatcacttattgagcatctattatgtgctgtagttaacacccatttcacagataagacaactgaggctcagagctaggatttcaatcagggctgtctgactctgaagccagggctctctcctcaccggctcagccctgctcttggctaggacacaggtcagtcgtgcaccctgggctggagtctggaaaatgggtagatccaaggggtcgatggttagtgagggcatcaagaccatagtgaaagaaagagggagtctccctctaccgggaggttcactgtccaccacactcccaaatgcagccggacaccccttgggctcctggctctggaacagaaacagagagcaggccctgcggccaagaaagggggcggagcagccatagaaagcggctttgggccaccactccggggatcccaggcgtctgaggggacaatcggtccgtgcgccaggaacccctgctctgtctccgcgtggcacttccgatccccggccgcaggcagctgcactccccagccgcgcgccccgcccccgggcgcccggcgccccagctccgacccgcgcccggccccgccccgcccagtgtgcccacccccggcccgtcccgccgccccgtcgcccggctcccgcggagtcccggagcgtcactgcgcgggcgggctgaccgaccagccggcagttggcaccgggtgcgctggcgcgtcagtggccccgctctccagccggcagcctcgcgcgcccggagccagcggtccaggcggcggcgccgcgcaggggacccggagcaggcgggagggaagcagctaggcggggaggcggctgaggcggcagcggcggcagccagccggtgctccgacagcccggggcgcaccctagcctcgccgccctcagcctgggacttggggatcgggcgcttgcccagcccgcgtcccagcgcggccacatggctccactccgcgcgctgctgtcctacctgctgcctttgcactgtgcgctctgcgccgccgcgggcagccggaccccaggtgcgtgcgggttgggcgcgcgggggcccgtggggtccggggtgcacgcggtcagggtggcccaaggttgccccagccacccgggcagggttcccgcgggtgggaggcagtatgcacactctgggctgatttgctgtcttttcttccactgtgccacggcactgtcccgtgatttctctccctttctggtactagaagtagacagagaccccaggagagaatttgggagcatcgagtctcttctcgggagcagcgcatctgtctctttgtctctctgtgtttcttctttcccctcttccccaatctgtttctctgtcctgtgtgtctttctctttcaatgtcttttctgtctccaacttgtgtgagcatgggtgcaaggggtgtgtgtgtgtgtgtgtctgtgtgtggctgttacatacccagcataaggctaacaggtgattgcctcctacagcagagcatgcggggcactcacgctcctgcacagaaacacacatccttccactgcccccaacgtagcactgtcaaacgctgtggacacaggtctcttgcatacagaccagatacactccactcccgccctgcagcatggggtaccctcctggtggctctgaacatggggaggagtcaccggtcatttccaggcagggtccctccttgtttgtgagccttgttcatgtgccagagtgggtcccctcttgcagcagtcttaggggtcctctgctataatggggatgaaactagagctgtgggcatgggggattttcaggaaacaccactttctatgtttcatcagtgacgtgaactggggagacgagaggtagagctgtgtggaaatgaaaattcctcccaaactcgcattcatgaatcaccaggcctggaagccagggagctgtcattcctgcccagcctggctgggctcaaggagagctgcgtgaggatgggcctgctggcatgtggcctggagcatggggccatgacctcacagttaattcagcccaagtgggcaggtcaccccctgtatatccttttatttttgaagatctatatttatccagcttggggctcggccatacagagatctcagcggccactgtcctcctgtaaaaagttttctttctaaccttggaaaaatagagaaccgctcccctctgcagccccaccttctccttgacacgtgcccatggtcccctgggtttctaggtgtgtttgttttgccagctgcgttcttggaagyttggggaggagggcactaccccagcctgggctggtgacttcagcacactggggagtttgggcagatctgcccttccctttatttgccctgttggcttttggggaattttagtccttttctgggcagagcccaaggtcggaagtcttgttgctagtgaccgggctctgtctggtatcatttgctttcttctgctaagtttaaaaaggacctgggggctacagggagtgccacaaggtacccgaacacccttcatccaagtgtaggaatcctggagctcaggaagcaatggatggaaaatgggtgaactcaggctaagrggcccacctaagggtgacactgagagttcctatccctccctgcccgcgtgggatttctgacttccccttacctctgaaccgactgcattgaagtgactctttgtttacctccaacagagctgcacctctctggaaagctcagtgactatggtgtgacagtgccctgcagcacagactttcggggacgcttcctctcccacgtggtgtctggcccagcagcagcctctgcagggagcatggtagtggacacgccacccacactaccacgacactccagtcacctccgggtggctcgcagccctctgcacccaggagggaccctgtggcctggcagggtggggcgccactccctctacttcaatgtcactgttttcgggaaggaactgcacttgcgcctgcggcccaatcggaggttggtagtgccaggatcctcagtggagtggcaggaggattttcgggagctgttccggcagcccttacggcaggagtgtgtgtacactggaggtgtcactggaatgcctggggcagctgttgccatcagcaactgtgacggattggtaagggatgagactttcattaagctgcatcctccccctcccatgccctgctcacatggttttgagattgctatgggcatgttttgcagtctgggccaaggcaggggtggtgctgccttccagagggagtgccgcctgcccccgcgggccactaggttcatgcgctgccaggtgtgaagtggccaagttgggatgatgttcacccctcgccttccatggacccagctggatcacaagctgtttggctggtgtttctgagtgcagagagacactggggttggaagtgtggctgagccactgcctagctgtgaggatttggatgagttaacctctytgtggttctttcccttatttattttgcacatatttactgttctagatgctgggggtacagtggtgcctgagacagacgtggcttctgctctcctggagctgacccgcgagtgttaatgatatggcctgcctaactgggcagtgcactgggggctgtccctgcctggctcgtggcgtgggcacagttagcggctgctattatgtcttgtaacattgcgacgtcgtgtccttcctcttctcctccctgtctctcctcccagagccagcctgctctttccgggctgctctgtgtgtccctttcctaggacccccactgcttccgcaatgcttcccagagtctgggagcgcctctgctagttggctccacattgcaaaccagaaagccatggggtgggctgtctttctcgcccccacctggggttggctctcattcccctcgctgctcctcctcagtgtgcaggcccttgtgagctggcacagcagcctcaaggtcctgttgggcagctcttccctgccccagagacatcagatgtgagctgatgggtctcaagaaggggcccgcttgctcctctgcccttcagctttgagagcgagaaaatttgagatggggaggggttgtgggttccttcctcactggcagggtggggagcatttgtcaccattgtctcatgtgtaggagatgtcttatctgctgatttcgtggctgcctctgtctaggccagtgctttccaccttttatcatgatgtacccctaaatgttttagacatttcctcccaatcatcagtcyaccccacgatgaggtttttttttttttttagaggtggattttcactatgttgcccaggctggagtgcagtggctattcacaggcacaaacacagggcactgcagcctcgaactcctggcctccagccatccttctgcctccgcatcccaggagctggggctataggtgcttgtcactgtgcctggctttcctcatgcaattttaataccacagatatactgaatatctgtttatacactgaatatccatctgtgttttatatattcaaaggtgtaatatttttgccttccccagaataaattttcatcccattgaaggtggtagggccctcatggagagggcttatctacatggtagttggttctcatagttgagcatgcactagaatcacctgagcaccttgtcaggtgcgcagaatctgcctctcaggggagggaccaggatctgatcattaccaaactctgcaggtgaactgattcaagagttcctgagagcggacttcgagaaagcagattgtcagggcagctgggggagcctaaggccttgtcaggtgtctgggctgagcctctgccgccagcccactctggctctgcggctctgtgccacaggggcccttggtcaccccgctggctagagctatgccatggccacaagttttggtggaaaatcccaagtgatgttaggaatcatccagggatacagtatccatgcaggtagagagaaagtgctggtgcaagccagcagctgaactgaattagatggtgaattccttctaaagtcatcacacaggtaggctgtaagctcctcagtgacagggctagggctccagcttctctgactgccctcctggagcgagacacagaggagatgctcaatatatggtgagaacctaaactgaggatgaccgtcgctaataataagtgactccccaccccctttgcatcctgaaaacctcccttgtcattgaaccagctcagcagcccattgacaagtagtgactgaccactaggtgccacagggaccagggagggccctgaaggaccctgagctagcactcctgaagcacgatcacatggctacrtggtgtagcatatatggtgacaagtcttcatgctctggttttgggggctggcggatggtggaggtggggctgttcagtgggcctggggctggggattcctcagagggtgttgctgatttttggtggcctctgagtaaatgttctcattagctgtgtgaccttgggcaagtcaccccctccccatttctgagctttactcttctcatttgtccaaagagggactatacttgatattccctggaagatgggaatcgattctgtgtggcatttgctgaagccggatcgggtctcagaggctgtccaggtacaggcttctggaggcttgctgggtagctggtatagaactgaggctctaggaagtgacttgcctgggtccccctccccttggtgaggggcagaaatggacttcactgggctgagcttcaggctggaccacaacatgtaccctggctgtttccagaggccagtcctgaagtccagtatctggacgcctcccctccaggccctgggagtggtactccctgactgccttccactggggccgccggcacagaggtcaccccaggctgggattccttgactttccgcccactccaggaaatggccctgtgtcccgtgacagcaaggggctgtgtcccagtgacccagctgagctcacctttggactcaaaggccacggtgtagcatttctgataagattgaactctgcatctttacatggtctctggattttaatcccatattctctaacatctcaaatgccaaagtcattcatttcaaaaaatttgtactgagtgctgaccatggacaaggtccacaggagatcataaagaaaatgaaagtgacacagataatgacagcaacagtaacgggttcttcctgtggcccagacacagcatgcatatgtgtatgtgcttttattaactccatccatttgcagatgaggaaactgagtcataggcggagatacgaagataatacagatagcttccattagtacaggaytttatagtttacaaagctcttttgcttccttcaatcttctgaagtgtgtatgcagatattgttattactcctgctttgcagagagtcaggtccctgtcctcgaggaacttgggtgccatgcagggggaaacccaccagtagtttcagcattcacttggttttctagaacacagtggggatgggtgctcagtaaatgggagtgattgttttctttgatgtcagagaaggtgacatttgaactgggccttgaaggatgagtagaagtttgctggggtcagggggtggggagggccttctgggcagggggaagagcttgagcaggctagtgatggttgggcagaggaaggagcaccatgtcaggtggggctggggagtggaccctagaagacacgcggggcaggggggcttggtctgaccttgaaggaagggcaggatggaagaaggggtgtggggcagggatggggtaggttgctctcttgaagaggctgggctgggagttgagagataatggctgcgtgactctgagcaagctggccccttctctgggcctcagttgcctcctgggtgcattaaggaagctgggatgtgtaagctcagaccccttccagctctggcattggtgctttgtggcatggggctgaccttgttggagtttggagccaggcccctgtaaacctgtagttgatggctccctcctacattgtggttaattcatgcctaacactggggtatgggatactttgtcttacttcccacccactgttatggagggccttctgggtgtcctagctgtgggaggggaaagagaaagatccaggaatgaaaaagcagggcccttgccctggaggggtttgtaggctagtggggacccagacataaaagcaaacttgagaatctagtgagaggcagcaggagaaggacctgtttagtttggttagggcatctaggaaggttccctggaggaggtagcaattgctcaagactgttcagacattataaacatgaaagatagtgccaggcccctgaccagcagaaagaatgactgacccagccagtcttgaggatgtccaggggcaggaaataagggatgtgggggcggggcctggtcctgcctgcaaagtgcttcctctggggttgtgggcagctagcctgggatgctgttagacctgagagtcccagactgggaatgtgtccagtgacctgacgggccactcttcagagccactaacactctgcacctgggaggaacatggggtggggatcagttctttgcggatcctggagaagttgtggcgtgcaaggttggggtcggcagagtggggtccctgcttctcagtggggctgcatgctcactgtgcccatctagaatccaggccaccagcctcctgaagggttgcttctcctacggccatctctgcctccccaggccctggggcctgatgccctgcgacggggtgacgggagcttggctgcaccgtgtttccccctttgccttcagtgcctctgtgagtcagggcctggcgcggaagcagccacacgtgtaagatttgtcaccatctggttctgttttccactctctgcagatcttgcatttttgatgggttatactgagtagaccctggcagacggctttgggaggggcaggggaggctgcatcccagcccagctgctcaccactgaacaagtcacagaagctccttcggcacctccctgttgtctttaaaatgggactacagtgtggggtggggcggggggagttgagaacttcagggtaagggccttctttatgggaggctgaaaatattttaaaattgtggcagtggttacacaattctgagaatatactaaaaacaattacaatatgcactttaagtgggtgaattatatggtatgttatatctcaataaacctgttactggctgggcgcggtggctcatgcctgtaatcccagcactttgggaggctgaggcaggtggatcacctgaggtggggagtttgagaccagcctggccaacatggagaaaccccgcctccactaaaaatacaaaattagccggtcatggtggggatgcctgtaatcccagctactcaggaggttgaggcaggagaatcgcatcgcttgaacccgggaggtggaggttgcagtgagccaagattgcaccactgcactccagcctaggcaacaagagcgaaactgtctcaaaaaataaataaataaaaaaaataaaataaacctgttactaaaagcacctggcctatggaagggccccacgaaaggtggtgttcgtaattccaaggaaatagtctagtttgggggaaagagcaggatgtgctcactccagcacagatcagctgtgggaccttgagcgagtgtcttcatctccctatgcttagattcctcatctgtaggaagggcagaggaacagttgtctatggggttgttcagaggattaaatgagataaggcaaagtgtagggcatggtttatggcagggccttaaaaatggataaaagtctgcaacctccgcctcctgggttcaagtgattctcctgtctcagcctcctgagcatctgggactacaggcgtgcaccaccatgcccagctgatttttgtatttttagtagagtcagagtttcaccatgttggccacactggtctcaaaatcctgacctcagcctcagctgatccacctgcctctgcctcccaaagtgctgggattacaggcaccgcacccggccaatcgtgattactttttaacagtgattattaataatgataaatattacaaatatcatcagagtccctttattgcaatgatatatagatcattggcattatctgactggcccttggccaagtcctggggatgcagggatgaagctcagccctctgcccctgtattccagaagcccacggtttaaaggggaggctgaactgcacagtagacagtaaaaagcaacacagaccatactaagcttcagtgatttgtgggaatacagggaagcataatgcatgccaggggtggcttggaggtgagtactgagaaggaggggtgctcagggaaggcttccagggtaggggacatttgggctgggttttaaaggatcagtaggggttttcaaagccacggagtgagaattgtagtcattctgtagggaaggaaatcctgtgtctctgcaagattcaggaaatggcaggtcatttcagctctccgtgggagagggagaatggtgaaaatgtaattggaaaatgtcaacctcaccatggagcttggccttacccctggcatcatggggagccatggaggtttgtaaacaggagtcacattagtgtttgagaaagacactcatccttccagctcgatgctggtgcacagcagacttgtctgtggctttttggtctcctgtgccaaacacctgtccttgccccgggggctgctcttgactggctggatgagtgagtaggcgtcctgtgggcgccctgggaagctgcgggtcggctccacattccaccctgctttggaggtgtggagtgtggaggcttggagtctcactgtgacctaccccctcccagacacccagctggcttgtccccttacatcttgacctgcaggcctcctgccctcacacatgtgtgcctagagaccctgggaggggcagggggcaccagagccctgtgtgtggccccacattggtgcagaccttgctgccttgctgacctgcctctctagccttatgggctccagctcacagatggctgtccccgcccctgccctgtccaggctggcctgctctcgcctcacttttcagccccttcccttggctgtgctgttcacaccttccctgtcccctcacttgatgtatgtcccatttcaactaccagttcctagaaatcagagactgtcttaaatgtgtgcatttcctggagcattgagcataagtctgggcccctgggttggaggggcaggaggtggaaatttcagatgcaccaggagtaagcaggtaacagaagaaagagaagaggaccgggtagtcatagggggtgggattatggcaaaagggagaggacttgcccactccagtgtcactctggtattataagaggtttgagtattgtaggagaaatgggaaatatggatttttaggtaattcttaagccattgtatgaaccaaacccagcaaggctgttagctggaggccttgggttgcttgtgagctcagcagcatgtgctggggggtgagtgtgaccctggaaccagcccgcctgggctgaaatcccagctctgcctgttacatgccatgaccctgagcagttagctcacctctgtgtggttcggttttctcatctggaaagtggggatcataatagtaatcacttcatacagttgtcatgtgtgtaaagggtttagtgcagtccccagtacactcagctgttgctattacatggtgtggattactggttggttgagtctaccaggtctgaggggatggtggcaggaaagaagtcaagagcaccccatttttctggctgccactcccagaggggtctctgggttttcagtggggcacacagagcccgtgttggccttggaccccctcaggcccgttagttttctcggggtgcaccttgcttctccttcagtttgctgctggccctgaacattcccacctgtagttcccagaggtgcagggcagagtgtggtcacctatgtgtcctcatgacccagcactgggcctgccggacaaccgtctgggtgaggaggcataaactcctgtagttagatgaggggacagcatttgtcgtcctctccgtggctatctggccatctgctcctaggccagaggtggtgactgctgaggcacgcacactgccatttgccctcctgcgccctggcaggccctgcaggcccgctgtggcacgctgtccctgggcctcagacccccctgcatgtgctcacgtagtcactctccgtgggccgagtgggcgtgtaggggaaacccgtttacctccccgccctcagcactcccttcgtgagcaagtttctgtcttcagggtgcacaccctctctgagagtgggagctggtttctcatgtttgccacttagataacccggtttcctgggaaatactgggtacctctcggcaatctgtgtttgcagcacacgaaacaagaaagggagtctttggaaagaaagggggcttctcctgacccgcctgccagggtgactgtgggtcttcagtgtggaaagaggaagtcactgcttcgtgattggggcaatgtgagggcctggaggacacagaggggctgtggtctgcatgggagtgtcttgatcccagccaaattccaggaggtgggcagcacaggctctcctggggaaataggcagggtgggaaactgagtgactatcagttatcattcttgtgtaacaaatcagtctaaaacttggaactgaaaacaacattgtgtccttcctcacaactctgtgggtgggctggctggttcctcccctgcctgctccagcctgctcacgtggctgtgctccgctgaagggtgggctgggctggaaggcccaagctggcttcttttacatgaccagcatggtgctggctgtaggccgcgcggcctcagttctctctgtggccagttatcctccagtaggccgtctcagggtagcactccaacagggggaaggtggaagctagaataccccttgaggcctagccttgggagttgcatgtattagttcattcttgcactgctataaaaaaataactgaggctgggtaatttagaaagaaaaaaggtttaatcagctcacagttctgcaggttgtacaggaagcatagcggcttccactactggggaggcctgaggaaacttccaatcatggcagaaggcaaaggggagtgaggtatctcgcatggcgggagcaggagcaagatagagagcaggggaggggggtgctacacacttttaaacaaccagatctcattcactgtcacggtaacagtgccaagaagatagtgctaaaccattcatgggaaaccgactctgtgattcaatcacctcctagcaggccccacctctaacattagggattacaatttgaaatgagatttggtggggacacagatccaaaccatatcatggcataagatcacttctgcaccttctgctggtcaacgcaggccataaagctggacaaaattttccaagagtggggaaatggactcttccatttgagggaaggagtggtaaagtctcattgtaaagagatggtgcacagaaacaagaggacaagttgcagccatctttgcaaatattcttccacattgcccctaggcaagtgatttgacgtctctgagcctcagtttatgtatctgtaaagtgggtgtccctaccttgtagttttgtgggttagaaattatgcacttaaagtgctgccacagtgcctggagaaataaaagttagcatttcttcttcttcctgctgatgtcttagaataaataaggaaactgaggcaggatccacagcaggtttgtctccagctctctgggcgcccatgccagggctcttccccctgctttccagaggccccctcctgtctgggccgctgtctgtctgagcagaggccccgggcctgggtcctgggtcctgggtcctgggtcctgggtggttttccagtcctccagccagtctgatcttgcagttttacctcccttgtctcctcatgaccatgcttcactgtctgccctggattaataacttatttatgatatggaataaaagccagacatcacctcactgcggctcctccggagcagagccggcctcccattccagcaagggctggttttatttttcttcctctgtgtcttcaggcactggctggagggagggcggcctgagggctgcttagcaggctggtgagagtgatgggggctgtgcttgtctctccatgtgccttccagccccagggtggtacaggcccagggtgggctctcagtgagggcccaggagattccacattcccaggcactgcagtggaaagttcccaaaccatccaccaggcccagcattccattttcagcatgtgggtcttgccctgctttcaaagccctaaaaacaacaacagtgataatatttacatgctgcttcatccttagcagcaccaaggagctccctgtcaacataagctcaggcacctgcagatacccttgtgttatgaaaacctgcatggatcccagctcagcgtactttccaccattcgccctgactttggcctgagttggagacagctgtggctggaaaaggctttggggccctctagctccctcttcattttccagtagaggaagccgaggctcaagttggggaggagatccagggtcatggaatagcaggtgagtgtcaggtgycagggcacgcaaggaccaaggttcctgactcccaggcaatgttcctctcgcagttccaggcagcctctcctgtcagtggaaaggccaagcgtatgtgaacagaaactcaaggtcgtaaactgtgtgctgtcccgtgatatggtagctgtggcaacagcttcagaatgattaatgctaaaagtgattggtctaatggtggtgggaggtgaaggggcctgggggtactgagtagaggtgtttatgaggctcccactrtgagggggagggctgcttaacttctgcgtgtcattgtcttctctgaaactgggaggccaactaagaaaaacagatgtcaatggcccagttagtgggatttgatgctcaaacggaaccttctggtgtttctcagactcaagtcaccagtgctgctgttttatccattttcaaaatattggagagggagagggctgctgttatgtacacattacttgtcatggaacattgaaaaaccctgcagtctaattttcttctgctttcagtagcatggctgatggggcagtagaacaggcccctttttagagaaatgtctggaggtgagatcgtttgttaggaccaagttggtctgaatgcaaactctgttcccaacgggtggctgaaggcctttgtcagcctttgctttttttttttttttttaatttatttttttattgataattcttgggtgtttctcacagagggggatttggcagggtcatgggacaatagtggagggaaggtcagcagataaacaagtgaacaaaggtctctggttttcctaggcagaggaccctgcggccttccgcagtgtttgtgtccctgattacttgagattagggattggtgatgactcttaacgagcatgctgccttcaagcatctgtttaacaaagcacatcttgcaccgcccttaatccatttaaccctgagtggacacagcacatgtttcagagagcacagggttgggggtaaggtcacagatcaacaggatcccaagacagaggaatttttccttagtgcagcaacaaaatgaaaannnnnnnnnnnnnnnnnnnnnnnnnnnnnnnnnnnnnnnnnnnnnnnnnnnnnnnnnnnnnnnnnnnnnnnnnnnnnnnnnnnnnnnnnnnnnnnnnnnnnnnnnnnnnnnnnnnnnnnnnnnnnnnnnnnnnnnnnnnnnnnnnnnnnnnnnnnnnnnnnnnnnnnnnnnnnnnnnnnnnnnnnnnnnnnnnnnnnnnnnnnnnnnnnnnnnnnnnnnnnnnnnnnnnnnnnnnnnnnnnnnnnnnnnnnnnnnnnnnnnnnnnnnnnnnnnnnnnnnnnnnnnnnnnnnnnnnnnnnnnnnnnnnnnnnnnnnnnnnnnnnnnnnnnnnnnnnnnnnnnnnnnnnnnnnnnnnnnnnnnnnnnnnnnnnnnnnnnnnnnnnnnnnnnnnnnnnnnnnnnnnnnnnnnnnnnnnnnnnnnnnnnnnnnnnnnnnnnnnnnnnnnnnnnnnnnnnnnnnnnnnnnnnnnnnnnnnnnnnnnnnnnnnnnnnnnnnnnnnnnnnnnnnnnnnnnnnnnnnnnnnnnnnnnnnnnnnnnnnnnnnnnnnnnnnnnnnnnnnnnnnnnnnnnnnnnnnnnnnnnnnnnnnnnnnnnnnnnnnnnnnnnnnnnnnnnnnnnnnnnnnnnnnnnnnnnnnnnnnnnnnnnnnnnnnnnnnnnnnnnnnnnnnnnnnnnnnnnnnnnnnnnnnnnnnnnnnnnnnnnnnnnnnnnnnnnnnnnnnnnnnnnnnnnnnnnnnnnnnnnnnnnnnnnnnnnnnnnnnnnnnnnnnnnnnnnnnnnnnnnnnnnnnnnnnnnnnnnnnnnnnnnnnnnnnnnnnnnnnnnnnnnnnnnnnnnnnnnnnnnnnnnnnnnnnnnnnnnnnnnnnnnnnnnnnnnnnnnnnnnnnnnnnnnnnnnnnnnnnnnnnnnnnnnnnnnnnnnnnnnnnnnnnnnnnnnnnnnnnnnnnnnnnnnnnnnnnnnnnnnnnnnnnnnnnnnnnnnnnnnnnnnnnnnnnnnnnnnnnnnnnnnnnnnnnnnnnnnnnnnnnnnnnnnnnnnnnnnnnnnnnnnnnnnnnnnnnnnnnnnnnnnnnnnnnnnnnnnnnnnnnnnnnnnnnnnnnnnnnnnnnnnnnnnnnnnnnnnnnnnnnnnnnnnnnnnnnnnnnnnnnnnnnnnnnnnnnnnnnnnnnnnnnnnnnnnnnnnnnnnnnnnnnnnnnnnnnnnnnnnnnnnnnnnnnnnnnnnnnnnnnnnnnnnnnnnnnnnnnnnnnnnnnnnnnnnnnnnnnnnnnnnnnnnnnnnnggatatcgcgtctcacgctctcttgtgatcattcgtcgtatcgtctgtctcataaccacacgcgtgatatatcatgaggcgtcgtcatatgtcgtttagctgacgttactactcgagttctcatctgttctcgctctgtgttttctagatagtaggtacttatatctgtatcatatacgatacaattatctcttgcatacattcattcaagcgtatgtatgatcgagttattataacgcgtgtagtgtgtctatttgcgaatgcaacaatattcgtactgtctattaatattctcgcactctatgccgactctttgatgtacaccacatctatattcatgatagtcaccaaagagaataaggtgtgtataggtctaccctattcttcgagatccaatataagtctatacgtatatataatgcctgtggaaatagcgaaaccatatctagtacaaaactgattatatctcattgttataaaactagtaaattatttcattctaatttcatatgtattgatgttgtttataagaaaagtggtgctcttttctcaatttttcaataaaaatagtttggacatacaattcttattgagaacttctataacataatatatttcctttaagagctgtaattagtttctaatatttctgacgtatattattttattacgctatggactacgtaattgaatggacaggtagagcctttgcttttaagccagccacatatttacacctttggtctgtccagaaacagcctgccactttcccctccaagccactcccgtcccccaggcagaggttcacatccaccccttgaggctggcaggggcccacactctatgagttagctcctccagcctgaagaggcctgtgttccacagcctggccgactgctggcctgggtgcatcgtgcctttgaggctttgtcacttcaaaattcatagtccccgcgtagggagatgctaggtaaaatatgccgtcccctaatccacggccacagttttggggaagcggatctctcacaagggtggtatacccaagggagtttgttttaaggcctgacccgaaggatgcttgtttagcatggtttcattccaaagtcagttgtgcagcaccaaccagttcatccccctgaagctcacgtctagaagaaggacagagatacctggacagggatagagcacctgccaagagccaccaccacagagcacaaaggagggagcagtgatggggtggccttcgagctgggtgraaggggcattcctagtggggtgcacagcaggggcgaaggcgcggaggcccatgggaactgtggctctggtacagaacgggtcctgtgtggctccattgtggggatttttgttgcyggtaattctaaaagggaaaccaacacagcataataagaataaccagcactggggtggtgtgagccacctcctgtctctcccagatgatgrcattcgccttcctgcgctcccttgcccctgcagtgtattcgccaacagcagcctgggcagtcctgttacaatccgagtcctccatggttcgcggcattcctcccagagaagccagccaggccctgggccgccatcgctcctcctcactgccctccctgaagggaacrttcctccccagggactgccagggcctgcccctcagacccctcaggctttcactcaaatgtcaccttcagagcgacgtcctccctggcaaccttattcacaatttccagctccagtcctctcttctccatggctccttccatttggtatgtcacatatttctagttatttatcgcctgtcaccaccctgctgtagaatgttagctccgtgcaaagagtaatttttggctgtgtctccagcacctagatcaggggcttctcagtcatcatctgatgaatgaatgagtgaatatgtgctattgcaggcaagggtttaggagaagcaagttacagagacataggtgaacatgtgaagggagggggtctggagagggggtctggtggctgcagtgtgggcatttgtgctgctagtgcctggcaggtgaactgtaagagtgtggccaaatctggaacctgtgctagtggtgctggtccctgggcagggttaaggacaggaccatgccacctgtctggggtcttctggccaattgtgtttcatctgctccttccaccctttgcagaggagactggccagtgatacctggagggtcattgtgtcatcaggagccacttgtggggctagagctagcctggcattctcccatgcttacctgcattctggagggaacttgtctcttggccactgccaagtccctcatcggcagctcactacagacctggctatgcatcagatgcagtgataaacatttatgtgcgtgatctcacgtgggaggcatggtttaaaactagtcagcgacccactgggccaggctgctgtagggctcattcggaggggaggcctggctgggacagtgacctgtggggccctctcttgggcctgttctccactgccaagggtgcagcaccttgcccagtgctgctcactgtcagctggtgtgcgtctgagtggcagcgttcaaactgcagggcctccacgcagggtgccgctcctccgctcagggcctggcagccacaccgcctgctggcacttgagggctgcttcctgtctcttcatcctggagccatggctgcttccaggactcagggccaagcaggggccaggcagagctccttcgccgagcttggtgggctatgatggtgacagagggggaagcctcagagccgcttggctcctgggcactcgggaatggaatctgagggtggctgctggcctggcaagatctgccctgagtctggctgggctccagagtgaggggtttgcagcagaaggcagtctctgagcacctacaggtcctgcctctgggccaggacatctgcctgttggcggggaaggggagtagaaataaaaagtgaccacccctcctttaagaacttcaagcttttggctgggcacggtggctcacacctgtaatcctagcactttgggaggccaaggcagggcctcccttgaggtcaggggttcaagaccagcctggccaacatggtgaatccccgtgtctactaaaaatacaaaaattagctgggtgtggatgcacacctgtagtcccagctactcgggaaactgaggygggagaatcgcttgaacctgggaggcagaggttgcagtgagcagagatcgtgccactgcactccagcctggggacagagtgagaccctgttaaaaaaaaaaaamaraaaaaaaacaaagaaaaaaacaaaacttcaagcttttgatgatctgagcagctctgttctccaaggtgctggaggacagccagtcatcaccttcatcatcaacattagcacagagggactcctaataattgtcctcactctctgcactatggacccccagcttggatggctgtgagggcattgactggtccttggccactcagcagatcacagctgctccctctacctcccaggcttcccccacgctggatcacttgtggtctagatggcccttggtcatgaagtaagaggcgtgcggtaacccagccagctggactccctctgtcccctctcagggaacgtacttattgtatgctcgtttcctctcttacttgcccatttctggtgttatgatgaacacacctgtgctgctattgctctctttatgaaacatggatgaccacttaaatgtcccttttcgtgccattctaaatgtccctcttcttgccattccactgtttgaaagcctccagggtttggrtgagtggttctgagccctggatgcacgtctgaatcacccagcagcttccagaatgcactgactcctgagccccacccatcaggttttgatttcatcggtctgggaggtcgccgtagttttgtaaattcctccaggtgattttaatgactatctaggggtaagaatggctgctgttgcctcctggaaagcctactgtgtgtcaggtcagtagctggggtcaggtctttcagaccagaagagccaggcggaggagggaagtaaaggaaaagaccaccacctgctgtgaacccggctccaggagggccatttcccatgccttatttcatcttcccatccactctttggtttcagatatggaatctgaggctgagagagggctggtgccgcacagctgggaaggaccctgctgggatggaaccccaggtgtttccctccccagcgaagcctctacactactttgcagggaagttgaatgacagaaaaggagagatacattatgtttgcttccctttttgtaaactttgtttagggaatgggagttgattctgtgttcattgtggtaggcacacactctgtgccgaaaaggtgtgccttttgagataaggacatcatagaaaagttagaaaatacctaaaagtttaaagagaaagaaattgcctacagtcttattgcctaaagacaagtccctaacagctgcgtatgtttctgcccagctgtttgtctgcaggtctttttcacctttaaaatcatcctctatcagtccccttttggggggtaaggacttttccccttaggatgttcaacyactggtattctttttttttcttgaggacttctttccacttacaggcaggacatctgggcatgtgtggtagtccatttttatgttgctataaggaaatatctggggctgggcaatttataaagaagaattttagttggctcatgattctgcaggctgtaccagcatggctccagcacctgcttctggtgagagcctcaggaagtttgcaatcatggtgggaaggaagaggagctggcatgccacatggtgacattgggagcaaaagagatgggggaggtgccacacactttaagcaactagattttgtgtgaactgagtgagaactcacttaccaccaaggagatmgtgctaaaccattcatgagggatctgcccccatgatccaatcacctcccaccattccccgcctctaacactggacatcacatttcaacatgagatttggaggggataaacatccaaactctatcagcatgtcaaagacaggccatagcagagccaggggctacaagcaaaccctcctgtggttccagaatgtcacccccagcactgatcctgcgggctcccctcctgagccactggggcttccatgcatgcttcaaagtgacaatggtgatcatgagaatcacggccgcagatgcaaacactaatatggcccttgtggcatgctcgggaccatcctaggtgccttatgtatattgctttctcagagcagccctacaagatggttgtggttataatcctgaagcamaatgatgttaagtaagtgtcccaagattacatgatctgagagtggtggagccagcatttgaactcaggaactctctggctctagggtctctgcatttacccaccacattgcttctccactgagaaagacttttgctgtaaatgcactgggctcagcaagacctcagtagcctttcacccagcatcttccagggtgtggggcctgcagaggtcatgaccttgggaactgtggcygagtggtcatcccagataactctctccagctggcagaggctctctgcttcctggtgtttctttgaacctttggcttgttgtggcagcgctgatggtgctggtatggggtgccgtgcagatgtacgtggcagagcgtgccagttgtggacaagtctggcagctttcagccccatcctccaagagctccttcttcctgcctgtccccaaggctgcagctcggtctgaatcagctttcagactttttttggcttgggccgaagacttggcagccccagcctccagcagagctcctgtggcttggggcttccacatcaggtttgaattagatgaaatctcagcgtcggcaggctttcatcccagcctcgctgactcccgcttccgtggtagcaggcagtctgtgtgccacatgcgtgtcgtctctgcatgagtgtttgctggagcgtttgtcgtctgtgtgagtcgtccctttgtgtgtcctctccgtgcttgtgtattatctctttgcatgtttctygtctccatgcatgcatattatctttttaattaatagctttattgagatataattcacataccacgcaattcgcccatttaaaatatgcaattcagtggttttaaaaattatattcacagagatctgcaatcaccactgctgtcaactgtagaccattttcatcacctaaaaaagagactatgtggcctttagctattcacccccgatccaacattaccccagcccttggcagtgacgaatctactttctatctctgtggatttgcctattctatttgtttgaagacacttcatacaaacagaatcatgtaatatgtgaccttttgcatctggcttctttcacttggcatattttcaagattcatccatcwtgtagcatttaccagtacttcattcctttctacggcaaaataatatttcattgtatggctatatatatatagtttgtttgtccatttatccattgatgggcatttggcttgtttccatcttttgagtactaggaataatgctatgaacaacttttctttgcgtggacatatgttttctttctcttgggtgcttacactttggaaggggaattgctggatcatgtggtaatgctgttaatcattggaggagtattgccagaccgttttcaaagtggctgcgctgttttacattcccaccaatgtatgagggttccagtttctccacatccttgccaaccaacactggttatctgactttctgattcaagccatcctatttctttgtggtttggatttgcatttccctgatgactgatgatattgaacatcttttcatgtgcttactgctatttgtagatctttcttggagaaacgtctgttcagatccctttcccactttaaaactgggttgtcttttaatgattgtgttgtaagagttctttatatattccagatacaagtcccttatcaggagaggagaggccggtctctcatgtctttttgcacccccaccttacccccatcaagcttagcaagctgtatgtgattcataaagacttaaggacatgttaagggaggaagagatctgggtcactttgaagagtccctgcaggagccatggttccagggtgtgggggtgtgaggggtggggctgcctctcttacctgccgtgaatcagagacaacagccccggatggcccattagaggttctggcccctgcaggttatgtagggtgttgctttcagctgaactgactgatggaaccaccagggttgggggacttgaaaagacctagatcactgagcctgtccctcctccttgattttggggtagagcaactgggaaaaaggcagtgtcatttactgagatggggaagacaaggggaggagtgggtctggaagtcaaacccagagttctgttccaaagtttgagatgaccagtggagatccagtctctatcaaggaggctgttggataatcacaaaggaatttcaggaggarccagggctggggatataaactggaagtcatttgcagtcatgcagtacctaaagccatggtcctggggacatgccagggagagctgatgatgggaggagctgtgtgagaccaggacaaagaagtgattgctggctatggccatgttgtggtcacaggtaagcagtttccaggaagtggtggctctagaaggccacttgaggtgggtagaggagaagccagggggtatggaggtggtgagtgtagacaacgctttctgctgtggagggaagcagtgacatgggcagtagctgggcagggatgggaggtagagagtttcaaagatgcgggacactcgagtgtgcttggatgcagataggaatggtcttgtagaaaggagagtgtgatgaagctggaaagggggtgctagctgcaggagctgagtccttgaggaggtaacagagaggtgatcctgagcacggagtagggggaccacatccagccacagaagaggagaaggggcccagctgtgggaggacagtgcgcagcagggtggtgggagccttggagtatgagactgggcaggggggcagtgttgggggtctgagccatttgggagagctgggacacagaccgttaagctgttagtcttaacagggaagtgcaacagaacctcagcttcatgctcatgtgaggtgagctgctgatttcaagtgagaacagtaggcacctgtgtgcacgcgtggagtaagtggatggttgggctgaaccagggtggagaagcttccctgggacagcaggatagagggaaagtgggtgagagagtatgggtgtttgcaagagaattattgtgcaactagacctagatgtccarggtggtgagaagggaagcgaggatgtaaggatcacaccttggaggtcccgatgaagtttaataataactggagccaagtgctagggttaggtgagcagggcagtgggggaagagaaggagccacctgcggtcgaggtttctgggttgtagcagcccatgtggtctagccaaggagcgtggctggcagtggctgggaacagtgcatgcagatgcaggtggccctgttgaggggaagcagccacccattgaggaatctggtggaagccatttctgatccttgtgtgtatcaccccagcatccagttgctgggttttcttttgtttcctacagtggaacagtttcaagctgggtttgatggaagcctagaacctgagacagcacagctgaccaaggggtgtcggtggaartaaagcccttgtgatagaaattccagaacaagttcagacccaagaatgcactctccttgggaggtgatggggtgattggctgagaggtggcctgctctgctactttctcctctggggaagccccagataggccagccttggaaggagaaaggagaggcagtctggcccactcctcagctggcttcactgaagctactatcttgaaatagcccttctgggcatttggcaaasgtaggctggtccaagcggcagcaggcgaggggacttaggatccccctttcccagggcctgcagctgtctcctgagagccaagccacttgcaactgtctggaccccaggccaggtccttgctcattgtctctgtacctgcccatgtctgacatgtctcccagtccttggggatctcttctgtgctcctcttggagaactctttgttggctccrggtacccttgcctcccagtttacatgcacatacatgcaatttgagaatagatgtactttwatgtacacatgcacacatacgtactcatttcaaaacaatttggcctcaattacctgctataatatctgggacctcatcctgatagtagacagctgtgggtgacccgctgcacttgctcagttgtggttcacagcgggacacaaggtgatttctaagccagcactcgcctccctagttgccacgtgaccatgtcttctttgggtgtcctgggcttacaccctgaggggctttccctgaggggaacccatactggaaaacctgtcaacatggcctggagacctctggatgaagaggcagccgaatgtgttacctttgcaaccaaaacgatgtcatgttggagaatccacagtccttcccatcttccaccctcaccatcattcagccacacacctcccagggaaggcacctcagaagcagccacattaaagggagtttagcccagctgagagtggccagatttgtgcactggagaatttccatttggggaaattggacaagggcctatgggtatgtggctcaattggatgtaatcaatgattctttgttttagttttactgtgtgaagaacctatctagtacatatttcctatttgtttactgtttgtaaaagaataagatatagttggaaattcaatatggctgatatttattttccatcctaccagaatttatttctccttttttcttgatttttttatacagaaatttgatttgattttagcactttaaaattagccaccacttttcagaaatataaacattcaataaattgagagacgggagtactttaatgaggaggcagagagccagaaagtgctcactgccagccagtctatgctgtgtggtgcctggtttcctggccacggcagagattcaagggaacttgggccaaacctctcattgtgcagacagggaaaccaaggtctgagggggaaggaactgggcccatcttgcctcccggtctggtggccaagcctgccttcctgtcttctctgtctaggaggagagtctctgcggcccaggcagagcccagacctggatgagagctgcctgttgaggcctgggtaggatgcacgcaatgggacaaggaccatctctggggaggttccgccctgatcccttgggggctgatgggatccacagtcgcatagaaatttagaaacttattcctcagattacgtaggacagggcttgggtctggcttctttgtcctaaacagtttactgggatggggaaagacagatcttttaaccctttcctggggagaggcctaagrgtgtggaggctggaccccggacccagggtcctgcgggttcccattctgctgagaacagtgagggtgtgatgaggatggtctccgtaggggtaagaatcctggggagtgggagggaccatttcttttatgggctgtgccctgccctcccttctcatatccttggtgagaggtgtgctggcctccatgggagggttttgcccagaggtggagagttggagaatgagtgtccttgctcagcaaggtcagaccagaggcccagggatttgcaggtggtactaggaaagccatgttttcttgctccaagtggctcctgacagcagaagcaggcctgggggctgaacccaggtaatacagtattgtagttaagaatgctggcacttacttgctgggtgactttgggccagttacttaacccttctgaacctctatttcctcatctgtgcaatgggtctaacattactgcctaccttatagggctataaagatgaaataagataatatataaaaatatgagcggcaggtactgttgttaataacaatgataagaaaactatttataaaggatggaaagtagggaagtgtgttcatgctgaatacaatgttaggagtgtccctacacagaatctgttacatcttgagggagggagctctctgtcactggaggcatccaagtaaaagctagaggtctcctaactggggaggttgtcaaagtataatgcctcagactgggacgagcacgatgatcttgaaaggtctgtagcccatgattgtgggccagaaggagggggtgggctggaaggcagtggcttcattctggaaactgtatccctcatatgagacactgagccctggaggccacgtggagtcactaggctgtggggcagggaatgctaggtttgaaggatcctctttgtggagccatttaaccaagccccagaatgggggagggccttgaccaggtgcctggtgtgtgggaggggctgaacagagccttccacttcctggtctggagagttcgccctctgctaggcagcttgagaggcgtgatggaccgagacggtgcaggccactgccctggaccagccaggtttgtgtgcctgtagcctgggtggagcagtggcctctgactcatgctgtctcctgcttgcttgttccaggggcaggaacagcccctctgggtatcagacacgggtgcagaaagcgggatgggataaatcatgcagggcttggctgagagttcatcacaggccctcacggcaacaaagctgcggtaggccttggaggtgtgtcccgggcctggagccaccagctggaagacaggcctcctgtggggagttctgcaggcgtacagtggcagaggctcttggatttggccaccactttttgtccaggtttgggctcaacctctgtccctgagcctgaatgtcctggtcccctccccacactgtccttcctgcatttccaccctcacctgggggtccttcccctctacctggtatgctctttccttcccgggttggtttcttttgcaccctaacaatttctcccttctgcctgctgtggaaacctgggctgacagtccctgggtgaccttgtgactctgcctggatgggactgtgaagggagaatctccttgtctctggtggcagagaggagatgtgtctgcaaggacaggggacatatagcctgtctgggaggagggaggatgaagctggtgtaggaggagctgaggggagtggtggcaagagtgttgggcctctcacttccagtcttagcccctgcctaggtgtgtcctggggctagtaccttccccttcaggccagggggtttgagttgaatttctaatccttgcaaccaggaacctgatggatagtcatccttcaggacccacagatggcacctcctttgggacacgtgtccacacttsgtcatagcaccgggcaggacgttggcagccctcggctcttgggcctattttttccatttgtccctgcccataggaggcacacagtaggtataaagtcaaagtgctctgcatggatgcatggatgctcagtataaggtttgaygttgacattttaacaagcacaccagaacttttgcagacagttgagtgttacctgacaaaatggtgacagggaagcctcaaatttgttccaataatgccatttgtccctgggaacatttcttggcctcctgattgggcctgtttwtgaagcacagaaggcaaccatcttggtttggctccaaaatgatgttttctgtttgatccacagaaacagctagaaggggcaaagaaaaggttggctgctgctggaggcttagtgatgggtgttcagtcggacttggagggggctcctaagatgcagcctcagaacagaaggaggtgggaaaatgggtggaatggagttgtgttgtcactggagttccaattcaaatggagaaggtctagtgaatttataaaaacacttccttcattcactgcttcgtgttcacagctgcgctcccagtccttggtatgtagtaggcactcaatagatatttgtcgaacgagtgaaggaattcaacaaatatttatttgctaaataatgcctactattttccatccaccacggtaggtgggctgctcttggtactttgtaggatgacatggtgtgtgtgtgcgtgtgtgtgtatgtgcacgtgtgcatatgcagacacacatacacgaacccacatctagttgtatgtttcattggcccctgtgatgaccgccttcactgggggataataacacattttctggactttgccaacatatttttttgtttttatttccaaggccaacacctgatttttttaaagggaatatttgatgtagggaatcattagattaaaaacatgcattcctggctcatttatcgtgaatgagcattagctgccctcctccccggcctccaacccccatcctgccatgtgcacacccacgtgctttcaacctgaaataacagcgcttcatattggagtgggggacaaacacgcaccttagggataatgagcctttgcccctaggatcttcctgtctgcctctaggtaaagcaaacccctgtgatgtgcttcgggctggagtgcagtgccttggtgtatgtgcatgtgccttatggcagtggcttttgtgcctctgctttttataagcaatggaagctctgatgtaatgaaattttatgtagagccccatggatagacaacactgtaaaagtggatctactttgctgaaaggagggtgggcccctttgctcagctttcctaccacctcctcccactcccctgccagggcctcatagaacatcctggaatcccagggctcctcaaggtcctggaggaagagcctgcaagcatgtagggtcacatatgtgcattcacagatgctcgcctgtcggctgtactgtgtgttcatgcctcttatttctctctttcccgctgcttgccgtccctggttcaggcgggcctcatcygcacagacagcaccracttcttcattgagcctctggagcggggccagcaggagaaggaggccagcgggaggacacatgtggtgtaccgccgggaggccgtccagcaggagtgggcagaacctgacggggacctgcacaatgaaggtaggctgtaggtaggggcctgtgtgctgcttctctccctacctctggagtgtttcccrgtcacttctgtccttaagctgtccatgtctggcctcagtcttcttatctgtaaaatgggactgggccacatagacctgctgtaytggcagagaaaccccattgcgttctagaagctgctgtaattggctggagctaggggccagaggagtcacttgtgtcctgaactgtggtccctgggactccagaggtctctgaggagctcaccattgcttctcaaggctatttctgaggsaaggcagaaggtagaatgcctgcagtgagttcttcccccctaaaattgactcaacccttgggagccacaggaagggagttattagggcacctgcagggaggctgcctggtgtctgggcgtcatggtcagctttgtgtcccrtagaccattttacaaccctaccttcaagtctgtctactgtgtgaccctagcaagttacctaagatttctgagccctcattttcctcatcagtaaagcagagatgatccatgtctacctgtaaatgttatatgtaatggtgatggtatctgtgaaaatcccagtatagggcttggcatgtagtaggtgctggataaatggcagctctccttacagtattattaagggtaactgctgacatgttagggtgggaaccccctgagggaaggggtgtccctgcgcccaggcgaccagtgcaggaggctacacaccagaggcactcaagacttatggttgggcgaatgaaactggatgtgacaagtgctggtcctaggcccgctggtcaacttyacagtgtcacaaagctcctttggccaagaggagatgaggaggccatgggtgaaatctggttatgactggaccgcatccttgtgccagctccctatgggactgggcctggtgtgagaaatgcctggaagctagttgtcctcacagacagtgcatccgttgaagctccagttgctctccaagtatcactcataagagaagctgtggcaccagagccagagggttctgcaggcctaaggtggggagggcaggkctggcggggcctctgagcactggcgtggatttcagggcacccttctctccaccagggttgagaagagggctgagtctcccctgggctccattttttaaaggacgattctgaatccaaagaccataaggtcccctcttttaggaagagacgttggggaagtccagctccagagctgtgagcctggaaccagctgcatcaccagccaccatggtgggcagctgggaagctgagaccactgagcacacggagctggagttcagacccaaagaaatgtggctgcgactcttgccccacaccaggctccggggctggaactccagtgaggccaggccctggtccatctacgggccttccttagaaagaccaggggcaggagaagactttcttggaaacctgtgacttgtacttttagttgaaggccagtcgtggggctgagcccagtgtggggaraagcatttctaggcgtrcctgtctccatttcacagcttgattaaagccagaggcttcagctcagctctttgggtctagttttcagcacacagagaggtgcctcagaggcctggccaggtgctcagagcctgcctagsagccggctaaaggcttttggggaatcttcctcaggctggggaccttcacatctccagctgtggctgaggctgtggaggggattccagccccctgctccactgtcagggagtctgaggtgcaccagtgaacctggagtggaggggacaattcctctcggcactcagtaaggcctcagctgctgcttcctgaaaagggcatgtgtgggcccacacactcacatctacccatgcactctcccacacactgacacccacactcacaaacacagacccatatacccgcactcacccttactggcacacacccatgcacccacactcacacgtggacacataccacccatacactcatgctcacacactgacacaaacacacgctcacaaacacacacccatacacccacactcacacatagacacacaccatctataccctcatgctcacacactgatgcaaacacacgctcacaaacacacacccatacacccacgatcacacatagacacacaccacccatagattcatgcttacacactgacacaaacacacgctcacaaacacacaccccctacacccacactcacacatagacacacaccacccatacagtcatgctcacatactgatgcaaacacatgcttacacacatccatacacccacactcacacatagacacacaccatctataccctcatgctcacacactgacgcaaacacacgcttacaagcacacacccgtacacccacactcaaacactgacaaacacatgcttatacccacccgcactcacacacctgcatacacacatacagacccctctatacactcatacactctcacaaccccacatccacacactgacaccccctacatactcacacaccccttcacacactcgcacactctcaaacacactcatacacacacatgctcatatacacatactctcatatatacacacatccatgaatgagccccagagaagagttaggtgatcctttcccaaggctttggtgagaaattgaaccgttcagagtccaggggcaggaattcccggtgctgggccaccaggctcaagctggccctcaccccgcggccctgccttggcccctgaggctgcgtcctggatgctctcctgctcctaacgcttccctctcctatttaatccatggtcctactctctggagccccgttcccacccccagttccctcctgaggacactaatggggtatgtgctcctgcagcccgagctcsggctctccgtggggctgcccatgccagggccgccagccgggctggggctcagggcggctgctttacaagcaattgagataaaattcaccattttaaccattttgaggcatatgatttggtgggtttttaaaactatattcacaatgctgtgcaaccatcacctccatctaattccagaagattcccatccgttagttgtagtcactcctgtttccctgccgtccaacgccccctggcaaccactaatctactttctatctttctaaataggatttgcctattcagaacgtttcatggaatgaaatcatgtggtatgtgcctttggtgcctggcttctttcactcagcrtgttttcaaggctcatccatgggatcgcctgtcttgatgcttctctttatgatggarcactagtccagtgtatgggcatgccacatttattcattcatctggtggacactggagttgtttctatcttttggctactatgaaatgctgctgtgaacattcatgtgcaagattttatgtgaacatacgttttcaattctcttgagtacatacttagcagtggaattactgggtcacatggcacctctaggtttaactttcaactgtattttcaaagcagctgcaccattttacattggcttggggcttcttggatggctcatggcagcttcccagtggctggtgggccctgctctgccctgagggttgtctgctcctgtcatcctgaaggatgagggacccacagaagagggtgtggctggagcccccccacagcatccaaggctgatgctggctggtcctccccaattccccagaaagtctgcagagagagaattatggctgtgccccgatagacwgtggtcatggctgggggaggcctgagtttacattccgggctgttgtcatgaagctgctgcgtgacctagggcgagtggggtaacctctccagccttcctgtgacaggcctggcagggagggctctgaggggtcaagtgtggcattccactcgcagggcttacacttctgagcacagcccatgcgttgggagtgactgttatttttctccctgctccatggagagagccttgcgccttcccctcccctgctgggggctgccctcctctctcccaggagtttggctgtgggctgctgcgcttgccattggctcagacaccagggccaccagaagctgcctgcagtgtgagcttagagcggtgccagcctcaagggtaagtgagggagaaacccacctgagccctgctcaccaggctgtgtgtccacccagaggrctttccctgccaggccagtggccacacgtttttccagctcttaagtctagggctttgttcctttgcactatagcaccactcagcaaagaggagataaaaacaaatggtgrcaccamgccctgtgtgttccctgttacctgtcctcagatccccattacctgagcacccgtgtgggtagcagcgtagaggcggctcgggtctctgcagaggttcccatggatgcatccatgtgcatcacccacgtgtggacggggtctgcackcactcgctcccatgtgtaaaataaacaatcacaatggattgtgcaggggcagggccctctgccccctgtgctgaagcaggttatctcctgctctctgttcagccccagcttcagtgacccctcctctggatgccttccccaacaggtctggatctccagtggggtgccttctctgatcagtcctgctgtagtctttgatattcctgtattgttacaatccaatttcttatttgtcccctctactaggcagtgggcttaagggcagaggcccggcctttatcacctacccaccgtccatccattgactagtatggggcccctcctgctgccacacccctaatacatgctggggatattgtggtggcctcttcacatcctcagtcccagcctcctatctggggagttctcaaataactggggataaatgaaggttcttagaaattaatggtatgagtatcaaagcttcagagtgagatggagggaaagtcattaagagttaaggctctggagccttcttgacagaccccagcctcctgtcctgccttcttagctttcccygtgagtctccatgcaccctcactccaccgccccagcagagtgtattctatcttcattcaggctatagcatagatgactgacagcgctcaagttgttacccttctacgtggcggcatagatggtaatgtttcaaagcatgggcttttgattcagacagacccacatgagaagctacttaacatctttgaacttcaatgtgttcacctgtgtaatggggacaacaatctgatagagttgttgtaaagattagactagattgggttgcattagattagattagaggtcagtaaaggtaaggcccagggccagatatagcctggcagctgtcttgtaaaggaagttggattggaacacagacacactcactcacagtctcatctgcgactgattttgtgcttcggtggcagaatcgaatggttgtgaccgagaatgaatgacccccagagcctaaaatatttatctggtcctttacagaaaaagtttagtaactcttggattatataatacaagttaataaatgctattttgcttttagccaaaagggcagagcagcgatggtgaaatctggggtcactgacagttcttgggtgggatttgagaggctcagtgctcacaggagtatcccggagttcctcagatgccctatggaggccacagtagccccatgacttttctcctttatggagatrttgccaactttgatttttacagcaaccttgtgggttagagataaagggtggttcatcttcatgttataagagagacaatggaggccagagaagcgagggattgggcctgggacgcccacagagataggatgagtggctcccggaacccaggckttctgctctgggccagttctcacccctttgctactcattgcttcaaagatttagcagtgccctcatggcaggaaaatggctcttgcccatgagttgacctagtatggagcaatccctcatactactttacttacagaggcagggaaaggggcaccagtgatggggacagaggtgggtggtgggcaatgtcacagtgacagcccctcctgtgggttggacctcactctcttcctgtcttggttccagcctttggcctgggagaccttcccaacctgctgggcctggtgggggaccagctgggcgacacagagcggaagcggcggcatgccaagccaggcagctacagcatcgaggtgctgctggtggtggacgactcggtggttcgcttccatggcaaggagcatgtgcagaactatgtcctcaccctcatgaatatcgtgagtgtccatgtgtcctaggacttggggggagtggggtggggtgggccccaccccaccccactgggccccagtgctgatccaagtggaagtttctggggcctggtattttttaggtggatttggggaagtcattgcttgctccttagcccagaaggcacacccttggcagccaggttcgatggtgtaatgagcctgaattggcctgacttgcgtcccaggctgtggcctgatcccagctgtacatacctgggctgaggtgacccaccaggcctcctgcgctggagcctgtggacagtgggttctgggcttggacacattcagagtcagggtcaggcgtggcctggagccttgcttgtgttggagttgaagggactcttctgggactcatcatctggaaaaaatgcccacccccaggctggggagactggccgaggagctgtcaatatgtgaagtgggtcctgagaccctgacgttggccctgggtgtgcacagacaggcaaggaaaatcagggatgtgggcaaattctaagactgcattgaagcagagagcccgtgcccttagctgctgcctgtggctgtcctgcagagatacaggactctcgtcacagaaaagctagtttttcaagaaaagtcagaaatgtagtttttttttaagtgtttaaaaaatttcattatggaaaattttaatccagatatttaagtgaacatttccagtttttttttttttttttttttttgagacggagtctggctctgtcactcaggtcggagtgcaatggcacaatctcggctcactgcaagctccatctcccgggttcacrccattctcctgcctcagcctcccaagtagctgggactacaggcacctgccaccatgcccggctaattttttgtatttttagtagagacgggatttcactgtgttagccaggatggtctggatctcctgacctcgtgatccgcccgcctcagcctcccaaagtgctgggattacaggcgtgagccaccgcgcccagcctacatttccagtttttaaatgttaaaagagaaacccactgtggatgccaaacaaaatacactataggccacaggtggccccaagtgagcatccctgggctaaaggggcagagacaaggaagagcaggagggaaaggagggtgagagcatatggcctttgtcagggtgcctgtggctgtgtggttctgggaaaggatggggacctgtctgggtgaggtgagacccaaggtagaaatagtgcaggcaggggccagatgctggggatgggggccggaccctcagccctcccctatgaagtgtagtaccggaggcaggtgacccattgggatagaccccagctcagcatgggacactgtgcagtccaggcctgggggaggtgggcagtggtgcacaagggaaaatgccacgtcaacaggaggcaacagggcaggtgcccttcacctctgagcctctgcaaggtgaccaggttaatggctcatcataaacattcatctggaacaccagagctgagaaagaagatatgtacgtggtgggtcctgaagaatttgagtgaggcctcttttgaaggccaaagcttccagcccctgcatgggccctcactggccttgatgttagggccctctgcccctaggcctgtctggagaggataaagaggctggctagctgtatgatcatacagaccgaaagatgactgcagtatgccaaggccgggatagaatcaccttatcctcagtctaacatgggcagtgctgggaggctgtaagagatgtgcaattgattgtgctacggcactaagaggaatattagtgaatcggccaagagcacacagtctgactcggccccttcctgtctttgtgactttgggggcgagttacgaaccctctggtgtgtctcttctgcactttgaaagcagcattaacagtacttactaccagaggttttggggaggatgaaatgagcgcatggtgcacagcatggccatgcagagcatgcgctgtcagtgggtggtggttggtgataataatgtgaccttcgtgaagtgactggtcatgcatttctgggaacgggacagttgatggggagaaatgtcaaccccacgtcatgtcagtccccttggaaacattggtagggcgctgcctgggtccataatctggctgcacctttgacgaggtggtcactagggggacagccccttaatgtctctgggaccttgggcaggggacctgtgttgctcagggatccataggatgcaaatgatgaaaacccaactcaatctagatgaagacaaaagcggtaatttctttcgtgggtcaaattgggggagggacaggttggagccagttataagagtaattggaactagaggaagttttcaggttcgcttctctgtctgtgacatgctgattctctctgaccgacttctctaccagacattctggccactgacaacacaacgctgactcctatccccatccatggctggagacaaaaggagtttcccctctggttcccaggcaaaatctcccgaagcaggactctgattggcctaacctgggtcacgtgccactctttgggatgatcactacacgttagagagggagagcatcagtgctccaaggctggagagcagttagacacagccatggccgctggagaaattgttctgagctggccagtcaccccagtttgtgtctgctacagtttagccccttagagcctctgctttttcatgatagtgtctgctcttgggtttgtgaagatttagtatccagggtatctagcacatgcctggcacatagtgggtactcaagtaatgttttctgtcattagtattgttacattgtttgtttttgcgtgtataagttgttcctcgcctgagtttgggaaagtgagttccctgaggggaggggctttttctttttaggaaccccaacagcacacacagcacagggtctgagacctgagaggtgattggtaaacgtggaggcgaatggtatccacgagagaagcgggtggccggcacccattgagatggcagcaggagagagcagcagagttctgtctgcagtgtcaatatcaataaaagagcaggagcagagatcagctccaatgacaggagcccagggagcgggtggggggctagaaagtctgtccctggccgcccctgtgtgtggacacttcttccatcccaggagcctagcatgtggttttggacacgaagggcaaaggctaccacatggagttgtttgagaaagagagagggaggggagggagaggacgcctatgaatctgaacacacccaccatgctggaacacttgaccgcccacccagactccgcaaatcacaggcccagcctgaggccgtagctggggaccgatcccattagtaggaggccacgctgagagccaggtttggcccctggagccagcaggtgggggacaagaggaagggcaggaaaggggaaaggggtaggggagacctcaggatgcccaagagtggtaggaacctgggtcccacggcccaaaactggggctgaagaccccaggactgtaagccaagccctattgcagccccagaatccttcactttgttaaaagataattttcaggaaaaggtaaactcatgactctcatagagaaataaaaatgaacatatgttaaagatttgactccacatkaatgagggaaccaggcagatgttataactcgttcaaaagagaacccaaggacagaaacattatagattaggaattttataatgaatgtgcaaaaggagacaaaattgatgttgtgtagggtgggagggaaggctgtttagcctctgccagagaagatggaacctgcctgcgtgcagacaggaattttgcgttgctcttagtgacccatggtgctctctgctgtaagggcactttctctgcatccgattccgataagggggaaagacacgcggtggcagtgcctgtcttccattgaagcacaagtttttattctctggtttgaggcctgaccaggtgtgaggagtctgatgacttgtcctccttaaaaatctctgccctcattcccggaactagcggagtggcagcatctcccaggctacagccctggattggactgggttacagccctacacagcagtgtggtgggattctgtctcttctgcaactctgttctgccacctgctcctcacttccaggattctggctggggttaggagagtgagagtgcccagggcagtggcgggggtgagttttctgagggggaccacaaagttgtcttgggtgatctgctccattctttctctcatctttcagagaaactctttcagaggtaccctgggggacctccatgaattctgttgcttggcttcttaactcttggttggactgaggtgtcggcaggttctggagggtggatcaggcttgctggagccctgctccccagctggcttcactgccagccttggctaacatccattcatttgttcagagctgggtgctgtgctacctctgtgggccctctgtgggrtgaggtattgggtggggtggggtgggggtcagggttcttgtggttgcaggtgacagatccagctcacactagctgaagccaaagaggggtgtattggcagggagctgctgacatgcccacagagccagtggggcaggagccccaggggccacaggatgagggcttcaggcccattagggcaccgtcccctactctgctggcctgtgcttgtcagtggaacccagcagcagatgggctttctcccatgatgggaaacaggaacaacccaggtcctcacacttaggacccaaatgccaaaggtctctttcttgccctcctagggaagactggctagggtgggacatgaggctatccctgtattaattgctgtgactagaaggttggtttgggtctgctgggtcacagcttgccgctgtgtatgggggtgagttggagcaggacctgtgcccagaaggcaagcagcaaagcatgcggacaggaagaatggcttccacagtgggggacacaaaaggaagagaaaacacagtccctgccctctgagcttatactgctgtgtgtctgcagaccactgcacaagatataattgcaagctgggtgccgtgactcacacctataatcctagcactttgggagtccaagacaggaggattgcttgaggccaggagttcaagacaagcctgggcatagcaagtccccatttctacaaaaaaatttaaaaaattagccaagcaaggtggtgcacacctgtagtcccagctactcaggaggttgaggtgggaggatcgctggagcccaggagttcaaggctgcagtgagctatgattgtgccgctgcactccaccctggccaacagaataagaccctgtctctagaattaaaaaaaaagaatatcattgtagaaattattagtattgtttttgagcaaccactgggagccagactctttgtagactcgacctcatttatttaagtctccccataaccctgtgagaggtctgagtagcctcaatgtccttacatagaaactggcgtgcagaracaggctgtaacttgctagtctgccctctggtaggccgtggggctgggatctgagcaccactgtgtccactccagagctcaccctcttccccaggcctggtgccagctggtgctgtccgtggctggtgacccagctgttatggtagaaaaacttttctccaccctcttatgttcagtactggagggcttgtgagttaaactgaaagagatggactggcaggagaaaagagttgatttgccagttccttgtatataggggtgctccatgatgagtacctcaaaggggtggtgaaaactgggggtttggccaggtacagtggctcacgcatgtaatccagtactttgggaggctgaggcaggtgtatcacctaaggtcaggagtttgagaccagcctgaccaatatggcgaaaccccgtctttactaaaaatacaaaaattagctgggtgtggtggtgcgcctgtagttccagctgctcgggaggctgaggcaggagaattgcttgaacctgggaggcggaggttgcagtgagccgagatcgggccattgcactccagcctgggccacagagggagactgcagtctcaaaaaaaaaaaaaaaaaaaaaaaaaagaaacaaaacctgggggcttatattcttagcttaatagggagagaaaggggaagggagaaaggtttctttaggaaagacaagtgggtttttaggagaacwaacgggagatgaagtttgtgataatgcttacttaagcagggtcaagtggtatttctgtctttatgaccgtgaaattcccttaaggggatttctgacaacctcttttcccagatrctgctgcttttaaggaaagctgagaaggcttctttctgcatctgttggctttcagatgtcttcagcttacactgatctgtatcctaatgctgggkttccaaatgggccctcacacaggctgggaacagraccccaggagagggagtgcttgtatgcatgtatgtcctggaggggccatgacctgtgccagctcctacagtctctgcttggtgaggggctccacatgcatggyttctgggcactgtgtgccctsagcgaggccccttccagacccactgagtggcctggtctgagcccctgataagggctctaagagggtcagctcaaatgatgggggtgagggtggaggggatactctttggggctatgggaaaaacaatgaaacccactgctgaggtggagagctgaaggcagcgaagtttggaaggtagtggggagagtagatgggagcttgttccccaagcagaatttgggagcttcccttggaaaccagaagaggtcttttgatgggctataagtgagatgtttctttcyattgggcaaagtgtacttttgaaacttggcattccagggctggcctggcctgaaacgtgatgcattcagaagggggtaggaagccctccaatctggagttataagagaccacgtggatggtggcaggagtgggtgggaagttctctctgagcccttgatgttcatgatgtggaggccagctgcccacttatccttctctggtgttcccctgacgtccctaggactttactgttggaggaaggcaggctcagtaacccattctaaccttcttggccaaattaacacattctgacttttgacccttgacctctgactcatgcatgactcaaagctgtggccggggaacattgtcagtttccactgaagactgggccccgagggcctgccttggtgactgctgtttggatagtcttggtcctaccttccttctccccacaatctgccagaaagtgggtgagcagagaggagagtaatgatcttcccagaggttctgcaaggcyggtaaaagtaggttcttttgttcactgtggggttgccctgtgtgtgggaacagaaagggcttgcgatgggtgagggcccagctagccagagcttccctgagggaagcccagttcctcttggggagagaggctcacagcattgagatggactgcggcttaaaggagccatgaccttgcagacctgctgctgccatcgcgggtacatgggcggtgtggggttctggcttcccccgaacaggtgcagaggacggacagtcaaacttcccagcaagggaaggagagcagatggggaccgacagtctgcctccctggggaccagcagctcatcctgtccattgtgtggaagcttttattyggctgggatgcttgacgctcgaattgccttaggggatttccatggggccagtaataacagcttgcctttgcattccccttggaacacctgtctgctgtgaccatttctgatcctgatttccggggccaggtctgggctggcgggaccagagggaggagatctggttcctgggatggatggtcccattgtgctctcaacccagggaggagggggcagaagccattagtgaagcacccaaagttatctgacaaggccctgggcactgctgtcaggggcagctggagggacagtctgggtggccctgcctcctatatgtcttttgcattgacctggggaggtgctatggatattcctgcagcttcagatgatgcgaccgggctccccgctcagccttgtcgcacacgctgctgggcgctgtctttttctgtgcctgtttgcacatctataytgggtcatcttccttaagacttcttcaaatctcaggactagagaaccatttgagcactttgaagcataaaggggtagttgttttcagcatttagtgagtacgtgttgtgtgccttgtatcacagacagactcccatcgtggaagttttggtctggctgcaaaaacaagccttagtcctatggaataatcagggaaccactgagaatggtaccagtaccaaggagcttagagggggtgctgtccctgtggggttgtggagagaggagggctgtctacaggggctcattgctgagcctgccctgggggagagggcaatttggagaggggagggcatgtgggccagggcggcagacagcacagcaaggttgtgggggtagggttgaggaaggagacccaagtgtrtggcaacaggtgacagaagcctgcagagacctccctggcatctagktgtggcgggatggctggcaaggcagcagyatggactgtggcgtaaagaagaggcatgagaacagctccccgtggtggcatccaaggtggatctgcaggttcccagggtcctctcctggcccaggggtgatggaccagttctctggggcgaggacctctttggacatggggatattggggaacctyctagggcctggaactggagcacagggagggtgagaagagagacagagaggccctttcatcatttccttccagccaggttgcagccagaagcttccagtctgtttcctctagaaacyctcttggcagccagcctgtctggatgataggtgcctggtccacctccactccccaccctgccccacctggctgacaatacatagatgttggggtggttgcygggacaacactggctagcacctctgccaattgtagggtcctaccagctctgacctgcctyagagcccctttctgagcctggggcctgctcagatggcctgtatagaagagcttggtgcctgttttagacctgggaggttttggcgcagttggctgtcagatcagggccttggtggcctcagcctggaagggtggcattttgtttgtttgcccttgacatgcattacacatccatcataaagcctggtttggaacaccacaaaaactgctttcctgctgacggagagtgtggctttgccagacattctccttttgggtagatgaaactctaaggagctcatcctccttgacacgaagcagacaatcctcttctttcctctctttttggtctttttctcttcttttatgtctcttccccaaaactgcttttgtgaaaagtaaaaaaactcattcactgtaaagcagtagttctttttaaagtttattttatttattatatttattttatttaaaagttattttatttttttgagacggagtttcactgttgcccaggctggagtgcagtggtgcgatctcggctcactgcaacctccgtctcgcaggttcaagtgattctcctgcctcagactcctgagtagctggggttacaggcgtgccaccacacccaggtaatttttgtatttttagtagtgatggggattcgctgtgttggccaggcttgtctcgaacacctgacctcaagtgacctgcccgcctcagcctcccaaagtgctgggattacaggtgtgagccagggtgcccagcctttttttttttttaaagacagtgtcttgctttgtcacccaggcaggagcgcagtggtgcaatcatggctcactgcagcctcaaccttctgggctcaagggatcctcctgactcagtctcctaagcaccacaggtgagtaccaccatgcttgcctaattttcttcttcttcttcttttttttttaatttttagtagagacagggtcttactatattacccaagctggtcttgaactcctggcctcaagcaatcctcctgccttggccccccagagtgctgggattacaggtatgagccatggcacccacccaagcagtagttcttaaccagggacatttggtaatgtctggagatatttttggttatcacagctagaggggatggggtgctaccggcatctagttggtagaggccagggattccactaaacatcttagaatgcacagaacagctcccccaactgagatcatccacatcaaattgtccactgagaccccctgacckatggtattagttccaattgccacacacaggaattttcaaagcaaacccactgggcagagaatgatgtgctgggaatcttggtgtgagagatatgtggtagtgagcaccctcctgcaaagagagttttatggttcacacaacacttttgctttcgtggacagcatctcactccacaaatacacacacacacacacacacacacacacacacacacacacacactttttagaggtagggtcttgctttgtcacccaggctggagtgcagtggtgcgatcatggctcactgtagcctcgacctcctgggctcaagtgatcctcctgcctcagcctcccaagtagctgggactayaggcatggctgactgtgcccagctaatttttattttttttttwaaaaaatagacaaggtctcactacgttgctcagactggtcttgaattcctgagctcaaacaatcctcctgcctcagcctcccaaagtgctggtattataggcatgagccattgtgcctggctgaaataagttttaaactaacagatgccattgatcaagcacatgctatgggccaggcctggtttcaaagccttgacatctgtttttcccctccactctcctgcctctgcaagctatgtttcctccacacccacagatgagcagggtcgagctccaagaggtaagaccatgcagtggtgagacgtggcagagctcgaccttcacaggcctccacactgcctctgtttacacacaagctgccagcctgggacatcgaggctgctgcgtttcacaaataggttgtgggggataaatgctgagcattgtgggcttgtgagagggactcttttgggctgggtgggtccatccctgtgcaccctggtgycactctgcacatgcagcctgggcatgaggtgggctgagcagctggatccctggagcaccacccagaccagcctgtaggctccaggagctccagagacagtcaccctttaagaggtgtgctgattaaaaggcagctaaaagtgctcacttggaacccacaccagccctttaaaatatagggcatgatcatgagcttggcagagagggaagatggagcagctgagcctgcagcagctgagaaagaagtcgggagactcagcactttccttccactcccctgagagcagcctcatcctccaagaccttaaacacctcactagtgacctcggaggcagggcctaccaatgtggtatgtggcataaaatcatggggtatctgaccatcatggagccttagatttgatgaaatatggcacacatgtgaacttgtctgtgtgtgcacacctgagcatggcatcttggtgaggtcttagtgtcccaacccagggtaaaccagacccagctctggctactgcgagggtcagccccagagggctggggaaggcagagagctcagaccacaggtagtagtatattgctgttaaacatccacatacatgcacatgtgtacacacatacaacacaggtacccacacacatgcacatgcgtgcacacatataatacgggtacccacacacaagcatatacctgtgcatgtttagtcatcggcatgtgtaacacaggtgtgtttgtgtagatacacgcacccatgtgtaccataccaaattagatgtgtgcacacagaccagttcacatatgtaccatatttcatcaaatctaagaccacactgatggtcagataccccattattttatgtccttaagaacgaaaaagtgttaccaatgaaactctgttcatcacttagcatttttactgtagacttattagaagagagctttttctcttttttctttttttttttttttttttttttgagatggactcttgctctgtcacccaggctggagtgcagtggtgtgatctcagctcaccacaacctccacctcccgggttcaagtgattctcctgcctcagcctcctgaggagctggtattacaggtgcatgtcaccatgcctggctaatttttctatttttagtagagacggggtttcaccatgttggtaaggctggtctccaactcctgaccttgtgatcctcctgcctcagcctcccaaagtgctgggattacaggcgtgagccaccacacccagctagaagacagcttttaacctcagttagacttaggtctttatcatatgttactctttttttttttctcttttctttttgttttgagatggagtcttgctctattgcccaggatggagtgcagtggtgcgatctcagctcactgcaagctctgcctcccaggttcacgccattctcctgcctcagcctcccgagtagctaggactacaggtacccgccaccacgcctggctaattttttctgtattgttagtagagacggggtttcaccgtgttagccaggatggtctcagtctcctgacctcgtgatccacccgccttggccttccaaagtgctgggattacaggcgtgagccactgcgcctggcctatcatatgttactcttgtacacacacagataaggcaacatgaacaggtgaagagttcccctaacttcttcacattcagagcagtgcccttgcatgtcacatttcagcacagtcagcatagtcctcagtgtgtgacctttccatgcagcattgccctgcctgccatcgagagcagggatggtgccacctgagggctccactggcatccttggattttcatacaagctacggacagcatcctgtggatttgatgctggagccagattgattttactggraggtgtcaatgggaggttttcagacaacacccaggattcacattcctgcctctgatagtttgttacctgaaatgacgaaggctgtggttgtgaagccaccaggaatgacagaggctcttgcttgcactggcagtgacactcacccctgggctgccccctggctaacagtgattgtaaacatgaaaaagaggagcctattggactcaataggatgcagcatgtgtcttgggggtgctgggggctagagcacatggtctgcagagtcaccttgtgccttgtgagaagggccagggttgcacaccaaggggctggtccagggcctgagactccatgttgctgtcgtctccctaggactgagaaargacaggaggggtcattgtggccattcctstgtcttcaagcaatgttgcccacatctgtccaggttcagaggcagtaagtgatcagggaaggtgtatgagcaggtcaggttttccaaggcctgggcttgtcctctgacaatgactgctgtcctcaggcaagcttccgtatacctttgggcctgcctgtatccctgaaaacagggatagcataccatcctccttggaggtccttggagaaatggctgactctgggactagggcagggaatatgcaagatgaccccggagcatctcctagagccagaaagtaatgaagtgttaaaaaacataccccaaatccccaaaccatgggggtgtgtttacaggacacaggacccaactcaaagagctctcaaccaccaaagctgygacaatttgagcaacaaaacaaatcacagagaattatagcccaaggtataaaatagataaaagtccatactgataacataaatgatagaataaataaacgaagaagggacaaatctcccatgcagagtaattccagtttattcatgtagagactccgtcttcaaggaggtggattttaactccccactccctagatgtggccacacatagtgactttcttctcaagaattcagtatggaaatcagggagcagagggtaactttcagtgaagaaacctgacaaacactccctcagctgggtgatgaaggccaacagcaacagtgatgagtcaggctggtatcatgcacccttgacatggcctgatgaggaagcaccttacccctgtgggcttcctccccaatagcccccatctaaccatgagaaaaccatcagacktaccctaattgaaggacacaaaatacctgctcagtgctgctcaagacttttgatgactcagtgctggtcatcaaaaaccagaaggygggagaacctgtcacagagaagaaacagagcasaggggctaaggagacaggaagtttaaatggaatgtggcaccctggatgggaccaggacatttgggggaaattagagaaatctgaataaaatgtagactttagttaataacagcatgtcagtattggttcgttaactgtgacaaccataccatagtaatggaagatgttaacwtttggaataaactgggtatggggagtttctgtaatatccttgcaacttttagctgaacctaaagttattttaaaataaagtttatttttagaataataggaattccaggccattcgccgcgaggattcagtgaagcaatgcrrggaggcgcttgtgggctgtgccagccattagtggcaatgagtgttctgcttctgtttgagcgcgggtgggcttaatacccccagggtcttgctttttcagcactggcctccacctctccctgtttaagacctgcccgagcctggctaccaagcagtgagtggaccttttacaaccttcttgagttgtaaacgctcctcattctctctcctgggccagagaaagcccaccccagccaccctgccacagaaactggttctggacagcagctgagtgtagtggctaaggaagtgggcctgagagtcacagaaatctgagttcaactcytggccttctcacttctagctgcgtggccttgggcaagttacttaccctctctgaaccttggatgtcttgcctatgagacggaaataattcctctccccatagggttgttgtgaggctgtatgccaagcccttggcacagtgcctggcacacagtaggtgcttggggagtagcagtgcctccctctaatcccagtaccctctaccatcttctcttgtgctgccttttcttcccttggtcagagagtgtcctgacttttgcttgtttttctggtacatacccagtggttatctcaggtcaatatgtggtgctgaatcctaatgtaggggtcctggcagaggtactttgaacatggcgcagaggtgactttgaacttggctcagaggtgaggagcagggaagctggacacactgctctgttctgccctgtgggtgtgcctcgtagccatcctgtctcgtgcccaaccatgggaagcgatccgtgatctcccctgagctagctccctggcctcacctctggtgtttgggaggcagccatggagggccaaggcagacagggccaggtcctgggtgcacagccaggctggagtctgtcagygagctacctgtgcatgttccagagcagctgaggtcctggccatggtgccatgtgtcacacggcctctgcagttctaccagacatggcagccctgtccagccaccttcttggcctgtgcaaagtctcaggcagcttgagccaaatcaaagacgctgaggtccctactcaagggctggggatggcaggggtgtgtgcagatgagcgtaccagggcgccagaggactgcaacaggggacttggaatggaagggctaactccacctttttttttaatggggtagaaagggaataaaataaaagcagtttatttttatcatccttatttagtataagaaaagacccaactgtttctcattgccaagctccttttctatcacagcctcaaaactcttcacttctccttgtgctttaggcttcctttttgggatcattttccatcttccctgccattcctttagtggggtctgtgtaacagtttttgtttatctgataatgtcttcatttcatcatggtccttaaaagatggttttgtgagttcaggattctaggttgatggtttctttatctcggtgcttagatggtgctaatacagtgttttccgtttggtgagtgatctgtattctctttgacggaggtgtgcttacagggaagtccataagagactgmggtcactgtccgtccccagaaagggagcagacatgctcagtgaaactgccagcaggagacttaaggccagcagaggacgtggaagggaaggctgaacaggtctcatgccccagggaactttccaatgatgaaaaactycccactattcagtgcatgtgagtactggctgggaagaaattccctgtcagatggagggggatggcttagcctgtttgggctgctgtaacaaaatatccwgtgagtagcatagaaacaacagaaatttatttctcacagttctggaggctgggaagtccaagatcagggcaccagcagatttggtgactggtgagagcccgcccactttctggttcatagatggtgacttctcactgtgtcctcacatggtagaaggagtgagggggtctttcaggggctccttttataaggacactaatcccattcaggagggctctgcctttatgacttaattaccccctaatgccctatctcctaataccattcccttgggagttggatttcaacatatgaattttggggcaacaccaacattcagaccaaagcagttgactttagctaccttggttgccagtgaccttggggttctcttggtggccccacgtggctcatgccttcctctcccctgctgcaagcctctgcccctctccttttaagggcccacaaccttcttggtccagggatcgttccagctcctccactgagacttccctgagccctcctgcccagacgctgtttcccttttctccagatcctggagctgggtggtgggggtgggggcctgagctgcagaactcagaacaccaggcacctgaagcccttggtctcgggttgcttctcagtggtatctccagatgggctgtccctttctgtttacatagcatttgcatctaggccagttaccagggagtgggaagtggcatcagggggcctcaccccacctcctgccaatgttggacagatgagctgtgattctatctcctgctcagacaggcagcagccccctgcccagtcccactgtaaggacctctcaatgtcctgagctggagatggcagctgttggagcaagggtcattggaggctttgatgagtgggtttggcctgttgagtgaggtacagaaatgagaaatatggcaggagtctggcagcaattcacatggtctgccttacaagaaagacacgtggaggaaggcagcagccctgggcatttccagatgcccagaggcccagcagatgcccccgctgaatgtcccagtgactcctttcttctcctgcccccgggataactgatgggtttacatgagtatgcgtgggacacagatgtggctgtgcagagcgtgcattgcctgtgatcctgtccttagtctgcttatagtgcactcagggaggtctgcaacacttacccaccccagtacagaaggaaggccgtgatccagtgttggaggggctgggaagtaagggttacttaagggtcaccctactgcagatccatgatcatctcagtgatcagcaaagactccttagtttagaattccaccagggagcctatgtgtgtgtgtgactgattgggtgccccctactccaccctgaagtccctcctaggataagtctagggtgtgtggattgaggaggacattgtctctacgcattggagcactttactcccactggggaggggaggagtttgggaaggaagccctgctgctcgttggactatggtcatttcttgtggtgggcattggcattgttccttgtggtggrgtgttggcagggagctgcttcccctcagtgggtgctggtctttggtcttgctactcaattggatccagatatgggtgccaggaaggcccatggctgaagcctgacaccggctgctctgaagtctgcccattcatgaactggggcagctgccagttctgggcactgcggaaagtggcttgggactggggctyggtgatgcacgcggcttctgctgcccacagtttcgtgcttacagcctggctgcctccttggctggcccagaaggggtatgccagcaaagcgtacatctcctgttcccctcctggctcaccccttgccatgggactgtcacgcctgtgtggttggaagtgctattactcttctccgtgtggtggacaatggttgctttgtgggttgtaggttgatcactttgcttttgagtggaaaagaattgatggctgaagggcatggggagatggaagtagtgagagcaagactatgcatggagctccggcccagctcctaggaagccatgtgggcaggaggcagaggctgggttccacttctgatggcatcacctccctaaccgcactgctggcatcacatccctgaccgcgctggtggcatcacatccctgactgcgctggtggcatcacatccctgaccacactgctggcatcacatccctgaccatgctggtggcatcacatccctgaccacactgctggcatcacatccctgaccatgctggtggcatcacatccctgaccacactgctggcatcacatccctgatggcggcagtggcatttttttgtagagacagggtctcactatgttgcccaggctggtttcaaaatcttggcctcggcygggcgcggtggctcaygcctgtaatcccagcactttgggaggctgaggcgggtggatcatgaggtcaggagatcgagaccatcctggctaacacggtgaaaccccgtctctactaaaaatacaaaataattagaagggtgtggtggcgggtgcctgtagtcccagctactcaggaggctgaggcagaagaatggcatgaacccaggaggtggagtttgcagtgagccgagatcgcaccactgcgctccagcctgggcaatagagcgagactccacctcaaaaaaaaaaaaaaaaatcttggcctcaagtgagcctcctaccttggcctcccaaagcactaggattacaggcataagccaccgtgcctatgcccggtcaagattaggcttttaaatgtattgaatgatgttccatgaaacaagcaacatagaaacagtatattcagtatgattccaattttgtaaaataagatgcatgcatgtacacacgtggcatgatgcaggttaactgtagttattattaagtctgactaatagtagtgtcggtgatttcattttctttttttgtagttttcagtttttatttctagtgaggtgttttgtattcataaacaargttatttaaaacaaaaaagctggagtatccaatgggaccactcaggaaatgggtgtccccaggagagggtgaactccctttcctttagggtggacaagcagaggctgagtgtccgcctcatgaacactgttcaggagcttcctggcagaggagtgcaaagggctgcattctttgatgagctgtgcagggcactggcccacagtcctgggcctgtgagaaaaaggrattatctagagcagtgctcttcaaacttgccyatgcctgccagtcagctggggatcttgttcaattgcagatccttattcaggaggcctggggtggggcccaagactctgcatttctcacaagctcccaggtgctgctgctgctccaaggtcctggagtatgtctcctggaggagtgcccactgytgcctccccagggccggggtactgtagggcagacattatgccagtggcaactggaacggtacacagggatgttagggcgagtggcctgtggttccctgagccaggtgacctgtctggaagaggctctccagacgtggaaagatgagtcttggtcagagttgctgagtttgagaccaggccctctacaatgtggctttgtggaaagagctcatggttgggattacatggtctaagatgtgaatcccagttctgcagcttgctagcagtgtgtcctcgggcaggtcattttgccccctcagtctcagtttctttatctgtaaagtaggataagtatcttgcctgataaggtcacggtggggataccatatgttaggtacctaccccagtacctggcatgcagtaggcttgtaatgaatgtttccttcccttaaactgtattttcttcttgcaggtagatgagatttaccaygatgagtccctgggggttcatataaatattgccctcgtccgcttgatcatggttggctaccgacaggtaaaccaccttgtcagcaggcagggtttgcggggagaagggttgtggggccagagtgttggaccagcaatggtgtgggctgcaggggtaagcatccaggaatctgtttccagaatcagaacttgaggctattagaattgtggcttcagtgatggagcctttggaggtggtaagcagcaatttatggtttcctacaatctgagaaactgacgattccacacctttatcactgggagatccctcttcttggggaaactggggcttacagtggggtggccactgagacaagtcatgttatggttgagccctggtgccctgcgctctgcaatcttagactaccagtcacctattattaaatgggggtagccaccaaactttcctgtaagggctattgtgaagattaaataaagcaatgaatgcaaagtatagaggaaatgctcagaacagcacctgccttgcaggttagttgaagggattggaaattgtgtgtgtgaagttcccggcagaaacgcatctcagcatggtgcttggcacgtgatcatccctgaaagcaggcagggctgtgtgccagcagcagttgagtggggacagctggtgatcttggggtgggtcctgcagtcctctgggccttagcgttcccatctgtaagtgggaggagagaggcctgctgtttctagggctctgaccctccacgtggctgttggtgctctcccggcccctgcagtccctgagcctgatcgagcgcgggaacccctcacgcagcctggagcaggtgtgtcgctgggcacactcccagcagcgccaggaccccagccacgctgagcaccatgaccacgttgtgttcctcacccggcaggactttgggccctcaggtatgcaaggtactgtatttgccatggccaggtgtgtgcagcatgcacggcagacagaggctgggcctggaggcagatgggctctcttctggggcccaccacatggaggtttgaagggatgggacctggacagccgaggatgagctttgcaatggtttattgggaccgtgggaagtagaggggtccctactcttgtccccgatattttggtggaggctgcaggcagctgtgagtggtcaggccctgggtcctgtgcttaatgtcccagagcctggctgctggaagaccctccatgggcttcaagatgcttctctccacactgtgtccttctgtcctcattgcagactgtgggacacctaagatggggcttgtgtgggctgsaraacaggaagtctgtgctctgcctccagctccacaccttgccaacccagtggtccaagatctcttcatctccctgggtcctcccaattgtggaatggggaacatcataatacttgccttcccccattccagggctgctaaaggccccgggggtgcatgacatgtttgtgacagagtattgacaattgtaaatactctgcaaacatgcagctttgatacccatatggggaaactgagccatggggtggtgaagagacttgcccatgtggtttagcagacaggaggcagatgtgagactcaaactggatctccaggttccatgttgaaggctttctatttttttctgctttaatgctggaaatcagttggtcagccctgcctacccaaaaatttcttgtctgaatgactgaagccccaaatgtggttttacacacacacacacacacacacacacacacacaygtacagacatccacacacatgtacaggcccatgtgcacacagacacatgcacacatgcaaatagacataagccagtgtgtacatgtacagatatacaaacacacacgtatacacagacacacagagacactgcatacatgtagagacacaaagacacatgtacatgcatgcacaggcactcacatagacacagacatgcacacacatgtatatcacatgtagagcaaatctcagccttccaggacaacagaggccccagaaacctccttcccactcagcctcttgctatactccccaaaccatgtcaaataaaagaacatttcagctcctctaacatgaaggaatagctctgtctggggggactgcaggcctaggcagggacatgccctttgtcattacccccaccttggaggcccctaggacacaggcctcatgcatggtagtgcttagctggtgccggcccccctgcactgccatgattcctgtgtggcctgcctgcaccttggcctgtgtcctccccacctctgaagagttgtctcagctgtccttcactgccctccatcagccattcctggtccccctcaactccttccaaaccattccctttccccttcctccagctcccccgctgcaccctggcttgcttcttgaattctagcctttctggcccatgcctcatcacgtgatctccctgccaaaccacagttctttagctgtggtggtgggtgggtagcggggtgttgcagggtcggggtaggctcggatctgagtctcctgttttccccctggtacctaacataatgctgcccccaactcctgcatagaaagtgttcggagcttgtttgctgattgactgtgggactggagggaggcattgtggaagtagtgtgtttgcaggcccgggtgttctctggtttagaggggcgctgataaaccctgggaaactgcaggccaagagggaagccatcaagccctaggatgtgagggtggcttggcccaggtttgtttggctgcaggtgggactttgtgagcatctgtcttcctccaggaacgtccccactccaagcactgaccagagggctgggctgggcacagacctcagtgtgtcctgcctcacctgccctccacctcgctctccaccttttctttctctcttcggcagggtatgcacccgtcactggcatgtgtcaccccctgaggagctgtgccctcaaccatgaggatggcttctcctcagccttcgtgatagctcatgagaccggccacgtgtaagtggcagcagcacggtgggtgggactggcagctgysccgtgagctccagggaattctgtggctgtgggaggatttgcccagcttggcctggtyccagtgtcctgggaggtgtcagaggagctggcctgccactgcggcatggcctcctgcagttaccagtagagggaggccctaacctgagttaggaggagccaaggggcatgagtagtaatttgggcctgccttgggcccagcctccaaatcccagggccataggggaccagatgtggccctgcctttgggtgggtcagtggcagtgtccccatcacacgcagaggcctgctctctctgggtggtcttgatctctggcttccctccatcacgtccacatttgaggcctttctaagacttgatccagcccaccctgatactcagcactcattggagtgctggcctgagcccactgtaaacaggtgcacttagagcttaggcggtgggccaggcagaggctggcttgcctgatcttagggctttgggttttgtttrgagtgtgttcattcattcaatatttcttgagcacctaccatgcaccgggccccattctaggaatgaggctacagtggagaccaggacagagaagccctcaagaggctacatgctgggtggacacaaatgagctactgttcagtaggtcatgccatgtcacaggggcagaaccaagagacaccatcagccctgttagattttatcccagctctgctcctccaggcaggtgggacctcctctccacacctgcaacatggggctgacaccaggggaacctctgaggcccctccctgtggagacacaaggtcaagcttataggcctgtgtatctgcctagcaatcaaagccagatgcagccatctgggaatgtttaagaacttagaattcttgggatttggcattaatgactaattgtgaagagcaaacttttaaatgtaaactcttattatggtaggtgcctaccatgtgcaaagctctgtgcccagccttgcagagtcttggagaggctcaagaggcaggcgctgacaggggctcaagaaatgaggttgagttgagttgaatgaaacctggtctttgcactcaaaggccctctgtgggaagccagcgaatggctatgagtttttaatggtgggatagatggctcctgctgtggaggtgagcccacaggtgagacagctaggaccagtggccgagtggggcttgatctggccttggaagctgtaagaacatgggtggagctcacagaaggggtgggtgtctgggagtggtgaacagcaggagcgaaggcttggagggcaggatgagccccgtcccagtgggagcagccttggagagaagattggtcctccccactacgtggttggaawactgaggccaggaagagcgatctgagctccgggtcaggtcagggtctcctgctgcyggcctgcctgcctgcctgccttcccggggcaggctcctgggatgtatcaggactcctctgtcttccccattccaggctcggcatggagcatgacggtcaggggaatggctgtgcagatgagaccagcctgggcagcgtcatggcgcccctggtgcaggctgccttccaccgcttccattggtcccgctgcagcaagctggagctcagccgctacctcccgtaggtcattcctgccctcagagctgggataggggagcatgcgacctgccactctgagcagacatcacacagctggctggcttccccacgttgcccctggcttgactcttccgtgactcatctcgcctccccgccaaacctggcctaaaacataccccattagcatagcaggtgggttagtctagtgtttcagaacgtgttcaggtgaccatttacatagaattcttattaaaaatgcagaccccctggctcatggaagatggtaagttagattctgctggggttgggtctaggaagctggatttatcaagcattgcaggtgatacttatgcctgctgaaggttatgagccactgggctgaggcttggggctctaaacccagtggctcctaacgacccctttgagcccacctggccccagcccccagagctgcccgggatcgacttctcaatggatgaacagtgccactgtggctttcccccaggccccaaggaaatgggcatgctgaggagggagctcctcctctccccactcccatccttggccccagcagcacactcccaattccggcctggctggtcagctcctgggtcttcaaggatgttcaggtacagagcaagtgttagactcaggaccttgaggcctgagaatgggaggccaagtggatttggatgggggcaggtggaggcagagatatagtcactagccccgtacaggagctggccagggcggctcgcccagggtccatcttgcatggtaggcttttctccttctttcagtacagagtgagtcctcaaactgtctatgaatcaaccattagtcttggccatatcgtgtccctctarggtgggcaaaatgacctcctaatccagctgcaagctgagtatctaatcccagtctgggtaccctygcctttggctgcaaatggagcccttccagatatagtcactggtgggagtgaggtcctgagtgaggggctgctcaaggcagcccrtcctccctggaagagacagcgctgggaacagaatagcgggtgcaaattcttgcaggccttgctcatgaaaaccccagcccctgggaagggaaagcctgggacttcctgctgtcagcctggctcaccttccttgtctctactggcagctcctacgactgcctcctcgatgacccctttgatcctgcctggccccagcccccagagctgcctgggatcaactactcaatggatgagcagtgccgctttgactttggcagtggctaccagacctgcttggcagtaagtagccatctggcctctgccaggtggttgggggccagggcagtgtccttctgtggcccatgctgaccattcatgaggtgccttctgcccagctggccagtgggcctggtgatgggcccacagacacagtgccagccaccatgcagggatgcagagtgaacacctgtgggggcaggtggacacagtggcttgggaatgcattagccctgggaaagatgggaacagcagagcagagagggtgggcacctgatgggatactgtctggatactgcaagggagcccaggttccagataagttgttgggctctggcctggtggagcagcaggtcccacaccctccggggatgtgccaagtctttcagtctaactccccaccttctgcacctgcacatcacctctctccagagcgtcagttccatgtccctgctgcctgtgcctgaggacatagatacaagggagcataaccttgtccctaccctgcaggatggcacaggggaagactgctgagcctgagatcagctagagtcccctaggagagaactcarcagctgccacccagggcccaggctgagctgtcagagaatgggccatctcaggggtagggggctttctgaagggggcaggccttggggacctgagtgcttcatactacccatcagggaatgcagctctcttcacctccgtggaatggggagcgcccccaaccatgtgtggacaccttccccactgtctgggacatgtggtctgacaaagtgcctgagttgtgggcagaggacaaggacatgggatttcagggtccaaatgctgtacttgtaggatgcttgtctggctggcaggggataagagggaatattaaggaagctatggcttctctggacaatctgaaacgtaaggtcatcaacctctggcatggctgggtgtccaagttacagggaggtggagtcccagcctcgttggagtgctggggtggggggggtctgggctggaaagcagcagtccccttaattctccccatgtgcacagggctcagggcaggggcactgtgaacccagacctccccagagcctcacrccctagtcccagctcagtgacaaatggcctctgtaaagcgggggagggaggccttggagagagaacgacaagagcatgggccatggctaggctctttctcagtgccatggagaaaggaggggtccctggaggctgccggtacttggagttgagtaaacttgaagcaggtgaggggctctggctgcyttccctgcagtgccctgggtgcctgcactcatcacaccctcttttctctccatcactrccctttgttcttggacaaagagccagtccagtctggtgaccccattcccttgccatgcagttcaggacctttgagccctgcaagcagctgtggtgcagccatcctgacaacccgtacttctgcaagaccaagaaggggcccccgctggatgggactgagtgtgcacmcggcaaggtacctgtggggtgtgcagcaggagtggccttcctggggtgcagggcatccatcactggcatgggggtggatcccagagtgaaccctgacccctccctccaagtgcttatatgagttgagggtggtgctaaaagacagtggtgagtccagtgtgtgggtaaatacacgtggagtcttcccataaactcaccctgtcttctctcccagcccacagccctttgtctctgtaattggctgagggtagcatgatctcctagcccatctgacaggaaggcttacttccattttaccaatgagaagaatggggcccaggcaggttgattaaggaactttatggggtccctcagggagtgattagcagagaagggatgcagagaaatctctgtgtgtcctgcctactcccccacccctatgctgtctctgagcatgagacacacgtgttctccccacaccaacctccttcatgaatgtcctgtgtttgctccctcatgcatgtgtgggtgccagggcttcatttgcccgggggaccccgtggctgggtctgaaacccagctctgctctgctgccggccctgcccttgatcactgtggtgaccttgggccgttcattgaacttttctgactcgccaacacctgaccaacctcagggttgttctgaggtaactgactcatgtcaaggcacgtgagggagcagggaagaagccaggtgctaggagaggtggttcctcagcatcagcaggagcccagccccagggccaccccaccagcctgccccctgcctcctgccctagccaggctcctcctattcacacctgtcctgctgagcagctctggggcttgtcctgtcacaggtggatggagcttcccctggcctggcaggtccttgatgggttatagctgttccaggtctttccacttcttaagttttcccaggtgttttcaaagttccagaccctccccagccacagtttcacgagacagttcatcagtggttctctatctgggctgcatattggaatcatcctggtagttttaaaacccctcctatagaacaagaagtgactgcagatgagcayggagaatatttttgaggtgataaaaatattctcaaattggattgtggtgacgattggacaactttgcgaatttatgaaaagtcatcgcattgcatacttgaaatgagtgaattctatagtacgtaaattacacctcattatagtgcctccaaaagttcctacccctagtgattctgactcagttggtctggggtgaagatcaggcatctgaagttgtaaaatctcccccaggtgattccaaggttgagagccactgagttcatctcttgggagatgaactttgcccagagagctttgtgcatttttttcatgctaccctgtaggaaaagggaagggagttgcctctagttgagccctcccttattgcctggccctgtgytaaggcctgtatagatatgagagcagtcccacctaacaggtgggtaaactgaggctcagcaagctaaagtagccacacgtagctagtattgctgagctgggattcaaacccaggaatccttcatgcatacactccttccactgcatgcacagacctccctgcatggctggtctgcctcccagaagcacatctcatgatccctggaaggtgattttgagatacagagccaagatcaactctagctagtgtgggaagattgtgtcttctctcccctatcagccttttattactcccgggtgtgccgataattgcacatttattatcactgttcatcataagatctgccatttctggagggccttgtatactgggtatgatctcatcagaagctatgagcaggtgcagttacccacattgtccagttgaggaacaggcccagaaaggcaagccttttgtttaaggctgctcagctcatgctaggggtgggattctgcctaaacccaggctcatgctcttgctatccctttttctggctccccgggtgggctcagcagcagcagcccagggtgacctcatgccctctgctctgccccagtggtgcttcaaaggtcactgcatctggaagtcgccggagcagacatatggccaggatggaggctggagctcctggaccaagtttgggtcatgttcgcggtcatgtgggggcggggtgcgatcccgcagccggagctgcaacaacccctcgtgagtgtgcttggctagggtggggagggcagggagtccctccccagggcggaggggcttggaggggaaggcactggggagacagtgcaggagaraagggcccctgtgggtggttgtgtatgctaacgcatgaggacacaaacttgttggtggaggcagatcactcctacctgcatccactaagaacyctcaggtctgccttctgtgcgtttgtctgaaccagtggttctcaagctcatgcgcagaagattccccagagtctgggtggccctacttcttcatgcgtgtaacaagtcctctcatgaccccgaccctctggctaaactttgagaaacactgatctaagctctttgttggaagaatcaatttcctaactttgttttctaccacatggagaaaatctccctttaatttttcttaactctttctaacatcaaagctccttcccctcttccccaccccygagttttagcattctgggggagatgtccattctcccttctcatcccctctatagggaccttctccccaactccatggttttgggatatctgagccctagttctccatctccatctccaagcagargcagcctgtttagaacagcaccacgggagatggggactggccaaggccagctgcatggcttggttggctctaggaatgcaggagttctgaacccccacaacaacagggcctggcctgacccctcacagcactgaggggtatgatgaagactgcggaatcgcaaagttgtagggtcacagtggctctggtgtcctcaggagtggtcattcatactgttatttatcgctagggatgggaaactcactgcctattgaagcagctgttcctttgttttagagaatatagccgtatagttaatatggacagctatattgaccttctacacacatgaaccaaaatggactgccttgtaactttcatctgtcgggaatacaaagtctgtggttatagaaaagcccaggggtccctgttctgagtaaatcaccttgcaggcatgaccgacaattatcccttggtataattggtatcaaagctaccatttattgagctcctgtgtaataacaactatttttattttatgaggcttaaatgaaataatatgtgtgctctcagcaccatgctcacacaaattaaatacttaatgaaagctgctgttatagtaatcattattatagtatgtcaagcactttgtgctaggtgggatgctaagcacttaggtacaaaaatctgtgcaattctcccacatgtctatgagtagggtactgttaaccccagcacttggacactttgtatcaagtcttacccaatcctcttgacttaatgaagaagagagcatagatgactataaaataccttttcttactattcttcacagacacaccaggaggtgagtaaaataagagggattatagtccctgttttcaaggggaaattaagccacagcaaggctaagtggcctggccaaggttgcactgtcaggacttggaagccagctcttctgattccaaatccaagtttcttttaccactccttagtttatgatgatattaagtggaagttgatgcaaatgggagtggctgagtcgtttatgggggcctgctctatgccagggcctgcaaaacagttgaaggcacccacaaagatgagtaagatggatttctcttccagtccagctggagagggttagtcagtccctgtgtcagtctgtacatctgtccgtcacactcaccgtggtataggtggtgtatgtctgaagggtaaagcagtcagggaggaagaaggatctggatagctcttcagctgagctccacagcccccaccctgggagccattctctggtttatgtcagtggaggcccttgtcatgctattatgaatggctgagctgctcctggtggctgtgtgggaaacctggccctccccagccttcccagccagcaaggtcatccatttctctgtgtctgtcccagcccagcctatggaggccgcctgtgcttagggcccatgttcgagtaccaggtctgcaacagcgaggagtgccctgggacctacgaggacttccgggcccagcagtgtgccaagcgcaactcctactatgtgcaccagaatgccaagcacagctgggtgccctacgagcctgacgatggtgagtgggccccacccccctcccactccatgtccttaggcatctgcgggggctgtgtgtgcccaggcagggcctcctacccctacatacaccagtgaaggtggagggacagtgggggtgccaaaagggacactgaagtcagcgggctcaccatatacccttttgtaggcctgttcttggtatacttctggggtcatcatccccatcaaggccatccctgatttgtgtacttatgatgacagttttctggcagatgcaaggaaagtgtcttgaggaagggacacttcacacacaggtgttgccaaggccggcagcagtgttggctgttagggttgcctgcctttcgtcttctgtccctacctgcagggagaagaattatataggtgcaggcgcccttcccgttgcatgaccagtgtcctgaggagctcagtcctattacacgctgtgtttttaggttttactgattgggttgtggtttcagcagagtcgatgagatgattttggaaggcacgcagataggatctggtgggatcttcataacgactctctaggctgccctgggacatacacaggacttctagwctcctgtaaagagtctgaatttggggaccatagtggtgccagttcccatctatttttgagtgtttccagtgatggctccatagcggcagagcatccagtgaagggttgggattcgtggcaagtcagagcctcggctggaagagccctcaatgatcctctgattccagctttcccctgccagcctctccatgggtcctccatggacagatgctcattctccatcacacaactcttgrcccagacagctcccatcaggacgggctttcctccctggagcctgggctccaccccagaactgtcagctcttcagctctggtctagaatgacagactcttcaggttggaagggacctcagaggcctgtcattgccagattcttccagagcatccttgcagggggtgtcttctctctgcttggattcctyctactctggggagctcaccactcccttcgcactgttgctgcccagagagcttccgttgctgcccagagagctgcctgcctgggtcaggatcctgcctgtcctgggttggagctcccccagacccaggtccctacaggaatctggttcctgtggatgaaatccaaggtggtcttggaggttgtggcttccgttgctgcctagagagctgcctgcctgggtcaggatcctgcctgtcctgggttggagctcccccagacccaggtccctacaggaatctggttcctgtggatgaaatccaaggtggtcttggaggttgtggctccagacttgagtccttcatgctggagacaaggagttaccagctgtgctggagcccagggaccagagcagagcccaagagtttccttagtaattggctgagggaatcttggtttgaaagccttccagatccattcagaaaccaaaccagcagccacagcgttggggagaggaggggctgggaggcccgtggggcagctggactttgggtttttcccaggactgttagacgaattccaggaagttagctaagcccccaacttccttttttctaagaagcacagtaagtgtttatatatgctctggaacctyctttttaggatatctatagcccacataaagaaggaaacatttaattgttaggaccagaaaggactctctttctccctgactgttgctccattttgcaaacccagatacagaccacttttctgcctttttttcacgcagccttctaatgtttacaaacatgttaagacgcatgtcatacatgtgcacagtgaagttttgtaggggtcagagcaggactcaggcaagactgctaaggttagaatccaggctgaaccacttatcgtgtggttgtgtggacttgagcaagttccttaacctctctggtcctcaatttcctcctctgtaatgctagcacctacctcattgaggtgttgagagggttaaatgagttaattcatgaaaagccattaaagctgtattttaagggcatgtgaaggttttagaaatatctagtacatagtaagcattcactaagcattggcttattattactttatcacttgatttttctcaataagccgatgtggcattttactgattagggataataaaaatagggaacaaaggctgggagaggtcagagcatttacccaaggtcacatggctaataagtgacacagcagggattttcagcccccgtgccacacccagtgctcccccaactgtccagagctggccccggagctttctggctggaccacatactgatctgtcctgggccactttctctgagcccagctggggactcagcatagtccctytccctacagacgcccagaagtgtgagctgatctgccagtcggcggacacrggggacgtggtgttcatgaaccaggtggttcacgatgggacacgctgcagctaycgggacccatacagcgtctgtgcgcgtggcgagtgtgtggtgggtgcacccccagccaccccgactaccggcacagggagactggagggctgcactgtagcccctcctgcctgggaagatgagcattgcctcaccggcccactygcaacaccctgttggtcctcagcatagccctggggtgctggaaggggctaattattgctcagccccattggaggggagaggagatggcaagaatcctcatcacgccgggtgtaagacctcacccaggtcccacggtgaattcgtgccagaatcctgtccagggacatctcccaggccagaggtcttctcctgaccagggcctggggatgggaatgggagccccggggtggcggtgggggcaggggagcctcctcccactgacctcacctctggcctcagcctgtcggctgtgacaaggaggtggggtccatgaaggcggatgacaagtgtggagtctgcgggggtgacaactcccactgcaggactgtgaaggggacgctgggcaaggcctccaagcaggcaggtgagccgggctggggctggggggatgacgagggctgactggagttcttgccgtccctcagggggccctccctccttgaactgtgccacagtctggggtggggagaaggggccctggggcccatctccaggcyttcctgggytgcccaggctggtgagccaggtgctgcagccagtcacctcacctttcaggcaagctcctccctgagtttggggcccaggagctccaagagacattttcccgctaggtaaagttttgtgatgggagctcggccatcccttggaccttgggactattggtgggtgggaggcatcagacagatctaaaggtgtagccaagactggactgataattttcttttcctctctccttcctyatttttttttaaacctgyggcactttctgcttygaattcctggtatctttgagttccttgactttcctctctacctccaatctgaccagacttgctgtggaaaagaaccagatatcagtccttcacactttagtataaatggggcctattttcccttgggagatgttacactttgtctcacctttgattgttggggacaaggttggtggctctgagaaagtccaggccttgggtygggagggccagggcggctcaggacagtcatgtggagtcttcatggcctttatcatttaaatcccatcagtagcaagtagcttaaggtgtgagaagaagcagggagagagagtcagaggagcaaaaagggacggggggaagggcagaagtgagacggagaggaagagggtcaggaaagagggaagtaatagcagctctcacacacacrgaggcccttagagtttacaggacatgtctcattcgatcctcccagcaccctcatggagaaggtctcatcctcagtttacaaatgaggatacagagattcagagaggttctgtgatcaaatgagatgttcctrggtgcccagtgagggagtgggggaygctgggcagtgggaccaccagcttaggatgctcackacttctggatccctgtgtgtggcaggagctctcaagctggtgcagatcccagcaggtgccagrcacatccagattgaggcactggagaagtccccccaccgcattggtgagtgctggggtgctgggaggggacagcagggccccaggccctgccctctgacttgggggagctgggagaccagaggacaagattctagtacaagtggaattgtactaactggagtaatgggcagagacccccttttcattttrttttaaatttatgctgcrtgggtaacccattccayggtttacatttcagaaggtctcaaaggggacctagtaaagagtcccctttctacccctgtaccctgggggcrgttttcttccctaagggcaactactgttaataatttmttgtgcacatagatggctgttaaaggaaagccatgttcacagagtgtatcagtcagcttttgctgcctaacacaccactccaaaacttagtggcttcaaacaagaataattcttagctcacggtcctatgggtcatcagtttgggctgggctctgtggggtggttcttctacttrtcttcttggaccaagtcatgcagatgccctcagctggtaggtctctgggagctggttggtctaggatggcctcgctcacatgtctggtggttggtactggctgtcagctggggtcatggaggtggcagggctgtgtcctcaacaggctaacccagtgttattcacattatatctgtcacatagtcctcaggaatggcttgtgtcatgttttctagcgtcccattagtccaaatcacatggacaagcccagatttaaggggtagaaacatagactagctcttgatggtagaagtggtgaagttactgtgcaaagcagcatgcatagaggaataggaggaatgtagaggcattctgcagtctaccacacaggcccttacattattctcattataatcatacttaaacaccaagccactaaatgaggtgacacccttgtgcttgtaacagttatctaactatgaagcyaggctcgattaaaaatgagaataccacaataagttaataaatttaaattaaggccattaatataatatgagtgatgttttgtttcgtttttgctgaaactaaattggctgtcaaaaaatggacatgtccagagaggcaaatccacagacagagagagaatagatcmgtggctgccaggggctggggaaggaaagaggcatgacggctaatgggtatcaggtttctttttggggcgatgaaaatgttctggaattagacagtggcaatggctgaatctacttaaaaatcagggcaggcgcagcggctcacgcctgtaatcccaacactttgggaggccaaggtgggtggatcgcttgagctcagaagtttgagatcagcctggggaacatggtgaaatcccatctctacaaaaataaaaaataaacaatcagctaggcgtggtggtgcatgcctgtagtcctaagctagttgggggactgaggcaggagcgtctcaaaaaaaatttttttttcactgaattgtacaccttattcgagtgagttgtatggcatgtgaattatatctcggttcaaaccctgtgagcctggttcagagcagggtcccggtggcaagtgggcagaaggctgcttctcccacactgggcagtggtgtctgtgttcagacccctttgcagaggacgtgcaggccacaatgtccccttgaaatgtcacagaggcccctcttacctattacgtctgccaagtcacactgcttggtgccaatttcatcataaatggaaaaacaaaacacatatctcttggcaggctcacatcacacacaaatgctgccattcatatttttagattatcatcaaaatagcaatttgtaaataccttcaaagtttcctggataacttgcatttcctggagaatgcatctgcattggcacctccccttaacacagctccagtgggctcctaaacttctattmttgaaggcatctgaaagggcattgtcccatcaggccataggcacaaggggaaactgaaacccaaagtggattgggggcctctgtatgccctgattcatccatgaggagtatgggcagagccagtctgggcccaggtctcctgcctctcagccctgttcccttgccagccatgccactctaccacagcgagcccaggttagaggacattggttcaggcaagtcctgcctgctgtgcctgcctggctgtggggaatgtgctggaattaggggccgggggagggaaggggcaaggagagaagggacatctattccaagaagaggtggagctcacggacactgcatccccaggggatgatttcagaacattagcagccccttccaccctctgctgtctccagaaatctagttcttcgatccccagggaagaactagtcttctgtggaggtcatggcagaggctgctagcatccggggcaggcygagtgcgggcttgcttgcctgtttgtcgggtgagttccctgaaaggttagagttttccggggagcctggtggggagagcgaagcagkggcggcccaggagctgaactctgaagttggcacaggttgtgtgattatacaggtgtgaggtgyacagtggccttcagtgaaaacgtgtgaatatgtgtgtgtgagtgtgtgcatgcacrtgcatgcacgtgtaggggtgtgtgtacccaacaggatatgtagaggcccaggacaggtggcagccctggcgatgaagggagaggctctgtccattgtcattagactctcctggaattggggacatggggtctttgaaaggaagtgtagggaagagaaggagaactcatgctgttaatatctcccatgcgctgggccatgagctgccacttttcatgcgtatgtttagtaagcctcatggccatctatgaatattgttttcccgctttgcagttaaaggaaactgaggctcagagagaggttagatacagaacaggtcagtggtggagcctggattcgggactgggtctggacagtggagagtttatggtggtccacccccaacggtctggaatgaggggtgcataatcagggctctgctacagtgaggtgcaggcacagtcaaaggcaatgggagaactggaggctgcacctggcctgaggagctgcccagccttagcttagacagtctggagctgctggggactgagagcgatcagggaacctgagggagaggcctgggtgggcaggaggcgaggggcatctctccagcagcctcccaggaaggggcgaggctcttctttttccacccctcttccccaccctcaccctgcccctacattgctcctgtctctctgggtgcctgggctctggcccagctccaactgttgcccactgtgtgtccaggacactgtgtgtctaggagtctccaattccccatctgtattaacaatagcccagcccttaggatgtatttaaggattgaactgaagcagttggcagagtgactggcacatagtgttctcggatccttagctcttatatgacagttatgaccatttaaatctgtcccaggtgggagctctgtgggcccttccacctggacaccccaaggctctggagcctttgccctccctacttggctaaggtgcttgggtctcaggctgctgggccctaggaagtccagggtggccaaaggtaccactcaggggccttggccaggtgttggcatctacatgtctcccacccacctgcctcccggggtcttttggtaataagttgtgagttactcactgactgggacattaaggggtagaaatttatggatttttaaaatctctgcctctgttccaggccctgtgctgggctgaggrcaccaagatggagataagccaacaggccgctgggagaggtgtggcatctgcaatcacagcagtgccaaaagtccagtacttttctggtggtctagcgatagtgcccactgcgcatcactacttgccaagctggctatgtttatgaactcttctcgttgtcctgagagcctcagtcgtggggcgcggggatttctatcatcctcctggggcagcagcagccctgcgaactgggtacaatkatcattcccattctacagatggtgaaactgaggcagcacagtggggctgagtagtttcctcaccatcaatccgactccagagtctgtactctcagcctctatgctctgctatagaaattctagggagggcagaatccctgaggactgggcaaccaaagaagactccctggaggagaggagattatgctgagcctcaaccatgggtagaggttagttaggcaggaagaaaggaaggcagtaraggtgggaggaatggtgtgcactaggatccagaggcagcaagagtgtgtgtgtgtgtgtgtgtgtgtgtgygcrcgcacgtgggtttgacagggagcgtgttgacctgtctgactcgggagggcttgggtgggaaggaaaggccggtggacaggagcccagaaggctcactgggaaggccttgaatttcatattcatggcccgccccctgtggagaggagcagaaatctgtgtgaccctctccccccaccggtcagtggtgaagaaccaggtcaccggcagcttcatcctcaaccccaagggcaaggaagccacaagccggaccttcaccgccatgggcctggagtgggaggatgcggtggaggatgccaaggaaagcctcaagaccagcgggcccctgcctgaagccattgccatcctggtgagccccactctgtgcggtggcaacccctgcccaccccacttgtccccttagctcgctacatctgytgccaagccagcgtgacaccattctggtgtctttaggagcctgggcaagggcaaggcaccttccatcctgggattagctcctcatttgtgcttaaaagcctgcaggatggcaagtgaggagagataaagacagttgtctcctcactgtcagaccccagatgttacatgcagggagcctgctctctttaaggcagtcttggaaatggagcctggagggaggttgggcagggctgggtcatcctggcataatcccacatctgtgtgcatcrtagcatggctggcaagggagtccaggagcagcttcctcgggcctttaatgcagctgatccaggagctccagcctcctgaaaaggggacaagagcctgactggggcacatctctgcccataccccccttcctagagcatgggccagggcttgtggaatagggattaacccagcagacgagaccatkaggagttctgtccatggtgccctcagcaytggctggtggcagggttaccttggatgggctttgttcctggtgtcaccctcaccagctggggggctcctggaggacaggctctgtggcctattggtgtcagcatatcaattcaatccagcatatacttttgactcaccttatatttgttgacaacccatacatctatggccaggtgattttcaacaagtgtaccaaggccattcaatggggaaagaatagtctcttcaaaatatggtgccgggacacctggatgtctacatrcaaaagaatgaagttctaccccttcctcacaccatacacaaatattaactcaaaatagatcaaagacctagatataagagcttaaaccatacaactcttagaaaagaacagaggggcaaatctttatgaccttagattcttagatacgacaggcactaaaagcatacacagcaaaagaaaaaatagataaattggacttcatcaagattgaaaacttaagtgcatcaaaagacattatcaaggaaaggaaaagaccacctgcagaatgggggaaratacttgcaagtcatatatttgatgagggtcagtatccgaaccattcttrttaactgccttctagagccaggcagtgtggatgctgcagtgagcagaacagacagacagacagccagccctgccctcccatcagaactgaggtctatgaaagggaagagcattcctaggtgcagtggctgcccttgggcctggcacacagcaggtatccagcctgagtttgtcctatgrcagctggtctgaatccaaycccctaccataccccagccatgctgggcacaacctcatcctagctttcacaggttctgctccgaccctaaggccttctcttcggcccctcccctcccagtgcatgccgcccttgcttctttctctggtcctgtgccagctccccatctccyctcaggctctccccccaactgagggtggcccccgcagcagcctggcctacaagtacgtcatccatgaggacctgctkccccttatcgggagcaacaatgtgctcctggaggagatggacacctatgagtgggcgctcaagagctgggccccctgcagcaaggcctgtggaggaggtaccggttccctgacccgccagtgctttgttggggcagcccaggatcccttgagaggcaggggtgggggactgatgttgtctccatttgatgtgtccttgcttatgactcagtttctccttgaaratctccagtgtgtggaagcccgttttgggcagggcctttgggatgaggctgggggtgctagagccatatccgggcagagcttctaccctaaaagagctcacccactgtggggacagacagctgtccagagccaccttcttaccagcgagatggagctgatcaggaaggcgtccctcagaaagtgacgtgggcaggcgggggcataggcagagggaggtgggattggcccacaaggctctccacaggtactgcccctgaggccccaccagggcaatggggggcctggctggactaggcccacggcagcctgcccaccccatagggatccagttcaccaaatacggctgccggcrcagacgagaccaccacatggtgcagcgacacctgtgtgaccacaagaagaggcccaagcccatccgccggcgctgcaaccagcacccgtgctctcagcctgtgtgagtgctcccagggagggacggggagtctggttctatgcctagcccgggccccaggcagcggggctgctgagcctgctcccctcagcactgggttatggagacacgaccatacaggcaacacaactttcagtgcttctgggctccaggcccaggccaggatgctgacctctacctcttctctgcctgatygtcaggagtccagagacatggctcagcctgccagcccccagccatggtccagcccctaattgggattccctggcttgcggctacatgctcttctgagcacaaggatgaycttgggattatttaggggagagactttggggagaggagagagctatgcctggtggagggctcatggccaggcctctgaacctgttgcagagccggcctcaagacctcctcagcctccaccaggcttccctagtacaccccaagcagactgaggccgagggtggctggctggtagcagccacagagggcatcgcccatcctcctgcttccccaggagtcctccctggtaggcgtagggtgctgcctgggtctcgtcagcttctgctcccctgggctgggggagccccagggctgggcatgtaattggggcaagggtgggaaccggtggccagcgctagaggctgctgtggcctccctgtctgtgcccaggccaggccatgataaccagcccctcctctgcccaagacagcttcataaccagccccctgtgcttctctttcacttgttcctttgtattgttattcagactgattttcccacaaatgcctgtaatcacagaacatgcagtttagctctgcctgagttcctggccggtatcccccagcccctacccctttggggttttaaggaagaggttgacttaggaaacctgcctggaagtgactaaaagatgccttgggaacccagggaggagtaggagtcgaggctctccctccttccatcctcaccagagcagtttcgtttcctctaatgcacccagtgggcatgcgcttaagatgctgttggaagttgctcagtggctaaaagacacttgcaggccaccagcatagctactctatgtggaagctctgtggatgatgatggtgacagtaacagtgttcttgtcccaggagccccatgggaaattgggggatctgccttgaaagtgtggtttgatctgttttgtgccctgacgcttctcagcacccaggacagtgcttgcgccagtgggccctcaaatatgtatgcggctttgaagtaatcgtgatgtgaagatggggtaactgagrcttagaaggctaatagcttgctcgaggacatgcagggtgctaggatttaaatacacatcatgcctgtttttcagacgagacacagcaggagagaagagtgcccttcctgaggtcacatacccagtagctgcagagccaggtggacagttgtcctaggcctcaaacattctgaaacccaaacccactctctggctcctgcctgcagctgtctggggatagaaagtgtcctctgggatgaagtgyccccttggtctcacctcctctcctttcaccctgtttccaggtgggtgacggaggagtggggtgcctgcagccggagctgtgggaagctgggggtgcagacacgggggatacagtgcctgmtgcccctctccaatggaacccacaaggtcatgccggccaaagcctgygccggggaccggcctgaggcccgacggccctgtctcygagtgccctgcccagcccagtggaggctgggagcctggtcccaggtgacttgtcctcaggaggtgggaggggcttggggaggaggtgggtctgagggatttttttggtgttccctgcaggcaagagagtttctgcctgaatggctccccctacatcaaattttgttttccttaaagtagaatagctcctacgtaccctgggccgtggctctgtgctaggcctttaggttcattcattcctgccagtaagcttcacacagtgccaggaggcatgggttcatgtccctgtgttccagatgagcagactgaagtacactcttgcattccagaaatacttgctgagcactagctgtatgccagaccttgtactaagaatgagggaacctagcatcaaccagacagagctgattcttgccctcgtgcagcccacagtcctgtgagggaaatgtattaggccatcaacccacagccaagcactgacagactgcagtcggagctgggtggggagtagtgggtcratgtggtggaggatggagggcggtcagagggcttctctgaggaggtgttgctcaagctgagaccagagggacaagccacaggaagagaccaagtcaggaacaattttacaacgttccagaagccaacaggacagtggggctggagctgactgggagggatrggggctgcgagataacactggggaggcaggcgggggtccatggctacgggctttgcaaggggtttgcatatattctaagagcaatgggaaaccagggaagccttttaacatgggcattacaagctctgatttcaggttgtaaagatcactctgacggtgctgtggaaggttgagcgttagacagtcagggtagcgaaggggagatagcagtagcgctgcttagttatttgggtgctctgtggctcagaccctggaggyyaccttsgggaaactgccttgacgaaattgtcttgggttttcttttaaatactcatttgatgtgaacattgagaacatcatgccaagtaaaacaagccaagctggatgcagtggctcatgcctggaatcccaacactttgggasgctgaggtgggcagatctttgggrggctgatgtgggtggattgcttgagcccaggaattcgagaccagcctgggcaacakagcaagacctcgcctctacaaaaaatgtaaaaagttagctgggcgtggtggtgtgtgcttgtaatcccagctgctctggaggctagggtaggaagattgcttgagcccacgaggtcaaggctccagtgagctatgaccataccatgccrctgcactccagcctgagtgacagagcaagagcttgtctcacaaaaaaaaaaaaaaaagaaaagaaataagccagacatccagacatgtaaggacaaacactccatgagggcactttgctggtgatttccaggggctgstggagggtgaatgaggggttagtgtttaataggcgaggagtttcagttgggaaagaagaaaatgttytggaaacagatggtggtaatgattgtacaacaatgggaatgtgcttaatgccaytgaaccatagacttaaaaatagttaagatgggctgggcgcggtggctcacgcctrtaatcccaccactttgggaagccaaggcaggcagattgcctggggtcasgagttcaagaccagtctggccaacatggtgaaaccccgtctctactaaaaatgcaaaaattagccgggtgtggtggctggcgtatgcctgtaatctcagctactcgggaggctgaggcaggagaatcgcttgaacctgggaggcagaggttgcagtgagccaagatcacgccattgtattccagcctgggcgacaagagcgaaactttgtctcaaaaaaagaaaaaattagttaagatggcaaactttatgktatatagatrttaccccaatttaaaaaacctcatttgatcacaatgmtgtttattgcaacagcaaaacattaggacgtatctcaaatgtttatctatagaagattggacaaaaatcatggtctgttcatayaatacagtaytatacaacaagaaaaaygaacaggcctgaactgtacttaccaaaatarataaacttctgttatagagaatacatttaggtgagaaaaagtacttcagtatgaagtaaaaaagcacttccaatggatgtcatttccttaatgtttagagggacacaacacaatctgaaaatattctgggatgctcatttattaaggctggtggtggcatctggatagggttttgtgaataactccatacttttctgtattttgaaatattgcattatgaatatttgtaaagaaccaaaaatccacacacaactcatgcattttatatgtctccataatatatagcttcatttgttttgatataraacagattgctggtcttcaaaggaccccacagataaaagtaacagagagatggcagatagtggaagatactggccctgtcgcaataagcaaaatatagagatgaatctctaaatttaacttttattaagtaagaattgcaattcaaggcatacacagagaccgggtggtcttcagtatgtccaaagaacaaaggaaaggttgggggttttattagaaagagacatgatatgtattgtgttgaacaccaactcattggcactagacaagcttttgggagctggcaagctctgactggtgagtgatggtgctatggaaaactagccgtggagtcacagcaggttgtttcagcagctgctaggtaaaactggtcttggaattacatcagcctgtttcagcagctggcccagtggagaatttaattcttggagcaggtgctaggtgccctgagtgctttttcccctggtccctcaactctgatttagttgggtgtgacaagtatgaccctattcatataatcaactttcacagccccttatgagactgactgagcagtcaggagctgttagctgctgtttgtaatgattcatcctgggaggatatgccgtgtttgtctcgtagttctgtgtggccccatgacccttgtgtctcagtggtcacwtgctccagtgtgggaagtggggtcctgcaaattcctctccttccagctagrtaaggctgtggtcagcatctaaaaggtgacccagtcacactgggcaacgctgctttcctggagtccctgcccctccattgaggacctccacattccctgtttgtcagagtwagagtgggtcaggtccaggggacgatgtgtgtggccaccccctgcaaacggtggtcctcggtcctctggtgcctcctgctccttgtacccgcaccctgctccatcagggaagaagacacttttgaacatacttctgcaggcccatgtttggtaaatcaagtcacaagattattgactatcagagctagtcagaggagggtccatggagaccctgtcgcccagctctctgtttacagagtaagacacygaaccaggggtggggggtagcagaagccacaatccaggcccctatatcctgttaataggatatcatcacatcaatccacctgcccaggtcacaccatgtagtggattgcaacaggggagtttgctagagtgatacacaaaatattaaagaacccaggcacagaccagacacagtgcatgcaggtggtagtagggaatggggycccagaggttccctcctgagccagagattaaccgtttagattgtggaaaggcccatggagttctaggctcagggcaatggctcttcaccattggtatcaggactatttggcaacagrtacagtgtcccactgaggctccttagaagcagtccttgcatgtccctctggtcaagtgaagacttggtgctctcctttgtaccctttctgtccccgggcactggctgggctctgagctcactgactcgtctttcttctctccacctaccctgaccccggccgctatgcctggcactgacccacccacggcagtgctctgccacctgtggagagggcatccagcagcggcaggtggtgtgcaggaccaacgccaacagcctcgggcattgcgagggggataggccagacactgtccaggtctgcarcctgccygcctgtggaggtgagccagaggggatggggaggccaggtccagtcccttgggccaaagtcccaaatactagaattgcttcttcctgctcacaggaaatcaccagaactccacggtgagggccgatgtctgggaacttgggacgccagaggggcagtgggtgccacaatctgracccctacatcccattaacaagatatcatcaagtaagtacagtctatggaccctaccctgctcccyagacctttcagtggccctggtgttgcagcatgggccactcagtggagcaaacccagcttgtagctgtctgtgtgaccttcacctccctgagcctcagatacctcagttatgaagtggggaggaggctctactggtccatgagccgttacctgcaattccaaaatgtttatttctaagtttggtgcaaacttacctggcagcaaaatctgacctgaactaatgagatcatttattcttttgatatagaaatttagccatatttagttacaaggtgatatctcaggctccattgaggatgttctataatataaacacagaatataatgtttctgatcccaaaagttctgaattctgaactatatctggttccaatattttcagacaagcaattgtagatatgagctgccttcatagggctggtgagataattggatgagagaatgcatgcactcctgtctggctgtcagcttccagtaacaataggcctagcaatttctctcagccccatgattcagttcatcctcccatctttccattcatccacccacggatagatatttactgagcaactgctacgtgccaggctgtagattcttcactcctttcctaggttccatctctcttttccttcctcaccctccctaggaccagggtctggcaagatgagtagcagaaagatcaaagaccctaactcctagttagaggaccagttggctgcaaattcgttaacctctctgagcttagtgacctcatctgtaagataaggttctgactagatgtcctcaaaggaccttctacctccaatcttctacttctctgctcctaggctgaggttctgactgggggagtgcctgggtttcctgccgtcttccttcccaaagcaaaggacgattccgattctggttccagaaatctggcgccatctagaggccactggctttccatttttctctgatctttctcttgttcccctaagcctgcccctccacctgtgtctctctttccctctgtccctcccactcttcccacctccctctttctctctctctctctggcaaaaattagtagaaagcaaagctcctgccttcacattctgtctggagaagcctacatggagttatcacagaaaggtgtgatattttgggcaaagcaaactagtgtaatgagcacttatctttgccaggtgctttaaagatgttgtttgcaatgttattattcactggtaagggtcaacatcagccccattttatrggtgaagcaactgaggcttggagggtttaagtgacttgccaaaggcctcacacttttaagtggtagagcctggatttgaactgaaatctgcttgattccaaattaagcagtagcagtcttaatgtcccgatgtgtgctgactgtggcaggatggtcagtctgcctgtcccaagcatgagttgcctggggtctagcctgaccctggctggagtggggccagactccttgggttgattgggaggggctagggttcccacttccatccagarcagctgcaagttagaagcacctggtggtaggtcacaccctagattgtccagtgtgtgggtgaaggagacaggcacccccaaggattccagtgtgcagcagggctgagggcgaatggcgaagggccagggttctcagatgcgcccacaygtggagtcccctggagggcttgtgaaagcacagcgctgarccccagcctgagtttctgatgcaatagggctgggtggtgctggaggatgtgcattgccagcaagcttccaggtgacgctgctgctgcgtgtggggayatcactttgagatctgctgctctaggggattttacttcctcttccatgtagtcagggctsactctcccgtcaggtggctctgtagcccccaccctgagaaaaagctttatagtgggtccagcaggggcaggggtggagggcgggcagtcagtgggtaagtgggagggggggccacctgactgacaggcatccccacgttgcttccatccttgtccttgtgctgtgtgtgcagcggagccctgcacgggagacaggtctgtcttctgccagatggaagtgctcgatcgctactgctccattcccggctaccaccggctctgctgtgtgtcctgcatcaagaaggcctcgggccccaaccctggcccagaccytggcycaacctcactgccccccttctccactcctggaagccccttaccaggaccccaggaccctgcagatgctgcrgagcctcctggaaagccaacgggatcagaggaccatcagcatggccgagccacacagctcccaggagctctggatacaagctccccagggacccagcatccctttgcccctgagacaccaatccctggagcatcctggagcatctcccctaccacccccggggggctgccttggggctggactcagacacctacrccagtccctgaggacaaagggcaacctggagaagacctgagrcatcccggcaccagcctccctgctgcctccccggtgacatgagctgtgccctgccatcccactggcacgtttacactctgtgtactgccccgygactcccagctcagaggacacacatagcagggcaggcgcaagcacagacttcattttaaatcattcgccttcttctcgtttggggctgtgatgctctttaccccacaaagcggggtgggaggaagacaaagatcagggaaagccctaatcggagatacctcagcaagctgcccccggcgggactgaccctctcagggcccctgttggtctcccctgccaagaccagggtcaactattgctccctcctcacagaccctgggcctgggcagrtctgaatcccggcyggtctgtagctrgaagctgtcagggctgcctgccttcccggaactgtgaggacccctgtggaggccctgcatatttggcccctctccccagaaaggcaaagcagggccagggtaggtgggggactgttcacagccaggccgagaggaggggggcctgggaatgtggcatgaggcttcccagctgcagggctggagggggtggaacacaagrtgatcgcaggcccagctccyggaagccaagagctccatgcagttccaccagctgaggccaggcagcagaggccagtttgtctttgctggccagaagatggtgctcatggccatactctggccttgcagatgtcactagtgttacttctagtgastccagattacagactggccccccaatctcaccccagcccaccagagaagggggctcaggacaccctggaccccaagtcctcagcatccagggatttccaaactggcgctcacyccctgactccaccaggatggcaacttcaattatcactctcagcctggaaggggactctgtgggacacagagggaacacgatttctcaggctgtcccttcaatcattgcccttctccgaagatcgctcctgctggagtcggacatcttcatcttctacctggctcaagctgggccagagtgtgtggttctcccaggggtggttggaccccaggactgaggaccagagtcyactcatagcctggccctggagatgacaagggccacccaggccaagtgccccagggcagggtgccagcccctggcctggtgctggagtggggaagacacactcacccacggtgctgtaagggcctgagctgtgctcagctgcyrgccatgctacctccaagggacaggtaacagtcttagatcctctggctctcaggaagtggcagggggtcccaggacacctccggggtcttggaggatgtctcctaaactcctgccaggtgatagaggtgcttctcacttcttccttccccaaggcaaaggggctgttctgagccagcctggaggaacatgagtagtgggcccctggcctgcaacccctttggagagtggaggtcctggggggctccccgccctccccctgttgccctcccctccctgggatgctggggcacacgyggagtcattcctgtgagaaccagcctggcctgtgttaaactcttgtgccttggaaatccagatctttaaaattttatgyatttattaacatcgccattggrccccaaaaggttgtgtgtgtgtttctttttctctctctgatttatgggaaggggacaatgaagccagagctcgaaggttgagggctgggctgtagcaagagaactgggggtgggggcgcagctcactgtggctgtctcctgtccctccacctttccacccatgccctgctgcgtcactgccaggtgggacacagggttgccactggtttcttggctactgaatctcctgtttccctgaggcccaagttccaggacaacactttatttcaggttattgtgaaattctcaacctgtttaaatgcaactagaggccagtggggcagagtggctcatgcctgtaatcccagcacttttggaggtgggagttccagaccagcctgagcaacatagcaagatcccgtctcaacaaaaaataaaaagaacattagccaggcgtggtgttgcacgcctgtggtctcagctatttaggaggtggaagtgagaggatcccttgagcccaggagtttgaggccacactgagctgtgattgcgccatggcactccagcctgggtgacagagcatgaccctgtctcaaaaacaaaaaagaacaacaagaggggctctctaaaggaatcttagcaaccacagaacaaagagactgtcactgaaagcaaaatgactgcaaccacttttgccttctaagcagtggcagaatttgtgtcatggagtaaaagaatctacactgctgggcacttagaaaaggtgaagctggcaaaagggcttcttgtcattgtgcagagctcactcctccccttaaggccgaggagaaaatggtttggagactcctacccccgtgggggtgggaacacagagagggcagcctctccatctgtctttggctgggggctttttaggatgcaggttgtctaatatgtctaaggttcaattaaatttctgttgccatctccccaaacatctggaaatgtccactctccaaattgagggctttttatgggtcaggatttttgcttgttttggtggaaactgagaaaatgaaaggattcacgggtgaagatagaggaacagcaccaagggccctctttccatcgcagcctcagaaacatccctcacttcctgtaggagcccagtgggaaaggccatatgggaatggtctcacctcttcctgccctaaacggtttcctgtttggagtctggtgggtgcaggtgccagggtgccagattgcctgtctcttccctggaggggattctccaggccactctgacttcaaggctttatccacacctgccccatgcttggcagagccctgccgcagtgacagccaggtgcccagagtctagcctatcagccccgactggcttccagagcctttgccctggkctgccaagcttcctcaacccatagccaggggccagcacacctgtcattttggaggaagccccctgaagttccagcatctccttgcccttggggtcagtagggacagtgctgcacagagtcacccttagcctcctgttcaaagagcctgggaagtcctcaccatggctgtcttctgtgtccagatggcctccttgaggttccagcctgtgacttcatttgggctagtaaggcctgaaagctcctggtggagaagggatcggggggatggcaagggtttagggacagcaggagacttaccttcccattcctccagaggagaaaaggggcaattggagcctcatcatgttcctgggaaatagactggcctctgggcccttttttgatttaccctcctggtgaaactccaggccttccacctgaaatgacacagcaggcaggggaagaggggaaggcacagagcctgggccatctgacctggaactctgtgggctcttccaaagagcccctgctccctacctggcttcaggagactgaaggcttgggggaaggtaggggtctggggggaggagggaaagagcaagaaggggtggaaatgtagctggggcagtcccagggacccagctgccacagattagaaatctctggggcctacaccacaaatcttctcctttaaaaaattatgcaagaaatatatgctcattattgaaaaattttacaacctgaggaaaaaaaatctataattctacttagcaataaccactgttaataatttagttatccattccagatgtgtgcatgtgcaagattgtttgtgtctgtacacacacacatgcacgctgggtgagtattattaatactatacacatacacgtcatctgggatcttctccccctcctaccccacctacagcaatacaataagaacacgtttccatcctgagctacgttgaactacgtatttttttttttttgacagagtttcgttcttgttgcccaggctggagtgcaatggtgcgatctcggctcactgcaacctctgcctcccaggttcaagtgattctcctgcctcagcctcccgagtagctgggattacaggcatgcaccgccactcctggctaattttggatttttagtaaagatggggtttctccatgttggttaggctggtcttgaactcccaacctcaggtgatctgcctgcctcagcctcccaaagtgctgggattataggcatgagccaccgtgcccagccacgtcttcatttttaatgactgcacagtaccccacggtatggctagatgaccatttatttaaccaaatcccccagtaccataaacttcctgtacagcctgtggaaccatgagccaactaaacctcttttatttatgaattacccagtctcaggtagttctttgtagcaatgtgagaatggactaatacagaaaattggtaccagagaaatgaggcattgctataaagataactgaaaatgtggaagcgactttggaagtaggtaacaggaagaggctggaacagattgaagggatcagaagaagactggaagaggtgagaatgtttggaacttcctagagatttgttgaatgttgtgaacaaaatgctgatagtgatatggacagtgaattccaggctgaggaggtctcagttggagatgagaaatttattgagaactgtagtaaaagtcactcttgctatgctttagcaaagagacagggagtattgtgcccctgctctagaaatctgtggaactttgaatttgagagagatgatttagggtatctggtggaggaaatttctaagcagcagtgttccagaggtgtcctagctacttctaacagcatgtactcatatgcgttcaccaatacatggtctgaaattggaacttacatttaaaaggaaagcagagcatagcagtttaaaacatttgtagcctgaccatgtggcagaaagacccattttcttgggaaaaattcaagccagctgtagaaatttgcataagtagaggagccaaatgttaatagccaagacaatggkgaagatgtgtcgagggagtttcagaggtcttcatggcagcccctcccatcacaggcctggaggcctaggagggaaaatggtttcatgggctaggccaagggccccactgtcttgctcagcctcaggacatggcaccctgagtcccagtcgctccagctccagccatgactaaggtccccaaatacgtctcaggctgctgctccagtgggtgcaagccataagaagccttggtggctttcatgtggtattggccctgcaggtgcacggagggcaagagttgaggcttgggagtctctgcctagatttaagaggatgtatggaaatgcctggatgtccaggcagaagtctgctgcaggggcagagccctcatggataacctctactagggcagtgcagaagggaaatgtggggttggagtccccacacagagtccttactggggcactgcctagtggagctgtgagaagagtgcgccgtcctccagaccccagaatggtagatccactaacagcttgcaccacgctcctggaaaagctgcaggcactcaatgccggcctgtgaaagcagccaagtgtgctgtaactggcagagccacagtggtggacctgcccaatgccttagaagcccacttcttgtctcagtgtagcctaaatgtgagacatggagtcaaaggagattattttggagctctaagatttaatgactgcccttctgggcttcagacttgcatgggggcctgtagcctctttgttttgaccaatttctcccatttggaatggaagcatttacccactgcctgtacttccattgtatcttggaagtaactaacttgcttttgattttacaggctcataggtggaagggacttgcttagtctcaggtgagactttggacttttgagttaatgctggaataagttaaggctttgagggactgttgggaagacatgactgtgttttgaaatgtgaaaaggacatgagatttgggaggggccaggggtggaatgatatggtttggatttgtgtccccacccaaatctcatgttgaattgtattcctcaatgttggaggagggacctggtgggaagtgattggatcatgaaggcagatttcccccttgctattctcatgatagtgagttctcatgatccagttgtttgaaactgtgtagcatctcccctttcactctctttcctgccatgctgtgaagacatgcttgcttccccttcacccttctgccatgattgtaagtttcctaagccatgccttctgtatagcctctggaaccatgagtcaatgaaacctcttttctttataaattacccagtctcgggtagttctttatagcagtgtgagaatggattaatacatacatttatttaagcaaaaagagaaaggtaaatttaaataaacattaaggaagcgtataggtggtagatacttctaacaaggctgggtgtagtggctcacacctgtaatcctagcgctttgggaggtggaggtgggcagatcacttgagcccagaagttcaagaccagcctgggcaacacagggagaccctgtctctacacaaaaatgcaaaaattagccaggcatggtggcatgtgcctgtagtcccagctactgaggaggctgaggtgggagaattgcttgagtccaggagtttgagactgcagtgagctgcactccaacctgggccacagagtggaacatgtctcaaaaaagaaagaaagagagaaagaaagaaagagagaaagaaagaaagaaagaaagaaagaaagaaagaaagaaagaaagaaagaaagagagagaaagaaaaaaccaggtataccaaaattcatgatggggtgtgggaatggctcaagtttagaaaccaagggctcttgtcagtcactcagagccaggacctgtagtttggtgaatctggatttcaattctgaaacctctgcttaccagctatatgaccttagattattgtggatccttttcatcacatgtgacacaaaaatcaactgcttttgtgcattcattctcatagcagcattattcacaatagacaaaaagtggaaacaacccaagtgtccattgatggatgaatggataaacgttaggtggtatattcatacaagagactgtcatttggctaaaaaaggaaggaaattggctgggcatggtggctcacgcctgtaaccccagcactttgggaggctgaggtgggcagatcacctgaggttaggagttcaagatcagcctgactaacatggtgaaaccctgtctctactaaaaatacaaaattagcccggcatggtggcgcatgcctgtaataccagctactcgggaggctcaggcaggagaattgcttgaacctgggagacagaggtggcagtgagccaagatcacgcattgcactccagcctgggcaacaacagtgaaactctgtcaaaaaaaaaaaaaaaaaaaaaaaaaggagggaaattctaacatatactgcaggatggctgaatagtgaggacattatgctaagtgaaatcagccagtcacagaaggacaaatactgtatgattctacttaagtgagg

SEQ ID NO: 6831 - DNA, 80399 bp, Homo sapiens
aatggatacaacttccaaactgataacttctgtttagctgtctctcttaactccatacagcaaattgcacctctccaccctacccaggaacacttcaaatggaagaggtctaaggcatcacctctcaccaaacatattatacatccacacagggtctcttgtgttccttctcagtgaatagcgccactgcccacgcagccagaatatgatgtctctttattcctcattctcccatgcaattagtcacttgtcagttccagctcctaaatatatcttgattctgtccacctctttctatttcctcatcatttcttttctaaccattttttattccaatcttgctccctcccaccttcccttcccactccagccttagggatctttctaaagtacagatataacaatgtcaccattctgcctaaaacctgcccagggcctaaagaatacttggtatagaagactgctaaaaatgatgatgttggccctgcacacaccactaccccttcttctgcataggccttgccctactgatcataggcatgggcatgtgacccagacctagtccaattacgatatctcatctccctcatcacgctggttgtgtcagagtttgtttggctctctcaagccactccatgttgctgtaagaatgggtccaggagtgaatatgtgaccagagctgacccaattaggatccttttcttttcttttttctttttttttttgagatggagtcttcctctgtcgcccaggctggagtgcaatggcacaatctcagctcactgcaacctccatctcccctgttcaagcacgattctctcacctctgcctcctgagtagctggaactacaggcatgcgccaccacacccagctaattttcctacttttagtacagacgaggtttcaccacgttggccaggctggtccgaaactcctgacctcaagtgatccgcccgccttggcctcccaaagtgctgggattacaggcatgagccactatgcccggtcgatcctttcttgagatttgttcataccgacttaagagtgtagacttactcagtcacatacctgacatggcaaactctgagaactaggagaaacagagggtagggcccccgttctgggacgttgtcaggatcagccccgttttgtgtcactctggtttcaagttcttctttcaattctgtgagcaatctgaggctccttccagtatctcccctttgatgacctaagctagtctgagtggggttctcatttccagccaaaatgtcccgactaatccttggtagtctggtcctaataagacatctttcctgggtaacagagttctttacagcttacccagtatttttcgaagttttacaaactttatctctttggatttttattacaagcttgtgaggtgggttttagtattaccttgactttacagataagaacagcagggctcaggaatgtaaagtggtttgctcaagatcatgttgagaactaggagagcttggacaccaactccctcttctgttcaatctcaccctgacctgcccattgccctgtaaacacacacagaggctgcagagtggagcccagggtgggagtgcagcactggggaccgacacagagggctatagaagtcaggggaagacaaagggcaagctcttccacttacaattttatctgtggcagcttcaggtccaggaaaaagataagaaactctcagcttttttcttttcctccttcctatactgttttttgttcccacagtccatacattaggcttgcagtctgcactacaattcagttatatgcttggcaattatggttctaggtgctagccaggaaggtaaaccactggttacaatacaacccttttatgagttggggctgtctatattgaattttttattttttaataaaggagaataaaatagacctgttttgcatttcgtgtctctgaggctctctcaagccactccatgttgctgtaagaatggatcagataggccaggcacagtggctcacgcctgtaatcccagcactttgggaagccaaggtgggcaggtcatgaggtcaggagttcaagaccagcctggccaacatagcgaaaccccacctctaataaaaatacaaaaaattagctgggtgtggtggcacgtgcctatagtcccatgaatccaggaggcagaggttgcagtgagcccacgccattgtactccagcctgggtgacacagtgagactccgtctcaaaggaaaaaaaaaagaatgggtcagataaagctctgtgggtctctgctacagctgggaatggcaggtgagtgtcagatgtgactgtctggggcatggcagggaaggccatgctggctttgtgggtattcccaccacacttttcatagcagcagtgtggccaactatttcagaaaggacacatctcccagacgctgctcaggccagcaagatctccaaaaccgctcagtccatggtttgcaaaactggcttccccatctccttcctccttgttctagctcatgacctcctgcacatgcaggattgagcagaaatcaccaggtgtgagtaatcatcttcccaatcccagcctttaccggaaacctctcctcggcctccacactcctctccttaatgatggtggaggcgtccctttgtaggaggtgaccctcgttagtgcctataccctatctcctttcacctgctcttcctatcatggcccctgccttcttcttagatcattcctatcagtgtgcaagcctgcttcagtgactcccatattttaacaaacccctctttattccaacaaatgttagaattagatgtggctacatgtgccataaaacagaggattaaacaagacagaaatgtccttctcccataaagaaagtcaagaggtagtagtccaaatgtgtggtggctccctacacattagcatccacatttattctcacttccactaacatcctcaacactttggcttccacttaagatccaatatggatgcttgagctccagctatctattaatatatcctagtgggcaggaaagagtaaagcacatgacttccctttaaagccagttttgaatttgcacatggactcctacacttacttcctattgggaggaatgaagtgtagctgcaagagaggctgagaaacttgcctttattctgggaagccatgtggccagacagaattagaaattctatgaagggaagagagaattactactaggggcatctagcaatctctaccaaagcatcctatgcttccgtatcctttctagatccctcccagttctccattccctgttagacaagttgtgcaaatatggtagctctaccacagcatggcttccaccactactccaggaacactgccctcatcatgttcaccaattgccttcatgttgccagagccaacaggtcccagtcctcatcttacctgatctctaagcagtgtctaacacagctgacaactgctttctggaaacattttctcagtctctgggatactcctgattctccttctgcctccccagtctctttttcagtcttcttgcctgctttggttcccctgggtccctcctgaactctctcctcttctgcatctactccctcaccctgtgtgtccttctcagatcccgtggccttgagcatctttatgctgatgtatcccaaagcccctctcccgccctggcctctcttctgagttcctagtgatgagataaccccgctggttctctaacaggcatctgaagctccatgtggcttgaacagaattcctgatgtaactccctgagatgtggttcatgctttttgatccaataaatgaagcactatccacccacttaccccagccagaaacttgagttatctttggtttctccatttcctgcccccatgtccttcctatcaatgtgtcctcttaagtccaaaatagcatctctcaactactcatcttagcatgaccaccactttggttcaaaccaccatcatctttggcctggattgtggcaagcctaattggctccctgcttttatttttgcctgacacccacacacagccttaaatcagaacatgttagtcttctgcataaaacccttccaaggctcaacaaagtctccattctttgacacagcccacaggccctgcatgctttggcccccacccaccttctcactccatcctgggcctcttcccctaggcttaaaacttcagccacactgattttctttcagttccctgacccatccagaacttaccctgaaaaggcacctactgctctcagcgaggaatgtctctgcccaacttttcccaaggctaactccttactcttttgacttcaatttcagcatcgcctcctcactttccctgactgcttcatctaaggtagcttttattctctattctagccccttgtttttgtcccagcctttacttcaacttgtgattatgtatttgtcttctccactaaaaattaactttattgggcaaaaggcctcagctgtcttgttcactgaagtatcccaccatgcacacagggcctggcatattatcaggcactcagacaaacactcactatctgctgaatgaatggacaggttcccagggagtttccagagctgcctgggctgtcacagacaggttgcatccctcttaattaaacaaacaaataaaattagccaggcaccgtggctcatgcgtgtaattccagcactctgggaggcagaggcggaaggattgcttaagcccaggaatttaagaccatcactggcaacacagcaagatctcgtctctacaaaaaaaaaaaaaaaaaaattagctaggtgtggtggcctgcacctgtggtcccagctacttggggaagctgaggcgggaggtcgaggctgcagtgagccatggtcatgccactgcactccagcctgggtgacaaagcgataccttagctcaaaaaacaacccaaacaaacctgggaatggactgaacagtctccatttcaagatttcctccttccattggaattaacctgttggttgcttgtactggcatgtggcaaccagtcttagcccagttttaatagatccctgtttggtgttactcaacagagaagaccactcggccctcagccaccgaataagtttaagaaacagaggtgtggcatgcttcattctacaggtagggaggctgaggctggggagccgcccctggctatccctggaaacccctctaccccacaggaatcgtcccagccatctctttagcgtaaaggtgaggaacaaatctcagccacgatccaaagaggggcgccacccctggctgtccctggaaacccccctacaccacaagaatcgtcccagccacctctttagcgtaaaggttaggaagaaatctcagccacgatccaaagaaagcttggtatttttagcaccaaggccagaaggagcgtgtccttactccttggtttacaaagaaataaaaaccttttccccatccttcttttgattgaagactacccccgcccccaggctccaaagccgggcaggaacgcctcttatctccaccacagccattttcctaatccttcgcccgctctccacggtcatcccgtgtatccctcgagacgccgcctcccacagctcgtgcttctcccaggttcggctccgacaaggccagagcggcgtctgcgcagcgcaacggctcagagcgctcccggcggctacaagtgcccggccccgggccaggcccggcctgcgccgcgcacccactgggagggcgcggaccggggccgccccaagcctccggcaccgcccagagcgggacaaaggggcgggccggcgacccggcctcgcggtccccggtgccgcgcgggccgggaggcggggtgcggtgggggaggggcgaggcggctgggggaggggcggggccagggcgggcccaggcgcccggggccgcaccgggcggcgcagggaagcggcgccccttcctcggcagacggcaggcgccgcgcctccggccccgcccctccgcgcccctccgcgccccgcccccgccgctcggacggcccgagtcgcgccctcccgccccgcgccgcggaacttgctctaacttcctcggccgagccgggccgcgccgccgctgccgccgccgcgcgcgggtgagtagagcgcggagacctggctggggcgtcgggccctgcccctttctttgtctgaggccgacttccccgagcgttctccgggggcgagggctgctccttaggtccctgtttggcccctcagcctccctccccgcctgcccaggagcggccccgcgggcggcgctggctttgtctgccaggattgctcgctagaggttggaggcctccgccgggaccccgctgagccgaactccggcgccgcgcggacgagagccgcggcgggcccggggccggcactcctggttcggtagccctcgccccatcagcgcgccccggcgagtgcgcgcccgtgccgggcggggtgagggcgacgggagcctggacggccgctgctgctcggggctctgcttctcgtccccagcagcgagctcggggatgggccaccctttcggctcagtcacccaccctcggctcccaggagatcgggtccggggtgggggtgggcgtaggccggggcgggccgccccttcctcctgccccgccgtggttgtgctcagtctcccacgccgccgtgggtcccactctgcccggcttgggtttgggacggccggagtttgagtaggcggtgacccagcttctccgcgttagtcgtgtggggttgtgtttgggagcaaagcctgacycctgacctagccggagttctggtagagtgaggtttgtggctgcggactgtgcttgtcccgggccgctgctgcttctcctccacccccaggggtggggtgcgggtgggtaggaagtgcctgtgtgagggtgtgtggagggactttggccctgggaccgcaggagcacttgtcttggggacttaaagttgatctccggcgagaaacagtccgtgctagggggagtcgggggaagtcgtgggcccgggtactggcctggggctgggcgcagagcggtggtgagtgcggcggtgtcacacactcgttggctgtgctggcgctgctatccgggaggtcaggcggtgctgggcggctgtgcagagcattgtattggagcctctgcaggtgtgctcttggcagtggtctgctctccaggggatcttcctcccttccgagagggagttgctcttgggctagtgagagagtggcctgccaaatcctcaaaagtagccttcccctygccccttgaccttgaagtccagaagcagttagtgcctgctgagtgctccggccacccttctctatttgtgaagggaaacctggggacaggccatcggagcacccctatgtccttgccacatttcagctagccgagtggttggtgggggcggccgtctttccagggatcttcctgggccctggcacccccagaatgaagcccagactccaccataatggccctgtatgcccttctatccccttagctgctggtgtgatcatagcctcaaattgctgggctcaagtgatcctcccacctcagcctcccaaagcacagggattacaggtgtgagccaccacgcgcagtctgatcccactccgatccctaacgttatagtgacaggccctggaaacccagggccaccagatgtattttccctttccttctcattgtgttgcaccccaacttcagttggagactctggatatatccatccccacatctctgaactccactgcttgggccacctaatgtcatcctcagtttagttaacaaagcatggttgagatttctgtggggtgcgaggcattgttgcaggcactattccaagtctggaaagtccctcaccagctatgaacttggtgtggtcttagaacccaggctggacatggcataggtgctcagtagtgtttattgatctgagcttgatctcagcgtagcaggatcatttagggagacggggttgtggggggggtctgagcccatgggtgcttctgaaggtttgtggctgccccaggaagaaagggcatggagctgcagaatggttggctgcccagggaattgtccccttcaccagctgggcagctgtgctagtctctgaggactggtgaaggtccttctcatgtaggaagtggcagtatgaagtgggagaggagatggctctgccctgaaggttgtggcggcagtgaagtgaagttcccatggaggccggggagcaggaaagccctgggttctggaactatttcctgaggcctcactctatgccaccatgtgctcaggaatttgacccatttaacttcaactgaggtagaattccttttagcagtgcctgcaaagtggcattgtgccaggcctgggaaacctttgctggcttaaaatttagtgaaggacaagattatttcatagtgatactaatgtgagtttattgagacttacaccctagaagtttgacttgtaataactcatttaatccttgaaaacagctgtgatggctgggcgtgatggctcatgcctgtaatcccagcactttgggaggccgaggtgggtggatcacctgaggtcaggagttcaagaccagcctgaccaacacggtgaaaccctgtctctacgaaaaatacaaaattagctgggcgtggtggcacatgcctataatcccagctacttgggaggctgaggcaggagaattgcttcaatctgggaggtggaggttgcagtgagctgagatcgcgccgttgcactccagcctgggcaacaagaatgagactccatctcaaaaaacaaaaaacaaaaagcaaaacaaccgtgatgtcaacagctccattttacagatgaggaaactgtggtcccgagaggtcacagagtaacttgcttgaagtctcaatatgagctgggttttctcatttctttttttttgatactgagtctcactctattgcccaggctggagtgcagtggcgtgatctcggctcactgcaacctccgcctcctgggttcaagtgattcttctcctgcctcagcctcccaagtagcttggactacaggtgtgcaccaccacacccagctaatttttgtatttttagtagagatggggtttcaccatgttggccaggctggtcttgaactcctgacctcaagtgatccgcccgcctcggcctcccaaagtgctgggattacaggcgtgagccactgtgccggaccaggttttctcatttctaatttagacaatatgttcctctcagaggtgattaaaatggattcatataccaaacaagcctggcccacagtggaactaatgaatgttttcagtgaaggtgcccttgtatccctgcctctgaacacatctcatctgtccagcacagcctgggcacatagcaggtaccccggaacccccgctgattggtgatggagcttctgtctccctaaggccagggaatgggaagaccagcactaccacatgcagaagattggggagtcactgcttgtgtctgtctggacagatcacggtttgctgtggtaacagcaatccccaggtctcagaggcttaaagcaacagaggtttatttcttgttcacactgcatgttcatcacttatctgctttatgttgtcctcactggggggacccatagtgattagtgggaacacccctggtggcttggacagagggacagagaacatgatgatccctgtgtcctgccactgagtcctggtggcctttaagatgcctatgggaaggggattaggttcctgctgcctgtctctgccctgccgtgtcagtccttggatatcttgcatgttccatccgctacctggatgtggcctgtaggggcagccacctttcctagaagcaggagcaggtagcgatacccaggcaggcctggtcctccccacttttgtgggactcggggattgagcttgcaggcataggggtgtagaaagcagtggtagcgaggtgactgaaggtggactcccactggggatgggattgagtgtggggctagatccctggtctgtagaagggagtaggaaccctgttagttaaattttccccctcaggccacsttagtaggattttgaagagtcagccacactgtggctcttgattttgtgcctggtcacctgcttggtctctggtgatttccctcggggccagcagacactgttggaggtggtgaggcctcaggttcttctgcttcatggttaactcactctgcttaggcatatttccaccttttccagggcctccgtttttctgccagtggattgagaggtggtggtggtctccagcagtggtctcactcttggcaggctatcagagtacccagggagctgcgtagaatkaagttttgagagtctttggtctaggtgaatgccagcgtttcagtttgcttatcttccattatagtagtgtcctctgtaactgtgaatcagggaggttattcataatatctccacatccattttctcccttaattgcgtatgcttttgatttagacagggcaagtagccattttggtggagcgcaggccctggcaggggggcagtgtccagtgccgctctcaattaaacgtgaagatgtgaagatgaataacactgtccagcttgcagagtggacggtggtgaggcargctttcaagttgcacctactttctagttgagtgacctacacaagtctttgattttttttttttttcttcctggaaaaaaaaagttgtctacttttctcatctgtaaagtgagaagaatcaagtctgccttttctgtctcacggggttgcagtgaagcattagtaccctgagaagcaagatccaaagcccctgagttaggcctgacactggtgtgagacagctgccatctctggcggcactcagcaagtgttcaccagcagctgattctgggaacctcacttcctccgcccttgggcttggtggggttgggtagggttgggtggggctgtggttttcttttaggaggcagcaggccaggcctggagaccagagcttaagtgggcctgggcaggctggggttgaaactcttcaccccttgcggtctgtactgcctcccaactgagcagccagggagaaggcctagagcctgtgcctttcagctagatagctggaggaactggctcctccctccttaggctgtgctggcctgagctgggagcctgagagctggggcagttgtctctaaagtggcttctgggattctggtaagaggtgagctcctggtgctgcctcagagtctttgtgtttcctggcatttgggagagctggagttgggctgtcctgcatgggtaaggtttggggagggactggaacaaggggctagtgaaccttctctgggtttttcctgcctgactatgcgttgacagtcccagctgttgggcctgtgctcctgtacactgcacggccttgagaggagttcggagccctaacatccaggagagaggccccacagcagtggaaggaaatgggcctctcccgaatctcttgtttgtaccccgaggtctgagtggtgatcctggggatgctatgggactctcagcagtaggagtgtgtctgtccccagtctgggtgcccaccagctgtgctgagggtcctctcctgtgtccctgggccaggcagacagggtctttttctggggcttgttaggggaggtcagccacagccccagaccaagtaatttacacaccctgagtgaggggtgggagcagtgggtccaggaagacttagggagctggtgaaagaaaaacttaattctgacacttgttaaactggtaaggtagactgtatcaggactattacgatagatgtaggaattatcgcaatggattttgcagtagaggggagagagtgggccaactccaaatacaacaaagaaaagtgggaacttatagccaaggagcggagtgtgggggctcctgaaaatttctaagagggtagggaaatttttactaaacttagctaactgaattcttgctgcaggcaggccagggtgatcaggttttacctgggagatagtacaggatgagaaatacgttcagatatccagggtgattagatattgaggttgggggattctggttaacaggagttttgctaaaactaggctcttagagagaatggagttaggaaccctaggtcaggaccagatgagtagagggctcagaggaataaagtttggtgagggacagaatctctgtcagtatcccgtggttggcagtgtcctgtccattcttcttgcactggcctgtccctcaggagacaggtgtgagtggtcctgagcttgggccagtgtaagagtaggggacaggtttctctccttgtaggtgtcccttcttgtaagtgtcactctctttttttccagaaaccttggtccttttcagcatctgctggccccttgtcccttggctcccttgctcttggcctgctggatttcccctctgcacccaggaaatcgcatggacytgggtccttgtttccctacagcccaccaattttgctgcttttttctgccccctgaagctgagctcctgctgcaatttgtgttycctgctctccctgtcctgggcaaaccagtctgacaactttgtggttctcgctcccgcctccatcagcctggggattgactgtcccatttgtctgagctgggcagagggaggtgctgtgggggatctcttcctcttgcctggactgcacactcctgctgccttctagccggagctcctgggcattttgcctatgggagcttcaccagcttccttctgtctgaggcctacaagtccctgcctccagcctaccttgttcctcctccatgagtgaggctcctccttttctctctggccctcctgtctacttgatcagactctgcctctcttgagggccggctccctccagcctaccctgcacaggtgaccctgtttggcctgcctccttttcttgaggctgatcttgtctcaacagtcagcttttcaggaaccaggcccttgctgttgtaaggaaaacctgtcggctgtggatggggccttccctccttcctaaaggctctgtagccagcttccacccttgcagtggaacagtggtggtgccagaaccctgctctctgcagccatcctgcctaccacagtcattgtgttttgtaactctagtagcttcttgtgaaatacaagtgatggtataaacgtggataggtttttgaggggggcatgccaaaatcagagttggtggtagtggtgggggattcattcccaagggctctggggtgctaagtgtgtgagcaaagaggaacaagtggcatgtgcccaggatggggtggggcgggcaggtttagttgagggctcctctggtgtagggtagccctgacgctcccctccatggcatgactgatgaggtggcaaaggcaggtgccaggatttggtgtgttgaagattagtgcctgggttgggctctgctcactcctgcagaaagacggttggagaggggctggtcttggtttcacagaggattgtgggattacaggcaagacctgctgagggcttgcactgagccaccgagaggagcagaaagagatacgagggcttcaggtgccagtatggttctcactgttgtgagatctcatttgtgccttttttttttttccttcagacagggtctcactctgttgcccaggctggagtgcagtggccctatcacagctcactgaggcctccaccttcctggctcaagtgatcctcccgcctcagcctcctgagtagcagggaccacaggcatgcagcaccacacccagctaatttaaagaattttttgtagagattggatcttgctatgttgcctaggctggtgtcaaactcctgggcacttgatttgtgcttcttaattcaggggctacttattgaacatatttagcagtcttcagaaagcatcttattctgtaaggggaaccaaatatacccattccccctctctggccttctttccctgtggtctgggcggtctttgagcttgaggtcattaggaggtgtttatttctgtccgccctggtggcctagggcgtaggaatggggtgggatgggatgggatggggtggggtggggtggaggagttattctacatagatagagttctgtttatgmagcactccctgccatacacatctctcactcaaatggtctggccagtcctggttctaatggtcattgtgtcattcccctcagcagcaggaaaggctggaatggtttttgtattgttccttagggggaaaaatcacttggaggaagtatatcagtgcttctgagtgcagagtatttattgacacgtcagttaaaggaagcttttaaacaacatatatgtatctctttagtgaggaataaatctacaagtgcatctcacagctccattttgcagcttccatttcctggaaggtacatggagtttagtggttagggaatggggttttgagctgggattttggagaaactgtttttagcctgtccttggaattgggccaggcctagaaatctgttgaaatagctttctttagttgctgaaactgggatgtgttcatagcactaggacctcgagctccactgatgactgagtggggagggctcagagaagggtccctgtggatgcccgggatgcctgggtttcagycccgtctcctgcatcgcctacattgcctgaatcttagggtcttacagatttatcatgaagtgggcttggcagcagatggtctggtttcttttgtgcctttgtcagaatctgttcttgctcttcttaggaaaactttctatttcaggacttggggtggagtcgaaagcagggagccctgtgagttggtgagtctgtatccctgaggctgccactgcctgaccccctccttccccttgtttcgtttcccctccccattactctgccttgttctagggaaacaccagaagctgcctgcagacagctacgggtaaaattgtgtgtccagccacaaactttaggcattttaaatattaatttaggtttaacatttttatttacaaaaatgtatacatgatgaaaaacacataacaaagatacacggtgaaaactcctatttctatccctgaccccttcagttctkctcccctgaggccgctgtcaccagatgttcagtgcctagtcaagcatgactgtattcctctcttgtttattaccccagtggtatactaattatgctgttttgcacttcctgatttttactctgagaatttatcccaggattgttccattttagcacacatagtttagtccattctttttaacagcagtgcatgattctgctgcacagtgaatgatgactcactttaccagctctctattgatggattttgaggttgctttcagtgttttgtttctataggctaagctgcaggagtgtcttatgcatgctgcaggtctgtagtggaaatgactagatgtggagttactgcattaggtgtgtaaaaggaaaagaaacatgcggctttgattccgaaagggggaatgaaagtttacaaagttttcttttggagggatcttggccttctacagagacaagagctggagaaactactgggaaggcatgagaggtgccagcgtgttggttcccacccaagtccatctttggttcagttcaggccagcctgtctccgtgacctccatatttacagcccttggctggccctctggctcatgcagcctgtgcccctaaaagtgtgaggagtcagccagagcgagttggggtgtagggaggcggggagcaggcttctcatagtgggttccagcaacctcacgactttgcaggacctatgtggggtgtgaagggggagcgttggttgcagcaagctggagctggcgtcagcttttagaggagcagattttcccgcagtgtcaggggttggtgtgaggatcggcctccttctctggcctcccttggcctttcgctgctctgcacacctccctgttcaggccgccttgggcctggttgccaccctgtgattttaaaagcctgtgtaaaaggcacctggtgaaaataatagatgggttttgtgttttgagcgggagcttcctttcagaacagaaatggggtacggttcttcctgggatgggtggggaaggagggacagtcgtgagagcatgttggaggtgcccactctgtgttgggagctctctggttgtttccctgtgtggctttcactgccccatgccagggcagggtgggaagcagggagactttagggctggctggcagatagacctcctaaatagaccctgacctggtgggtttgaggcttgtgtccctgccatggctctcccacccttctactcagagaacttctcaccattgcggttacatgcagtccccgtgagaaggccagagcttcccatgtgcagctcattgtctgggcctgggtccttggtagcacagaggtttctattgtggcctggtggcagtgagggctgacctgtggagctgaggaggcgggacctggggcctcacagtggagctattcaggggctctgccctggtttcctgctgcttcccattgtagatttttttgggggaagggtgggagggaactagagaaggaggagagtgggagagggagtggtcagtgcaactattgttgctggtagcaggagccctttatgcttaatagaggtccatttgcagacagccttgagccactccaaggcccatcatgtgttctcagattctagtttctgcctctgtcaagatcccccttcgcccttctcaagtccctgtgcttgcctggaacacctctgggtaagagttctgagcagctgggcaaggagcaggagtggccggtgccaggcttgtcggccacctgcccactgctttggggagtgagttctgccgagtcttcccggcccagctgtgcccttgggtgggggccaggcacgtgcctgggttgctattagtctcccaggccccccacttgctttgtgcctcagtgctcagcccagtgctcccgttcctcacgcgagcactcagctgctgaaaagcctgtgtgctggcagctcagcctgcagccacccccgctgcaggagccacagccattttcctttgttctgccatctccgggctcttgaatctcaggctggcagtgggcagcaggcagccagcacacagcgctggtggggtggaaacccttgtgacatgaatctgcccactgagccaaaggcatggcagccccctggctgcacccctaattcctctggctgtacccctatctcccagccatgctgagagaagcacagagtatcccctcttactggatcagaaagatagtgacacctacagtgggaacagagagaggtctcacctgttttgggccactgaggtgcacactaaagagagagagagttagcctccgggtctttggcagaaaaagccactctcaggcacaaaggatgctcgttcttaatctcctggtctttgttgaaaacagaggcaggattggttaagaatattttttattttggtccttatggttgtgaggacctttctctaactgaggggaactgtaccctgcttcttcacatctgaatctctcccttctctcccccaccactttttggtgggcaaaatgagcattctcttttggggtacaatttcagctatgtgtggggttgcaggcggggtgaaggccactctcacccgctgtctgacttctctatctgaggtgtgcccgccccaacccatactgtctcctttctaaaccacagacagaatctgtaaggcacctgcctttgaaatagagttgttttgtatagaactcataactcccactagttttcatgtgtttagcattatagcttaccctttcaaaacccatcctggctgtcttatttgattctcttatcagccaagtcttacaaatcaagaagcaagcctcagccccagatagggttgcaccttggagtgtcctcattttattttattttttgacatggaatcttgctctgttgcccaggctggagtgtagtggcatgaatatggtttagtgtagcccccacctcccaggctcaagtgatcctcctgcctcagctttcccagtagctgaaaccacaggcacgcatcaccatgcgcgactaatttttaaaaatttttcatagagacgaactcttgcaatgttgccttggctggtctcgaactcatcttctgggttcaagctgtccgtctgcctcggactcccaaagtgctaggattacaggtgtgagccacagcacccagccctcattttaacaaatgttgtagcacctacaagactcaaagtaaaaagagctggtgctcatcgtgaaaggcattgaaacacccccactttggtggggggtggggtatgttaacagaaaaaccaaagtctctaaaatatyttaaagaggtttattccaatccagtgagtgtctgcgtcctgggaaaagcacggtctcaagaggtgtggggaaagggtgcttgaggccgttggattacggttttgttttatacattttaaggaggcaaaagttacaggcaaaggcataagtcagtacatggaagatatgcattgtttaagcccagaagggtgggatatcatgaaacgggcttacaggtcataggtgggttcggagattctttaatttgtaattcgttaaaggagtaaagctttgtccaaaaatttagagtcagcagaaaggactggtaagataaggaagtccgttaaccaatacactgggttagagctgtggggtgagtgacttaacccttgtctggcatggccttcagtcctctttatatttcggtatcttattgtcacaaagagtcttgtttcttagtcttataatctctattttaatattaatgatggtcagtttttgtgtctaaatcccaaaagggaggaggtatgtaatgaggcctttccaacctcctccttgttgtggccaagagctgtttttcaggtttctctggggtcctcgtggccaagagggtctgtttagttggttatggggcttagaattttatttttagtttacaggttgttggacccaaacaagactgggaaagtcaccatcgaggcagctcagtattctttctgggaaaaacacaatggatgtagaggctgggatttgaattcgggcttactgggtgaccttggtgggtcacttcctggggtgtagattcttactagaaaatggaagtgttgctcagaggaactttgggaacattttagctgtaacccttggagttctattaatctaactccaaaatggttctattaatctaactccactacctggaatctctcttgccaactcaggatcctttggaagaaaatgtcatcagatggaattaacaaagagcccctcttttcctgggcatttcttcctcaggttcttgaggggtggtgatgatcacctcaaaagatgcctgtagttttcaagtggaaaccgagccaccctgagcccaaacacacactcccagtgttcaggcgctgagtgtggcccctggagttcactgatgagtagtcttaccttggacctcgccttggcttttcttggaaatggcacattacwtttgtttattagtgtagcccctctgttgtgaagtggaatccagggagagggaagtaaagcttttaattttacctcttgccaaagtgaggccaagctcttaaatgtaaaaacaaacttgttaaaagtaaaaatgaaaacaatatccccattcctcttctttgggggtggagactgtgtttaaattttgcctctattttgtcaacaggttctaggagacaaaatgttcttttcctggtgacctttcaggctgggtttctgccctttatgtgcctttcctggcccagcctccatcctctgggcccgcccacccaaaccagcactgcctaccaggcccccctgtgcctgttgcccgtctgacttcctcccattgtcttcggggccagcctgtgtcactgctctaggctgtgtttctgccggcacgaacacaggagggcggtggtcttggaagaggcaggtctctatcatttggttagagtagcttttacagctgagaaatgggaataaaaataatctgtgaggatccattgggatgcaacaaaatcccaaacaaatcccaraattaaagcattcctccagggaagctgattgcatccttgtaaatcaggaacaataaagatgggtggctttcttcccatgacttgctttaatggttgttttccttctgtgtgtcagcgttacatccttactattcaaagtgccatccacagacctgctgatgggcagcatgagcatcacctgggagcttgctgcgctgtagaatcttgaggggtctccatccagatcagctgaatcagagtttgcattgttaacaaggtaacccaagtgatttgaatgcttttttaaatttttttttttttttttttgtgagatagggtctgactgtgcgctcagtggtacaattaaggctcactacaccctttatctcctgggttcaagcgatctgccaaagtgctgggattacaggcccaagccaccatgcccggcctgaatgcactttcatgtttgagaagcacagcctcagccagccacactgtcatgcttgccccttcgctttgttagcctgtttcatggttttgcagtctttacccacttgctttcctgtttaaagttgtcgactttaaacaggtttggcagccccagctctcagtccttcccctctgggtgtgcagtgcacagcagttattcctcggtgccggggatgtcttggaaatggagctagttcgagaaagcccccttagcccagagccctgctggtgaggttatctttggggcatgggggtgggggtagggatgggggggtaactggagccctcctgggtgaaagggcagccctaagcctccctggccatctggtgccacttgccctgccctgttccagctggagaacaggttcagaatcaggttgtaaatattgtttgcttttggaagaaacacaaagcattttctataaagatgttttggtgtatgttgaagataaataaatagtccagaagagggactgtaaatttgtattttgtagtagttttgcagcagaaaacagtttgaggtgctctcctgatttcactttacgcctgcacatcccctgcattctggcgaaggttggggctttgtggggaagagcttgcttccctgggaatgagaccctgactctcctgctcagctacccaagggctcccctgcatttctggctctgttttaggggatgatctgctttctcctgactcttgatttcctctcagccttttccagcagtttctcaccattgatttgcagtttaaaaaattctgccgcctcttcctcctctcttttgacattcacaaggacacacttagttttatttttccccactgggcttcacttttcatggcttctttggaaaggatttttgtttgttttgttttagctctgtaaatctttttcccccaggctgggggagccaggccctggggtgggctggaaagtgtcccaccctagactcagaagttttccagattgccgtcctttgaggtgggttttttttgtcttaaaacacagtacagttgtcccttggtgtcctgtctccaagggagattggttttagccccagcacttagtagtgtttgcatataacctatgtacttcctcccatatactttaaatcatctctagattacttataataactaatacaatgtaaatgctatgtaagtattatataatttaaagcatttgtaatttttttttctttttgagacagagtcttgctctgttgcccaggctggagagcaatggtgcgttctcwgctcactgaaatctccgcctcccagattcaagcaattctcctgtctcagcctcctgagtagctgagactacaggtgtgcgccaccaggcctgctaatttttctatttttgttagagactgggtttcaccatattggtcaggctggtcttgaacttctgacctcaggtgatccacctgcctcccaaagtgttgggattacaggtgtgaaccgctgcgcccagcctttcctgaatayttttgatcctggttgcttgaatctgaggatgtggaacctgtggatatatggaagactgacagtatattctagctgactgtgcaattttgtataaaaagatttttaagcatcttacagccataatctttatgcctttcaggcgtggaaacatagagaatgaggagtaaatataattctaaactctcttatgtagtttctttgtgacctgtacaaagagaacacttcaaatctacattaggcatgtaggtcaaatccctgcagcctactggagcagctcctgtaacagccagcttttaaagacccagttattggagcaaagtttgtttctccccaagaatgggccactcatcacttggaacatctatggtgttcaggagtggctcccaccccaatggtgtcagccctgcaaggatgaccatgctggttttgtcttggtatcatctgcagggcccagcctggagctggggatgcactgaaggctctgttaataatcttcattggagggtcagtctcggggtgaaacagttgcctgctgccaggtcgggttgcagtgtgtccctccctatctttaggcacagctctcgatcccaaactggggagcttctagatgtgctgccctcatctagtacaaatttaaactagctgctttagggagcatttcctgaccagcttgccaccaccaccacctccttctctctgccctccagcacctacttgactgcacttagtgaagggagtcatgttctgagttccctgagtcaggcacaggtcccactctgagttggtgtttgtctccacggcctcattctcggtgtcttacatgcagcagtgccctgaacatgtagaaacaagtctttaggtgtttgtctcccacagcaaaagtcttttcaccccatgggcttggcaggcgagcctgtgcactgatggattgctgggtggtttgcttcaaccttgctgatctagggaggccacagggcccagcccagtcctcctgaggtctggaggcacagcaccttggactccctgggttcttgttcacattgggaatactagtgtagactgggcccagactctccacgtttgtttgcaactagctgaggaagaggctctgatgtgctcttaccaggggcatataaaaggattctgtgtatagacatttcatgtagacttagattttcagaaacaggcctgtcatgatgatcagggtatgggtataggacacgtgcactatgcctgctttggcctagcatcctcccttgagtgggcagcttcaccttcaatggcagagggaagtaggttgggacatcaacttggaagtcaaggtgccaggcctccttttgcctagccatttgagaagtgggggtggggtgggtagcaggtgtggggtgagtggcaggtgtgggtgaccaggccctgcctcacctaggtgggcaggtgttgccctgaggctgctggtgcagttgaatgagctgcctgatgaatcattctgaaaatctctcatgggtgctgggcgtggtggctcatgcctgtgatcctagcactttgggagcccgaggcagtaggatggcttaagcaggagtttgagaccagcctgggcaacatagggagaccccatctccctatgtagctgggactgcaggtgtgcactgaggtaggaggatcacttgagcccaggaggtcaaggctgcagtgagctgtgacggtrccactgcactccagcctgggtcacagagtgaggccctgtctcaaaaacgtaaaagtgaaaatctccaatggggcccaaggcctgaatgttttgtttgctttttttttgttcctccaagaaggaccacaaactctatgtttcagttacttgaagccagttattttgtagtatctcccttaatttaagtttgtttgttgtttcctcatggytagctgcaagttttgcagttttgtaaggaatactgcggaaatggtgagttctaggtgcatccccttgggaggcacatgatgtgggtctgagtcattaccggtgatattgacaatgatcgcttgcttatggtgatgtctgctgggtttctcccctctaagttactattttgttctttgtaagtgtcctgtggggagatactttgagattatgcaaatacagtatgctatttcacatcaaactcatgactggttttaggacccattgcagattcttggcacagtcggttgtttctgtcatgggtgttgaatgcgatgatttaattccataattccttctacatttatcatttaactatacagaactgctgtagctatgtatcattgtgctacacataacttttccttctttcctgtttatttatctctgtgtgtgtattagaatgggctcatgaattcttattttattcaatgagttaaaatccgttgttattattgtttattttgccgctcagattgttccagatttggccagtgggggctttttcaagctgctgtgaatgacagctcttcaaaacatgcatttccaagtctatcacagttctgttgaactagttgccatatgattctggaggcagctcctgagccgttctgctgtcctgtggagcatggcgtcagtcacagtaggcccatggtttttagtgtgcaccttgtgaagccttcctttcccccagccacctgaagataaaagtgtcctgctctgcctgcttccatgttgggtttctgggtcagagtttctttgaacaaagcctcctgtagcttaaaaaataataaaaatagtaagcttggaagtcactggactaggtgacctccattccaggcccagtgcttctcccactgaggactcccctgactcaaatccacccactctgctgctttcctgatgacagcactgaggtagacagaggcctcctctcaccaggttaatgaggaggcccctcggtgtcctgaaacttggcaggttttgggttgtgagtttttggtggtggaaattcacagtgtttcagtcactaagatcagggtttttacaggatgccaggcactgagaccctcagaccctttggagagcctggtggagctcagagctggggcccagcctctcctgcasctgcatgtggaggccatccagggctggcggtcaggggcttgatggccttggaagctgggggcccaccttccccacactgtgccagggcagtgtttgtcaccctgtgataaaggaggggatccagcccccctgacgttgtgcagctgtgtagtgacttcccacagtaaagagtcaaacttcttcactccagtgagcggttgctgccaccatgatgggtttttttttttttttttaattaaagtttttttttttcttttttgttggaaaccacaggttcacatgccacggtgtctgattttgcagtgtttctggtgrcscctggatttggcgtttgggttaatgagggaatgggtcagggatgtgcatggacagttctggctctaaggggtgagtcagagagagccgagcccctccttccatcctcagagggtgagattgctgtgggcagctgagcagcctgccctggcctgccttagtgattctctctcctactggggcccattccctttcatattcgcctgccccctcctaggcttctctccctgggcctgcctgttcctttggcctgtgaatgttcctcagcacctagtgggctctagagacccccttctcagatggtaggaatgtctaggccccaggtgctactagaggtgcagcagaaactccgccttccttgggggatgtggctgcccttccttgggrtgggcctgtgatcaggtcagaggccagttctgggagcctcaaaggccaggtggtgttgaaggattggcttcggagaatgagagggaaggagagatagtaaggataatttgggggcatggggtgtatgtagctcaggatatgggtggtgggtgttgtcattgtcacttgggtccttaggaaaaagaggggccagaggaggggtggggttgaaggtagagagccaggtaagagaccttcagaccttccctgagaggtcatgaggaactgacctgtgccctcaggacgggaggggaggggagtgaggggaggggaggtattggagcgtgaggagtttaggaaagctcctgagtgtctgggtgggtgaaggctgagggattctgggtggggccccttggtccatgctttgtctggtatttgtgcctggtgcttgtgtggaaagatgcaaatctctggaaccatcagcagagtagtgttggagggttgtgaggcatgtgattatcccataggaggggcaaacactccagggacatcactctcaggaagcctggggagctcgcagtgcctttgtgcagggtcaggccacatggtttgagcctggccttcccaaatctcagttcacttttctccactgtcatgtcatccggcttccttcccttgggktttctctcccctcttcctccctcatgaccmcttattagtatataaaaaatgagactcttgtctcagagcttcccaaattttcatcttattcaggatcttagtgaaatgcagattgaagggaattgagattccacatttccagcaagctcctgaaatgggcatcgtccaaacagggccaggcagaatcgggggatgctaaagaactggaggtagaggacacccagttggaggggtgcaggcggccatcctccccctctgaaggtccctgtgggaggagccaagggcctgacttctttgggtgtggggctgccaagcactggctggagtttaatctggatccaaggctcacaaacagctggttcttaagggagtgtcagtgttgcagtgatgtttgatagagctaatctggcaataggacagataatgagcttttctgtaaatctaaaagttttgggctgagcatgatggcttatgcctataatcccagcactttgggagactgcagagggaggatctcttgagccaggggtttgagattagcctgggcaacatagtgaaaccctatttctacaaaaaattaaaaaattaacttcgtgtggtggtacacacctgtggtcccagctacttgggaggctgaggtaggaggaccatgtgaagctgggagtttaagatcctgtctctaaaaagagaaaaaaagttttaagttaaaggtccactctgttctgagttgatgttctttttctgccccctttccccatccttttttttgttgttgagacagagtctcgctctgttgcccaggctggagtgcagtggcgcgatcttggctcactgcaacttccgcctcctgggttcaagcagttctctgcctcagcctcccaagtagctaggattataggcgcctgccaccacacccagctaatttttgtatttttagtagaggcagggtttcaccatcttggccaggccagtcttggactcctgactttgtgatccacctgcctcggcctcccagagtgctgggattacaggcatgagccgtggtgcccggcctccccatcctttttatacagtcatccctccactgtccaagggggtttggttccaggacataccccctccattatgccaaaatccatagatgctcaagtccctaatataaaatggtgtagtatttgcatataaccttcacacatttttccctaaactttgaaccatctccagattacataaaaatatctaatacaatgtaaaggctggctgggtgcgggggctcacgcttataatacaagcatgttgggaggctgaggcaggcgaattgcttgagcccaggagttcgagtccagcctgggcaacatagtgagaccctgtctcttaaaaaaaatttaaaaatcagttgggcttggtaacacactcctgtagtcccagctacttgagaggctgaggcaggattgcttgagcctgggaggtcaaggctgcagtgagcccagtttgcgccattgcacttgagcctagrcgacagagcaagaccctgtctcaaaaacaaaagtaaatgctgtgaaaatagttgttttactgtttttttttttttttttttttgagacggagtcttgctctgtcacccaggctggaatgcagtggcgagatctctgctcactgcaagctccgcctcccgggttcacgccattctcctgtctcagcctcccgagtagctgggaatacaggcacccgctaccacacccggctaattttttgtatttttagtagagatggggttttaccatgttagccaagatggtctcgatatcctgacctcgtgatctgcccgcctcggcctcccaaagtgctgggattacaggagttttactgtattttttacttgtatcattttttgttttgttttgttttkttttatatttttcaaatatttttcattcccagttggctgaatccatggatacagaactgtggttgcagaaggctgactgtattaaatctcacaatttctgtaggtcagaggtccaggcccagcatagctcaacttattccctccttagggtctcacaaagcccaaatcaaattgttggcagggctgtgcttctctctggaggctctgggaagaatccacttctaggctcattcaggttttcagcagagtgcagtttcttgctacatgtagaactgagtccttgcttactgtcagccagggctactcttagcccttagagtccctcactggtcctcgcatgtggcccctgtactcagatccagcaacagtgcatcaaatcctgctgctgcttctctgccttcctcttctgccctcaactgggaggaagctctgcttttaagggctcatgtaattacattggatagctcagatgatccccctatgttaagatcagttgattagtaaccttaattacatgtgccaagtcacttttgccctttcttttatgtaataatggactatacttcctgattttttcactttgctaaataaaaaggtggcaattaaaaatactttgaaatgttcctagaggtcttctgggtaaaaaatagtggtttgagtagacacatgtaattttgctttctcctaaacccccacataagataaagggagttgtaaaaaagaaatcaatgcatgaggacagggagaatgagaaagaaaacaacagcaagaaaaattttgcaagcaaagagtacatgaatgattcaatttaaaatgtaggagtggatggcatgagatttttttgtggggggaggggaacgtgggcatcagaggttgctgagtacaagaatagtttgaaagcagctaatgcagttacatccttccatcccttcctttccttccaccgtgatgctgggtgatggcctccgactttagctgcatgttgcacatttctgcagaaggaaaaaccaagggcccaggagcctccaggtattcttgggagttaatatagagaccacctccattctctagtcttctaaccccttttagcttctagaacattgacagccaggcccttatagatgaaaaggggcctcactgtggagtctaaccagcctaagatgggaaaaaaatacaaatgatgctgacaacagggatttcccagcaaatggcccaaccagatcatcctagacagaaacttagccgcccaaggactcagagcttccagctggttcctgagtcattcactcttagtcatgcggactgccagggattactagatggctaaagaaagtgcctaatatgaaggaaagcaaaacaaatgaaaaaaagcaatttgaaaggaagtctatttagagaaaagaacattttgaaaaaaattcttgtatccatgaaataagaacaggatacaataaaaaggaacagttagaaaacaaagttatcagaaaatttttcaaaaataagagcagagcaaagatatcagtagtagtattagaaaataaagttcagggagtctttcagaaaatagagcaaacagatgaggagatgaataataaataaggcagaaaaggtaagaaaattaaagcatcagccaggcttcccacatcaattgataggagctaaccgaaagggaaaacagagaagaaggcaagtgtcaaaatcattgaggaaaatattgcctgaaataggttattagcttctctatggaggggcctgtggaatattgagccaagtagttgaaggcagacccagactagtaccctcagatgtcaatatgcttggaagaaggggatgatgctacaagttacacagagaaagaaacaggtcaaatacagagatcagaaatctgagtggtttcgggcttytcaatacatctgaatataggaggtgggggagtgatgccttcatcatgctcaatgaaatggatccccagcttagaactctgcacacagccaaactcattcaagagtgaaggtatcctgtaatcccagcactttgggaggccgaggcaggcggatcacttgagaccaggaggtcgagaccagcctggccaacatggcaaaaccctgtctccattaagaatataaaaattccacaatggttgaactagtttacagtcccaccaacagtgtaaaagtgttcctatttctccacatcctctccagcacctgttgtttcctgactttttaatgattgccattctaactggtgtgagatggtatctcattgtggttttgatttgcatttctctgatggccagtgatggtgagcatttttccatgtgttttttggctacataaatgtcttcttttgagaagtgtctgttcatgtccttggcccactttttgatggggttgtttgtttttttcttgtaaatttgtttgagttcattgcagattctggatattagccctttgtcagatgagtaggttgcgaaaattttctcccattttgtaggttgcctgttcactctgatggtagtttcttttgctgtgcagaagctctttagtttaattagatcccatttgtcaattttggcttttgttgccattgcttttggtgttttagacatgaagtccttgcccatgcctatgtcctgaatggtaatgcctaggttttcttctagggtttttatggttttaggtctaacgtttaagtctttaacccatcttgaactaatttttgtataaagtgcaaggaagggatccagtttcagctttctacatatggctagccagttttcccagcaccatttattaaatagggaatcctttccccattgcttgtttttctcaggtttgtcaaagatcagatagttgtagatatgtggcgttatttctgaggcctctgttctgttccattggtctatatctctgttttggtgccagtaccatgctgttttggttactgtagccttgtagtatagtttgaagtcaggtagcgtgatgcctccagctttgttcttttggcttaggattgacttggcgatgcgggctcttttttggttccatatgractttaaagtggttttttccaattctgtgaagaaagtcattggtagcttgatggggatggcattgaatctataaattaccttgggcagtatggccattttcatgatattgattcttcctacccatgagcatggaatgttcttccatttgtttgtatcctcttttatttcattgagcagtggtttgtagttctccttgaagaggtccttcacatcccttgtaagttggattcctaggtattttattctctttgaagcaattgtgaatgggagttcactcatgatttggctctctgtttgtctgttattggcgtctaagaatgcttgtgatttttgtacattgattttgtatcctgagactttgctgaagttgcttatcagcttaaggagmttttgggctgagacaatggggttttctagatatacaatcatgtcatctgcaaacagggacaatttgacttcctcttttcctaattgaataccctttatttccttctcctgcctaattgccctggccagaacttccaacactatgttgaacaggagtggtgagagagggcatcccagtcagtgtggcgattcctcagagatctagaactagaaataccatttgactcagccatcccattactgggtatatacccaaaggtctataaatcatgctgctataaagacacatgcacacgtatgtttattacggcactattcacaatagcaaagactcggaaccaacccaaatgtccaacartgatagactggattaagaaaatgtggcacatatacaccatggaatactatgcagccataaaaaatgatgagttcatgtcctttgtagggacatggatgaaattggaaatcatcattctcagtaaactgtcgcaagaacaaaaaaccaaacaccgtatattctcactcataggtgggatttgaacaaggagaacacatggacacaggaaggggaacgtcacactctggggactgttgtgcggtggggggaggagggagggataactttaggagatacacctaatgctaaatgacgagttaatgggtgcagcacaccagcatggcacatgtatacatacgtaactaacctgcacattgtgcacatgtaccctaaaacttaaagtataataataataaaataaaagaatataaaaattagctgggcgtggtggtgcatgcctgtatcctagctactccagaggctgaggcaggagaatctctggaacccggaaggcagagtttgcagtgagctgaggttgcgccagggctctccagccagggtgaaggagtgagactctgtttcaaaaaaaaagagtgaaggtagaaaaaaaatgtttcagacatactggatgtgaaaaacttgcctttcacattgaagaaactcgtgaaggtgaacaaagactggatcttctttagggtgtatcccaaaagatgtaaagggaattctgtgcactggtccagatggaaggatctccgaaggccccaggaggatttctttttgaagaagaaatagaaataaaacatcagatgtgaaaaaactcagggtagatttagacaactgacatcaaattttcggttaaatattgataaattcatagaaaattaagcaaacaaaacaagaagttgtacgggaaaagaaatgaaatcatgtgttatgttgctcactctgatagctcacatggtcataataaggtcaactatgaaaattactccagccagcactgcagtttaattagtggagagattggaaaggacaagcatgaggggtggcttgcagggagagggatttatggggagtaaagggttaagtcctcctcttccaaggtagaaagcagatgcataatgcgtaaaactgaaaagctggggaattgtaatacaaaatggcgcgatctcggctcaccgtaacctccgcctcctgggttcaagcgattctcctgcctctgcctcccaattaactgggattacaggcatgggccactgcgcctggctaattttttttttgagactgagtctcgctctgtcgctcactgcaagctctgcctcctgggttcatgccattctcctgcctcagcctcccgagtagctgggactacaggcacctgccaccatgcccggctaattgtttgtatttttagtagagatggggttttaccatgttagccaggatggtctcgatctcctgacctcgtgatcctcccacctcggccttgcaaagtgctgggattacaggcgtgagccactgcgctcagcctacatgcagacagttytaagagatatttgggtgtaaacatcaagagtcagctagaagttggaagtgtcacctagaaagggaaaacctgacttaagggctgggatctgctgttttctcaacatggtttttacagtagttgattcttagattatgtgcagttatgattttgaaaaatgaatagaaaaaagcaaatctacaatgcacggcatgtgataaggggacatatttcacaaaactgatttttatttttttgagatggagtctcgctctgtggctcaggctggagtgcactggcgcaatctcagctcactgcaacctctgcttcccaggttcaagcaattctcctgcctcaacctcccgagtagctgggattacaggcgcccgccaccacgcctggctaattttttgtatttttagtagagacggggtttcgccatgttgaccaggctggtctcaaactcctgacctcaagtgatccacctgcctcagcctcccagagtgctgtgattataggcatgaaccactgtgcccggcctccacaaaactcattttagttgtgcatgtgagtgtgcgtgtgcactggattgacttttgttaaatgtatttcttactatgggttgtgataagatttgaaaacccttgtttagtggtttctcattgtcagttcacttttcttttccttttttttttttttttttttgagacggagtttcgctcttgttgcccaggctggagtgcaatggcacgatctcggctcactgcaacccccgcctctctggttcaagtgattctcctgcctcagcttcccgagtagctggtattacaggcgtgagccaccacgcctggctaattttgtatttttagtagagatggggtttcaccatgttggtcaggctggtctcaaactcctgacctcaggtgatccacctgtctcagcctcccaaagtgctgggattataggcgtgagccactttgcccagccagccagttcacttttcacacttatgaattgttgagatattttacagttgagaatgtgctacttttttaatttaaaaaagggcaggagggaggaatattaaaggtgagtacaacactgaagccaaggagccctgtttatgatgactgccagccttatatattgtagcaagcattctccttcccagcaggggcacctccaaccagcagcggccccattttcatttataatacaaaggtggtaatggtaagtgtgatgctggaaacctttttggaaaatcacttgtaagtccaccaccaccccatgcagccattttcatgctcttaacattccactttggcctttaagcacatgcttacaaattgtctcataattgcaaaccatgaggttcatgtttcacttaatgtgtattctttttctggaggcaaattcttagtcattagtttattgattaagggtgtgacctttttttgggtggtaaatgtaaccatattgctaccaaatggtagtaaccgtttcatctgctgccaacaaggaataaatgtgtttgccacaatagtggtggcaattttgttaaattaaaaagtgtaaagtaggccgggtatggtggcttatgcctataatcccagcactttgggaggctgagatgggcagatcacccaaggtcagtagttcgagatcagcctggccaacatggtgaaactcctgtctctactaaaaatacaaaaattagttggacatggtgtcggtcgcctgtaatctcagctactcagtaggctgaggcaggataatcacttgaacccgggaggcggaggttgcagtgagccaagattgcaccattgcactccagcctgggcaacaagagcaaaactcttgtctcaaaaaaaaaaaaaaaaaaaaaaaaaaaaaaaaaaaaaaaagtgtaaaataggccaggcacggtgactcacgcctgtaatctcagcactttggaaggccaaggtgggcggattgctttgagctcaggagttcaaaaccagcctgggcaacatgatgaaaccccgtttgtacaaaaaatacaaaaattagccaggcctggtggcatgcacctgtggtcccagctactccagaggctgaggctagagaatcacttgaaccagggaggcggaggttgcagtgagctgagtgcgccattgcactccagcttgggcaacagagcgggacttgtttaaaaaaaaaaaaagtgtaaaatagtatatctgggttgtctttaagttttatttctagtgacattgaaaatttttccttttttttaaatttttttattttttaaagaccgggtcttgctctgtcacccagactggagtgcagtggtgtcatcactgttcatcacagcctggacctcccaggctcaagcgattatcccgcctcagcctcccacgtagctgggacttcagtcaccacacccagctaatttttgtactttttgtagagatggtgtttggccttgttgcacaggcttatttttccatttgttacgttattcttccctttgttattctttcctttgtgtataatgttcatatcctttgttcatttgtgtacaacgggggtctttttgaagtatgggtctctataggttgcagatatttactgtgtcataattttttcagctgcagataacatttgtgtttccttttttattttaatgttacttttattcatggggattttttagatttgttatctgttcaggcttggtagtcttgtgctttgaattgttttttcctgttgcctcaaaagttgaaggtgggtaaaatggacttgaaaaccctgttctctgggtgtggtgtgtgcatgtatgtgcatatgccctttaaatctgtaagttgttatttgcttattatttaactcccctcaagttgctaaccagttatctcactactgttaaacaattctccctttgccctgttttgagaagttggtattttgataaacatgtgcctccttcctgccacactgatgctttattttctatcacattcttagagttgagacagtttgagatcctaattttttttctaggcacacaaaatagcttttggagattcttctctgctggaatggtacctaacatttgtgaaaagtttacccatctctacttttaggaaggttcttagtcatgcgtgcgtgtgtgtgtgtaagataaagagtgttggtgttctttgtggatgcatctgctcatagagggctaacttctgccttccttcagtatgatgtggtttagcaaatgaggtgagatgctagggaccatggtcattttgggaatcattttgggtcagatctgggttctagtttcagcactactgcctttatcagccttcctgcatttttgtgtaaatgccctagtagctccgttggtggctcaggagcgctcagtccttttttcctcccttggggttctgaagcctccgagccatacctgttgtgcagctccatcattacccctccacagtcagaaggccaccttacactgtgtaggaggatgtggcttaggctggagtcctaatgagtctcccatttaccttcttcagcttaaactatgtggagaccaggatctgccagccccacagagggtcaggacctgctttccaacccgctggccaacacagcagagagggacagattgagaggtgccttccctccctgtcccgaggttaggtgggtggcaggggtgggaaagsggggagcggagaaggaaaactgaaatgtttcttttcaacagtttattgcaatagtttcctcttctgtgggttgaggatgggggaaaaagtgtcactgggacagccccacccctagacctcatggggttatcctgggttgtacaaaaatggccaaaaatggcataatactggcggtgcatgtgctctgggttgtaagtggcacgtgcatcaggatacgttgtctgggtgtggcacacctcttcttggatgagagagggtttcttcctagttattccgcagtgtggcccctagtgtagtttcgagtgttgatgttaccaggggggaagtgagggcttggagtttaggacgtggctgtgagagtctctgacgggtgtaggtgtggaccccagcatctgaaggcagaattgttccctggttggtcatgcgtgttgggtggaaggtgaagcagcagatggtgagggaagccaggcgccctgtggagaatccttgctccagagcgctggccttcctgccaactgcatccccatgaagtgttccctgtagcctttccatgttctgtacactttatgggtgtgagctgcagragaccagggaccgtcaggttgagattccctgtgttgccacaggacagtcattttgcaaaggccccgggcaggggagcagaggtgagccaccaacactgtggaaagcacacagacacgtttgctaatgagctggtttctttgtggagctttcatcaaggaggaagggggaagtttggcttttcttactgcttccggagagttctttacagggttgggttaaatgaggtcaaaggagcactctgtaggatcccaaggcattggattccatggctcgcaccagccctccttagttcctgaggcccagctccctggagggcacagccttctactttccaggctcctctgggaaccacgaggaagagaggaggcgggattgtcttgtccataaaaaaagaatagagtttctaccgcttagaacatttttctgcctcataaggcatttccagctgaattgacagttctctgtgataaatgtacttgagttttaggttaaaaattttttttcatcctatatgcattaatccagacatggatttatggttgggtagcccaaccctcccctgaagggaaaaaaaagaacaatttaaaaagtcaaaccattggctgggtgtggtggctcatgcaggtaatctcagcaatttgggaggccctggcrggaggattgcttaaggccaggagtttgagactagcctgggcaacataacatagtgagactcctatctctacctacacaaaaaattaacaaaccaacccagtgctttgggaccctgtaatttgaaacaagctggtgaatgctagttatagctaccgttaggttagttgcctacacggagcccctctctgcgaatccgtgtgctgcaccacagctcaacaggcccgtctaccttgtaagatccccaaggggactgctgcagccctcagtgcctaagctgatacctgatctgctgggcatgggtctgctggcatgtcagtatcaccgtgggggcgggggtgggggacttgtcggaaatgcagattcaaggctccaacgcagaccttcttaccrgaaccttgtgttgggggctgggatctgtatttaaaataagtgattctgatgctgccagccaggaccctcatgccagtgacattggagcaggtcactaaaagccccactttagttgaggatgctgaggtcctgagagagcagggacttgcatgggctgaggtcatgttgctgaaggaaggcgcctgtgtctcttccttgagagctgcttttctccctgcagccgctctggcccatacagtgttcaggccttgtgtgtgtccttgtgtcctgtagagtccttgggcaacaggtggttgtgttcacactcattcttggaggcaagttttatggatgtgctcttgtgatggtggggcggtggtaggggggaggtggggatagggcagctgggtagccgtctgcctgtcattctccccagctggtttctgaggtcagacagaaggagggtctggtgggtgagtggtggtgtctaggctgtgcccgtcaattccacaccgtgggagaggtggagcggtcacaggttccgtttccagaggagtgtggtttcatgtcccttcttggcacttctttctcagaacattgcagaccagcagccagcctgccgtggctgcctcacaggaaggggttttgcaagtagccactccgtggaagctggtttctcactggcggatgtgggtgggtcgcctcctcacctctagggtggccttgtctcctttcgccttgggctgtgttactctcctcacctgggaagtggggggtgagcagggggctggcatgggaccactgccctacgggcctctgatcctgtccctacctgtgcacttgaggcactccctccttccccactgttcagccactgcattgggggcaggggaccgtggaggacttcggggtccacctggattgccactggggttcaaaaaggaaagcagcaaaggtaggccaggccctcagaaaagtccctcggaaatagcaccctcctgcagtaggatctctgaggttgctttgagggttagacacagataaaaaacagtggccccacccttcactctgtagttcacagggtcttcccacataggctgtgtaatccaagcttcattacagccctggaggacaaagctatggctatagtctgggttgaggtggagtggggggcgagtgacaggggagggagggagcagggggatggctgctggctgcagtggccttcctcacctctgagggctgagcttcagaggttttcagaaaatgttgcatgaatgagtatggagtcctcatcttggcttttcttcactgggcacagttggatcatgtccagacctgcctgcacgttcatctcccaaacatggctctttgtggtcaagcccgtttcttctgttggctctggtgggtggaaagaacgtggactgtgaagtcccctgtccttggttccaatcctgggctgtcattgctctcttgtccttgggcaagtcatgtgacctttctgaatggtttcctcaaccatgaagtggaaaaaaatcaattcccaatcgagaggtgatgagatcaatatttgggaaggctccaagccgaatttctggtacttagaagacacttaaaaagcatctttcttcctttcaaaaatctcccttatcctttcgtttgtcttttggagagctgatttaacctgagttttgcattacctatacctggccttggtatcaggcctctgcttggaccagtaaagggtcatgagggaaatgatcgggagctttctagaatccgcatatgagctggtttgggggaaaggttttaacgctgagcctgccatctcactagtcacacatctctccgcagattctgcttctcagaagatgcactattatagatactctaacgccaaggtcagctgctggtacaagtacctccttttcagctacaacatcatcttctgggtaagtggatgagagctgccacattcccttgtttagtycttcattcagtaaattatggttttccacacactcttgatttgccagacactrtgtaaggctctgggataaggtggtgggcagggtcagtgacccctaccctcacagaaccagttgcagctgtggggatgggggaaggccaaaggccgaggtgattgaaagccagagtaaggccaacccagccttgggggttcaggaagccttggggctctggcccagatgcctgtctgtctcccctacctgccccctgttccgatcctgggagtgccccaatgagacatcagcagcaaggtactttgtgtgcatctgactatgggccaggccctgttttaggttctgggaggtgataacagacaagggcaataaagtcttatccttgtagtgcttatgtgtaaccaagagccatgttagcctcctgagcaacaggacagtgagggagaagctccttggatagggtgaccagggacaggcattctgtggaggtgacttgtgggctgaaaacttgagtactaatgaagaggcagccaagcaggagtctggggaagaatgctccagatagacagaatggcagctgcaaagggcctgaggcaggaatgagctttgtgtgtgcaaaggacaaacagaaggccatgtggctggagctgartaagtgggagaagggacacaggtggggacagaggcatgcaggattcaggtcacaaaggatcatacaggtctcaataaatagttggaattactttctactgctttaaataattattggaaggcttgtaagttgggtggtgtgatctgattttgtagtgactgcagagtgaggggatggatggtggtaccaggttctgagatgggatttggggtagaaggggtacatttaagttatctcatagccagcctcagggagatactatttcctttgtcgttgactgtcctggagatggaagtcttggccaaccaccatcagaggaagggctggaccagatgagagcatggaagatgggtgtgttgactgagaagaggagaggtctgaatattgagccctaggatgctagaggttgggtcgaggaagaaaacccactcccaagttggctgagagcgagtggcctgtggtaaagggaagaccaggagattgtgtattgtagaagcctttamagtagaaaggcacagtcaaccatggtgcagggaggtgaagaaggatgaggacaggacattggtaatggcttagacaaagtggaggttgttgatgttgacgggaccactgtgagctctgggtaggggatctgggcgggtggatagaaacccagctggagtcggctgaggagccaatgagaagtaaagaagtgaaggggatgactcttgacagttcttccaaggatgcttgccttaaagaggagaagaaaaatttggacactggctggagatggtcaagggattaagggagatatagcatgtgtttattgccagtgggattggtccagggagaggcagacattgattctgtgcaggagggcctggggacatgatcatgcacagagtctttgaaaaccattaaacatagtttatgaatatctgtgtgggggtaggtggagaaagaaggacagaatgagtggccatgatgtcacattttgcttctactgcagatttggcatctcctatggggactggaactcttgaaaacaaggcagacttactaagccttctcagccttgcaagcttgattttacagcytcatctcctggtgatttatcttagtatgtttggggattttctgtcctagagaaataaggtgggattcaatggcttggtcttttagcccacatcttttcctgtggtccgataactttgcaccaacatctgcatcattgtccctggaatagggcattgctggatatttgatgtggtgcctctgggtccctcttaatgcgggagtccatgctccatcctcwtgatgtatggcttctcagagcagcattgttccctgtctggagagccctctggccttacctggtgttcccctccaccatccygcacccccaggcaagtatatggtggaggttcgctgggctaggcaggcagtctgtcacttgtgcacttggacacccagttgctcctctctgtgggtgtgctgcttggctttgtgcctcaacctccaactctcatcttgatttctgcagctagagcagcactctcccactactgctgtggctgagggccctggtatcttcatttcttcagagggtttcaggagagagtttttgacatcagggagctctactaacttgcccagtaacacgtttgcagcactatattccagtagtggagtgcatgaatccagcatggtagcaagtctgcttggtggttgaagggtgctgcagtgtttttgggcttttgcagatttggcaatgtgtgtygaaagttaatcatttttcagttagtgtgcmttggggcagaacaggaaggaacaaacaggaacagtcaggaagaccaaacatgagagagcttggttgggaaataagagtgggaggccaagtgccttgcctagggggaagctgctggaccctccccactgggttcctggtagtgatgtgcagtcttcatttgcaatggagctggcaaatggggtgaggcctgagatgggcgcacagacctctgggaagctcacggtrtagcaggagggtgccgggctggctctgggcacccagggcctccctgagctgagtgacctggctaagcctcagtgttttccttgtgatgtagcactctcagctgcctagtgtctgcctcaggttgctgaaaatgtataaagtggaatgcccaagcccttacctcttcagataagttttctttttttttaaatggagaaaatatgaaagtaggataataaaatgaactccatgttcccaccatctagcttatttgatttgtatccccctgcccaaccctttggattattttgaagcaaagcccaggtagatgattttgcagtgtttttatttgtattttgtttaatgaattaacagtgagcagtggtgcagaaggattgcacgtgttgatggtggacactgggctcagcaggcaagtttgaatgtgcagaaggcaacttgttgcttctgtgaccaatcctaggtgttgggacaaatatgaggttttatttagtagtttgccctcacttagaattattttcacaggcctggcgcggtggctcacatctgtaatcccagcactttgggaggccgaggcaggcggatcacgaggtcaggagatcaagaccatcctggctaacacggtgaaactccgtctctactaaaaatacaaaaaattagccgggcgtggtggtgggcacctgtagccccagctactcaggaggctgaggcaggagaatggcgtgaacccgggaggcggagcttgcagtgagccaagatcgcgccactgcactccagcctgggcgacagagcgagactcagtctcaaaaaaaaaaaagacttattttcacaatagcattctttatagataaataccgtttggtacctaatagatttttttaagctctctttctgactttggggccaaggttttcccgggattgttaaaacctgcttgggataagaaatgtggatgccactgatgtttgcatgtctgttctgaacctcttggtttacagaatgagaatggaatgggcttcatgaggttcttatcacaaggatgttagggaaaatatgcttccatgcaacatggctttttgagagcgctagtgttttttacttactgaaaaaatcattctttggttgtgctagacctgtttttagtgcaaaaatctcactttgacttaggaaatgcaaatcaaaaccacaatgagataccacttcacacccattgggatggctattattttaaaaaatggaaaataaccgatgttgatgaggatgtggagaaattgaaacctttgtgcactgttagtgaaaatgtaaaatggtgcaattgctatggtaaacagtatggtagttccacaaaagttaaaaatagaattaccgtatgatccaacaattccacttctgggtataaccaatagagctgaaagcaggatctcgaagagatatttgtacacctatgtgcacattcatagcagcattatttacagttgccaaaaggtagaaacaaccaaagtgtccatagatgattgagtggataaccaaatgtgatatacagatgtgaaagagcttaaaaaggaaggcagttctgtcacatgctacagcatgggtaaaccttgagtacatagtgctgagtgagataagctagatgcaaaaagacaaacactgtataattccacttatatgaggtgcccacagtagtcagaatcatagagacaggaagtagaatgttggttgctaggagcccgggaagggaagattggggagttgttggttagtgggtacagaagatctcactttgatgtgcagaggaagggaagctgggagaggcgtacactggaggagtggcatctggctctttgtctttgttcatttataccccccactggttccacaaagcacttggacttttctaagtttgccgagtgaatcctctagagggatgattccgataatgtctgcaactccagggttggtttccaacacaagcattggctttaatctgcatgcagaggttggatgaagtccttgcctggatctgcttcagagatggattaaaagtgaagaactgagaccctttctaaatagactgtaggcctgtgttacacaggaaagtcctttgcttgcctttagtttaaaaaaattttttttaaatgacattctgccattggctttctcagtgacttgggtctgtttgagcctacccttgtaaaatgtgtgaattcacctctgygcagcctgtttctgagtgagatgagagccatggacatctgtgctctgtgaccagcatggcttgaggcctattccttcaaagtcacagatgcctcctgtgagtagggcgaacatgtaatctgtggttcaacttttgacagtaagagaattttgagagagtcttgcgaattttgccagaacaacaggtgtaccccaggcctctcctgtgcaaacctgggcatgtggccaccctgcacaagaaagggaagacaagcccaaggtggaaagatcaactctcttcccttacctctgtgtagggcatctttgcaggtggggtcttattctcttcctctgacttttattatgctcctctttatagaggacttgccacctcccaggatagtctgctgttcctgggctcttctgactgatggaaaattgcccttatttgagctgaactctgctcctttgatatcagaccccaaggcctgatccctagatcttcagacaaatgatttcttcatttcyatctcagtaatgcagtcaaaagggaaaagtctagtgttttaataatgtatatagtgtatttttgttttcactgctgggaagatgtccctttttctcttcaggtagtatttaatcaacttttgtaatttcgtggaaattcataaaggctaaacaaggcatcccaggtttactgcatttcctcttccatgccccagcgtcctgtctgcaggcacacagtttcatatcctgtgagtagtatccttgcagtcttaagatacgcattttcacatcagcatctgctaatatagaacatctactaatatagaacattccaggttgcaacattatctttccaattgtatttttagaaattcccatattggacatttaggttgtttccaatttttttgctatcctagataaggatgcagtgattagtttatgtaatacgcattcttccctttagggaagggagggaaattatttgctgagatagattcccaggagagattaattgggtcacaaggtgtgtacattgttttgacctgcctgaacatacagtcaaaatcacatccccagaacgactgccccaattcataggaagttgactgtcttttggcactgtgtgtgtgtgtgtgtgtgtgtgtgtgtgtgtgtgtgtgtgtrtacatgtgtgtatttcatcatttaggcttgccaaggcagagggcagggattgcttaatcagaaactccactagaacttaaggagtggcctgtggtgctgatgcctgcatggcctcagcccctgatttccccaacttaggcaagtgtgaggctgggaccaccagttgggattactgaggaagggatgttcaaggtgctctgagattattgcctggcacacaggactgttaaatgcttgcacgtactttcaagtcttaagtagtttggtgtgcttgtataactctgcctccttggctggtaaataatcagcatggcatagtctacaggagtgatttttcttgtttgtactttttttctttaatggaaatcctttttataatgatcacttctgttgatgtctgatttagatagaataacatttattcatttcaactgtacagttcagtgacagctgtacatgccacataatcaccatcatcacaatgaagatataaaacattcccatcaccccagaaactttccttgtgcccctacagtcatgcctgccccaccctaccccttccctgggtgatggttgttctgcctcctgttgctataaattaaactctttggtatctgacttttttttagttaggtggtagtgtctctgttgtttttctgtttttaattactttttaaaaatcttttgaaataatttcttattttttaattgtacaatatacgtaacagaacatttgttattaaaaccatttaagtgtatagttcattggcgttaagtacattcacattcaccttgattggtgttcttatttttattattttttcctttctacttgggattattttgctttttcttagctacttaaactggaagattagatcactgatttttagatttttttcctaatataaatatttgaagctgtacattttctgcatcccacacattttgatatgttttcacttgatttggtaaaaatagttcgcatatgcatactctatgaactgtgtctcctcccacctccaggctgacttcaagagtttctccttttattctggattatagcaattttatacatgctggtatagttgtctttgtgtttattctgtttggggttcattgggcctttgagatttgtgggtttatagttttcatcagatttggaatattttagccattatgttttcaaacgcacaccctttttctccccttccctgtcccatttccctaggacattgtttatctagggcacagaggctcggtttagttttttattttgttgagtgttttaccattctcctttagtttccatagctttgtcttcagctttactgatcttttcttccatactgtctcattggctgttaaacccatctagtgaagtcttcaattctaatattgtagtttctatttctagtcgttacatttaggtattttttatgtctccaatttctttccttatcttatttatattttcctttaaattcctgaacatatttgcaatacttgttttgaagttgttgggatttcatcttctttgtcattcttgtgtcttctatttactgaattttttctcttatagctcacttctttccttttcttgcctatctagtaacttttgattggatattagttatagtttttctactaagtattcttccctaacagtattaagtcttttgtgtctgacatctttcatttaatatcatatgtgagattcattcatgcagttatacgtagttgtagatcatttattcttgttgtgtaatattctattgtggggatatataatttgtgttatttacagttttaggctattaagacctgttacagtgatataaaaacataccagtgttggagacctgagtatagggtatcccaggctttgtgtggctgagcaggatgacatcccatctttcctctccaggtccagatggttttagtgtgatagtttacagctgagcttttcagactatggcttgcaggccaaacctggccttccgcctgtttttacacatacaattttattggaacacagccacacccattcatttatgtattatctatggctgctttcccattataacagcagagttgagtaattgctacggggatcatccagcacacaaagctgaaaatatttactatttggccctttacagaaatgctgaccactgccttagtatcttgattttctacccactgttaatcactgtgaactgtgccaaagttaggttggggggttccctctctcctgggggtactgcctatcacctcccttgaatggctgtgctccctccgcctgccttcatttccagggccttgactcaggttcctgggcggggctcagtgggggtcaactctgttatctggcaacacagagacagctgtggaagctgcccctggagccctctgcacagtccttccccacaytggggccctcacatgggtttgctggctctgctgggagggcacatgtgttgccttttctcagaaccacccttccggcaggaggaaaagctggggtgtgatagctatgtgaccccatgcaaggcacctcctgctctgggctctgtttccctctgtcataaggaagccgagccctagcatcccttctggctcccagaccttccgaactcccactgacaagtggcttggttcaggctttcaacacaggacagataactgcagctcctcccttggcccactgggctctcaggccaggttgggtctggggtctgcaccctctggtcctttttggcttcaaattctattcaatcgtcagcatttcaagtggccacaagcatctctgttgtttcctgaatgccccaggcctggattcaggatttcttattctggagagtaccaggaccctggggtttccgtctggtgtaatttataatggcaaaactcagccagtgggaggtgcatgggtccttgctgcttattttgctgattgacagactgaggcccaggagagggatggcttcctcgagaccctgactctgtgagttagggacaaagctgagactcagtcctggcttcctccactctctgctgttttctttccatcatcctttcctacctcacttgaaaagcctccagaaggccgtatttccctaagctctgcttcactgttgtctccagaagcccagtaaaacaggtgcctctggaaagcacttggtcttaggacagaagctggtgctggaagtaattgggggtggggtacagaacaccagtgtcaagagaaggagactctgtcttcaggacagcagatgcttgtggcatatccttgaacgcccctcacatctctgctctgtctgccgtgcgggagggcatggccaccttgagactggctctgtgcctggagtaagcatgtcacgtaggatcttccttcaatctttacaaccttcctgtgacctaggaaagataatccctgttttgtagagaacataggctcagagaaggtcttggactcgcatgaggccctgtcactaggtagctacaaagcagagactggacccagggccggctttgttcaggggaagaggctctgtgaatgtcaggctgagtcagcgtgtggattgtgcaagacccggaggccagcagggcagagcctgagagcatcgcctgctgctggtgattcgccttgatcttgctgaggaaaggcctctggggcctgcaggagttgccaagtacttttatacacgcttaaatgaaatcttgcaaggagccaaggccattaaatcatgggtgagaggctgcctttgacctgcttggagctgcatctttctcctccagttcagcagggcctggccgggtgtcacttccttttgtgacttgattgtgcttgggtaaagtaccacaagcttgctcgtgtggtaagtggatttcttgtgtctggactctggctggaccagcccagagtgccccaagaggacctcctgcctttcgcaaggtcatttgcctaaggtgaaaggtcaatatttaatcttcacagtgacccacaaagaggccctgctgccttgtccacctgccctggttgggacacagcgtggtctcactgcctgacagtgtgggtcatttggctgtagagctgcacaaccccaaagcccccctgtggaattcctacatccccgggctcttgtgtgagtgcccgtgtgtggaaggcagctgctctgtgggtggtaagatactgtgttgccagggtcagaggcatccaggtttggttcttaagtctgccaccagctagccgtgtgaccttgggcaaaggaccaaattgctctacatttgagctttcccatgtgaaaaatgagggtaattgagccagagttatgggatatggagggatagccttaggtccattaagtatttaatgcagcgcacagctcccaggaaagggcagctattcacagtgaccatagcagtttaggtgctcgctggtccagcagaggaggctggcctctcctcaagctgggccggagctgggccccgttcttcagtaggtaattcaattaggtcatgggagggagacaaagaaggtcacttgaggctggagggcactcagctgaaccctcactcccagaagattggcagccagggctcacagcagccagggcttacctggcctggccccatggaccatctgctgcagagttccagggaagggttccgtggggtgaagcgggccaatgacccagttcattcatgggaccgttatgtgagctctcaggcagatcacttcccctgtctagtcctccctcaatctcctggtctctgaaaccaggtttgttggtactcagagttcctgccctgggccactgttcattgaacccatgatctgacatgtgatccccaagttcctgtctttccggtgtgagttaactttagttcttcctttaaaacagaatgaaaacaacacaaggccttattcttttttttttttttttttttttttttttttttgagacgaagttttgctcttgctgcccaggctggagtgcaatggcgtgatcttggctcaccgcaacctccacctcccaggttcaagtgattctcttgcctcagcctcctgagtagctgggattataggcatgtgccaccacgctcggctaattttttatttttagtagagatggggtttctccatgttggtgaggccggtctcaaactcttgacctcaggtgatccgcctcccaaagtgctgggcctcccagcactcggcctcccaaagtgccgagatttcaggcatgagctaccacgcctggccaagtccttattcttagagctgagagaaagagaactgcacgcagtggtggggagctggcttccccagtaaacacagagtcagccagggctttccctgggggccttgagaagaacagcaagcgagggagggtgtggtctgtgggccatatgcagagcggtaagcggccctacagcggccctgcatgtggggaaggggcgattggaacagaggtgagcaggagcaggcctacctttgcatgggcactgtgcccctgagggtggggatatgaactgctcttgaggtcgagggtcttttttgagaacttgtgcagaccaaaattccttttgtgaaaccagtcacctcttcctattgtatctatttagtcactatttagtcacctaggagaacaaaacaactaaaacagcacctcagcgtgaattcacagaaacctattaatatagatggaactgacgctgtttttttttttttctttttttttgggagacctggtcttactctgttaccacccaggctggagtgcagtggtgcaatctcacccttgacctcccaagttcaagcagtcctcccacctcggcctccctggtagctgggaatacaggcatttttttttttacagctaatttttttagaaaaccttttttttttttttttttttaagagatgggggtcttgctatgttgcccaggctggtcttgaacgcctgggctcaagcaatcctcctgcctcagcctcccaaattgctgtgagccactgttctcagcctgaggctggtattaatgtgggaaacaatacccttagaagtcagacttagtagtcaaggtgagagaaggggtgagctgtgaagtgcagtgtggaggagagaggggagctccagcagtggttttgttgagtgtccttaaggtagacttttctcacctgtcccatgtggccccacaggatgagcggactgtcatggaaagctgttaggcaggggctggaatgtctgttgggaatgctggatggggcatcggcctctgggcttgttctgctctgaccataggcaaatgcccctgtatagagcttgacccatgcacctgggccaggctgagcttttcttggcccacatttgctctgaatgcctttggattgaatcacacccagaagtgtgcctgggggtagctagaaggacccaggcaagcactgtcctggtcttgaatcctggggagtcactcatgcctgctctgtgcctactgagggccaagccctcctcgttgttgggctgcaactctgaacaaaacaggtaacatctctggcctcagaagggcttagctggggagacacaatagagagacagcccctgtggtctgggatcagtgccgcgaagaaaatcaacagaggaggtcacacatggaggatggggagcagttccactcagggtggtaaaaggaggccttgaacgcagtgagggaggagccaggaatggatatggaggaagagcattgccggctgagggaacagtgtccaggctctgaggcaggggtgattttgatgacttcaagaaacaagaatgtcagggtggcccagggagtggcgttggagcagggaggtgggaaggagatgccgtgggagatgtgtgtgaagcctggctgcagaggcccttgggggccatgggagagaccgtgcattttcttctaggtctgcgtgggaagtcactgcagagtttcgaggaggggagttcccagctctgtatttttgaagggtcagtcttgttgcttggaccagtgaggagccccgtgggatccagactcgagtgggtggagccggggcaggtgggagcagagacactggaggaaagctggtcgaatgcactgtgtatttggaggcagaaccagcagagggtcctctgggttgagtgtagggcaaaagagaaagaaggcaccaagcctggggtctgggttttctctcttacacttgctgggtggacggtggtgccactgaatgagacggagaagagttggggkgagctcggttggggttgggggaccaaggctgcgtagtggggcacagtaagagtaaaatatcgttagctgtcttaggaggacaagtaaagtagacattagggtatttgaccgggggcatggccaggactggacatctgagtgtgtcactcagcaatgtttagatggtatttaagccttgtgaattatgagatcatcgagagggctcagggcagggtgaaggagctaggactgtgagtgaggcccaccagcatctagaggggtctgaaggaggaggaggaggaagagcagggaggaaggcagtcaggggcatatgcttggggtccccgaagcagggtgtgtcagtggaatggttggaggaggagagaatgaccagctgtgaccaatgaggtcagataccatgaggaaaagtcttggcctccagctttggcaagagggaggcaggtccctgggggccttgaataagatgggtggggatggagcctgcaggattcggcaggtggtgaccagtcaccttcaggttgctcagcatgccagtgtaagacacctggggagggaaaggaagcggtcatgcattctatcaggaaaacccttcccagctagtcagttcagggggaggactgagaagcgggaaaagggtgtggtgtgatatggtagaaagggctctacccccttggcttggtgctgtatccagtacttgagacggtatctggcactcgggatgtactccgtgaatatttgttgaatgaatgagtgaggagtgaatgaatgaactgagacttgtgattcagcccttctccccactgcctgacattttrgtcttggccctccctgggccccagtgctctgcttttgtaaaatggagggattggttcttggtgggggttctttacttagtgttcacagaccattgtgggagccagcagtgggaagctgtgacccctctaaaatttcatgcaaaatactgggcatgtgtgcattttctgaaagtgatctgtgatccagaagaggttggatcacagatcactttcaggttggatgagacttcctggggctttccttgagccctttctttccattctagcccctggggctagttactgagtaaaataggtagaagtggctcaaggcttgagatcaccggtagtcatagagaagcgtggtcctgttatttatcgtgagatggtgataaatggcagtgaaatgccagtgtggtgtaaagtagtcacagaaaaacaggaggcagctttattaacagagcccacgttgtgttttgttstatatggaaaagccctccctggttcaggaacctgtgtgatgtatttgggtgggcgcctttctgttgtggtgcacatggggtatgggttcctgcaggtgggaagttggggttgggggtggtgctcctctggggcgagctcattgcttagagcaagcctattttcattctctagctaaaagcccagcctttcctgagcatagatgcgccccctgctcattgtagttaacagtagggaggaggctcagccctggccagtgaatggcctgggccrctggatagctgcttatctgtgcctggagtctatctccagggctggagagctggggtgtgtggcagagatgctgggctgtttccccctgtcctcaccctgtggtggtgcctggtcctatgcagtctcatcctgtgttgggaacctctgaggggacctgggtcagccctcccaaggggtgatgtcttcgtatacaccagatagtgcactgaaatgagttcagggttgcagaaaggggaagaagcagcacagcctgatgtctgtgacccatagtctctccagggtggagtccgctctgagatcttttcctcttccttccctggggcatrgggtcatctgaggttgaaggagtttgtccagatattcaggaaggtaggttcaggttatctgtcatctgcggggcctgaggggccatgtgggatgtgagctaggagcatgccctacctggcagtgtggactttgctctgtgaarcatgttcacagtgctggtttccaacctaacttccttctctctttcctctgccccgcttagttggctggagttgtcttccttggagtcgggctgtgggcatggagcgaaaaggtaggtgtaactgtcgcaggacactgagcttcaggcagccaaaaccagattcgttggacttcattttccctcctccaatctgttccctgacaacaagcatttcttgtgcagtgtcaaggtgtataattgtcaatctttacagacacagctcttgygtactctgcccacatgatagtattggctgctggaggtatgggctgggctggttgggttttgagccctgtggatgtggagagctcagctcttgtatgcagctgtgcccagagcaggcttgggcaatccagcttcctgaccctgtctgtgcctctgggagcaagcgggcaggtccctgaatacaggcatgcttattgtggaagcccttatcctccaggatgagaaagagcaggcagcagggagcggggctgggtgacatgcccccagggtgccctgtggggcaggggtgggcctttaagcacctctgggcctccttgcccagcctcaggaggagaggggaggagtggagacctggctcctactgtcgggaaggacatggtgcagttgcggctccaggaaggggatgagactggatatgggcagggtggggctgtgctgctgcttgttgccctgtggcaggggtgctggggaggcagtgagggctgaaaaaggccagggagggaagaggggaggggagggaagcagtaaggtggagcaggcctggccagaaagagccaggaataaagcttcctctagtgtcttgrgcctaggccttcttccttcagtggaacctccctttgcttccagcaggaggaggcaggagaacctaggtctacaggctttcctgccatggtcttagggactggataaggcccaccttcaggtttgggcaccttccaagtggcctgtgaacccctaaagggcaagagctggggtacgatgtccctttgccccagtgacccagaagcaggttcaatctgtgcctcacagcaccaccgtgtggcttcccctgggactgcagccgcctaactgggtgtggccctgagtgtggagctggctactacaattcctttgaatctgtcgatctaaaataagtgaaaaggccagaacctagtttagagagagtttattcaagcacacatgttgaggacaggcctacccaggaagcacaaattccaaagaatggaagtcagccttcctgttcgaaatgtaggagcttgggatcatttatccagccaaagccagacagagactctgttgcccaggccggagcgcagtggctggatcttggctcactgcaacctccgcctccctggttcaagagattcttgtgcctcaccctcccaaatagctgggattacaggcatgtgccaccatgcctggctaatttttgtatttttaggtagagatggggttttgccatgttggccaggcaggtcttgagctcctggcctcaagtgatctgccctcctcggcctcccaaagtgctgggattacagacgtgagccgccatgcccagacacctatgtatgtcttgatgcttagtcacaatgttctgattagttgaggcggtctttttctttcaggaaaggtatgtttaacattccacactgaagatgtaattgtccctgggtcttagatgatatctgatctgagttagtaaagaacaatgaaggaagcagttaaactataacagagatcagtgactggaaggggggctgtggtctctccggtcccttagttcaaccataatctaagaaacagaattgcaaacatgctacatgactcagtctccagggcttagcttcccccttggcgttttacaaaccctatggaactgctctgcccattgtgtgactgtgtttatatttaaattgaaattgaatataaattaaaattcagtccttctgtctcattagccacatttcaagtgctccacgatacctgtggccagacagtgggggtatagtctaaaacacctccattggtgtagaaacttctatggacagcattgctttggcctgcccttgggcgtgttttctactagagtgttcatattgaggctgttttcatctcagaagagtagtgttcttcattaattaggtgccaaattgggggactaacaaggtcagccacctgggtgaccagtttgaccacaggccacagggccccgtttccctccaggcctggaataggcaccccacaggctgcagaagaagcctggtggctgcctaggaggaacttgtagcgtaggtggaggccaggaacactttctgggacctgaggtgggcagggatcgcctggtcggaggggcccctaagggcatggatggggccggactctggcctggctgtcaacaagagggctgagcctggggaagcaagtccctgttttcagtaccacctgcatcccccagggcagcatccttgactccccttctgggccagtgctgccctgctttctctgtctctttcagggtgtgctgtccgacctcaccaaagtgacccggatgcatggaatcgaccctgtggtgctggtcctgatggtgggcgtggtgatgttcaccctggggttcgccggctgcgtgggggctctgcgggagaatatctgcttgctcaactttgtgagtggccacagagacaagagtgggataggatgcaatggggtacaggctctgctgggcaggattatatgttacctggtcagagcaggtggcagctcttaggagcctcccctaggcccctgcctgggagcaggaggcagccatttgcactctactgtctagagaagctggttcctcccagcaggagaattaggtaccctctggtttttagccctgggtgggaggagccagctgcctataggccagctctactccccgctcctttgccttttatcttccttcagaaattctaaaagaattgtttgtctgctactgtcctttgcccttcctggctaagatcaaaagatgttgcaagtaaccttaaatcatttccctcctccaaggatgtgtgagtctgttggatgtacaagtcagaatcccaaatttcctggcagaactgcagattactaagagtttagttttatatttagatacaaattcatgtttagatttattcagttaaataacacctggtggggaaaacacattatcatattttgcagtatattgtttgttgacttcattagatcaagctttctttttcttggacataattttaaaagcaaaactatgggctttttgtcctaattttttctctggaaaaaaaaaagaaaagctatgtttagcatcttgcttttatatgaacagagattacgttttggcaggccttgtgtgcatatgtgtgtttcctttttcttttcttttcttttttttttttttgataccgagtctcgctctgttgcccaggctggagtgcagtggcgtgatctcggctaactgcaagctccgcctcccgggttcacaccattctcctgcctcagcctcccgagtagctgggactacaggcgcccgctaccatgcctggctaatttttttttgtatttttagtagagacggggtttcaccgtgttagccaggatggtctccatctcctgaccttgtgatcctctcgcctcggcctcccaaagtgctgggattacaggcktgaaccaccgcgcccggccgtgtgtatgctttttcttactttgaaagattactccaaattggccggttgtggcaagctgcttagtgtcttatatggccagtgataatgtctgtgagagcgcagactgcaggctgggagtctgccctgatgggatgtggacctgtggctgcactggccccttgcagaatgccaccactgcttgtggcctggggcagctgagcttctggaggggtctttatgctgacgatcatatactttcatgcagagttggtacagataacattggcacttccagaattgtaaagagccctgcagggaactcacatgtcctgcatgaactatgtgacctcaggcaagctatgtacctcgtgacatagccatagtttcctcatccctaaagtgaggtaacagatacgtaggcactcgatggttttgtgtgtgtagtggggagtcatcagataatgtcttgggcacagtgtctgtcctaaaggagccgacaccccaggatgccaccctggagggtccaggtggaactgctggggtaggacagccattcattcctgtgataggggtctcctccttgtccagggaggagggctgcttcatagcaagtgattgacacattggcttggagctttctcacactttttcacgcatttgagtgttatcagcaatgcagtgacatgggtagggataaatagcccctttttacagatgaagcgaagttgtgcagagtcacccagctaactctaagtgtggggttctggggccccgatgtgggactctcaggtgcagagcccacgctctgctgaggatggtggttctgggtcaggtggggttatgtgtgtgggggtgcaggctggtggggtggtgacttctgctcccgtccccttcccctgcagttctgtggcaccatcgtgctcatcttcttcctggagctggctgtggccgtgctggccttcctgttccaggactgggtgagggaccggttccgggagttcttcgagagcaacatcaagtcctaccgggacgatatcgatctgcaaaacctcatcgactcccttcagaaagctgtaagcacctycccagcgggcccccgatagagcatgcacctccctgtgctgcctggagctgagtctagcaggggcatcaggccttctctgtgggttgtctgcctgcagcttggcagacagcagggaggccgtggaacaagccactccacctctggtctgttccactttgccggcttgtggttgcctggtgggccagccctttcccattgggattgggcaggcaagtccagctgtacccgaggccacccaccccccacgtgcccggccctcctctttcggccccagatctttccaatcctgcccaatagccataccagctgcaatcctccttaggcgctgcataccgtaaggcacagcttcttccccccggctcatgactcaccrtctgacgctattcctatccccttcctccccgggaccttttccccttcctccctgggaccttttccccttcctgtttaagaagccagggctgcctggaggaagctttgtcagatctagtggaatgtgacctccctggaatatgtgcccaggggtttgtctaagcagttccaggctatggcctttactccatctggtccccatccctcttatctctctcatgtgtggctgcacctggasgcttggaccatagctgtcacagccccctggggaggaacccactccttggccatgtcagcctgtgcaatgcaaggctcttgtttgatctgtgtgctgacagaaagcccagcttccttaagaacttttcatgtggaacactttggttttgagaagaaaataaatcagaaaccattaaaaatctatrattcactctcattattaaccaaaacttgttcacctttatttcatgtattatgggatccagcaaaacccatttatgggaccaaagaccctgcctgtattgttattactaatgtgtattagtctgtgaaagtcaccaaatccccgccatgttttgatgcctctcctttcttttctgttcagtgccacygtccttttttcattttcacgtagccttggcttgcctggtctcagcatgctaggttgcggttcatccctgcattgccttaaaaacatagttttctgcattgacttctttttcttttaaaaataaaacttctggccgggcgcggtgactcacgcctgtaatcccagcactttgggaggctgaggcgggtggatcacaaggtcaggagatcgagaccatcctggctaacatggtgaaaccccatctctactaaaaatacaaaaaattagtggggtgtggcggtgggcacctgtagtcccagctactcgggaggctgaggcaggagaatggtgtgaacccgggaggcggaactggcagtgagccgagatcacgccactgcagtccagcctggtcaacagagcaagactccgtctcaaaaaaaagataaaataaataaattaaaacaaaacaaaacaaaacttcccaggggagggattcagtaaattacagagcttccttggagtgaaatttcaggtaatcactaaagcaagtggaaccgtggaggtgtgggggagacaattttacctgagaagtaagcaaaacaaaataaccaaccagaaatcactgttgtcatttgttgtgattattgccataaccatgtcagctgtaagggcaaatgcaaagaagttttttaggggaaaagacactgtcaacttcacaatgatgctttcagtgtttggattttacacactttttagtcaaataaggattttctttgtagccacaccagatgcgaggaaggggagggcagaggccccaggtgtggggcagagctttgattgtgttacctttcaccttcatcggacctcttttcctcaggagcagacacttagcagctgttttttgtaaaggggtgaaaaggggaattcacttgcaagtttctcagggaggaagaacactgcacactaggaagtgttctcttgtggcaagtagaggaccacaccaaggtgccgagggggccacaaaggagaggacgccactctcctgtctgaggaggctggaaggaggcgtctcctttgaggaggctgggaagaagagcaagctccctgctaaggagggccagggctgggtatgttgtgcctggcartggggccagagggctccactgagccagccatgtgggttggacagaggaggcaccgtggcccggagataccttcactgccatttcctttttgttattattttctttaacacatcaaaagggcaggtcctctctctctctctctctctctctctctctctctctctctctctctctctctctctctctccccttttttctttctctccttttctctttctctctctctttcctttctttctttctgattgggggtgggggtcttgctgtgttgcccagacttgtttccaactcctgggctcaaaccatcttcccacctcaacctcccgagtcactgaggttacaggcctgagctactacgcctagctgttttcttcttaaagggctgcctgggttgccagcttagcatctctgcacatgggaggtagggggcgggccttgatttctctgcatggtagatgccggcagacttagcctggcatcactatgaatgatgccctatgctgggcagccatggccctgtcttggagcccctaacagttctggcttttgtggttgcagaaccagtgctgtggcgcatatggccctgaagactgggacctcaacgtctacttcaattgcagcggtgccagctacagccgagagaagtgcggggtccccttctcctgctgcgtgccagatcctgcggtgagttggcttgtgctggggcacagggagccygcccttcctgaagcccagaagctttcctgactcctccagtgctctaggatacttctctgtcatggaggtctgaggagcaggtgtgctttctccacaccctcctcaaggctgcctcagctctgaaatccgayatgtgtacattctaggaacackgcttgcatgacccaccctggccttggtgttctgggtgaggcaggagaaaaacagtattatttctacctggagggctgtcacttgcagctggccaagagctatgagtgaaataaggcccgcttatccctcttccctgtcctttttctggagcagattcctagaactcaacagtgcacgggggctgtgggtacacatcattaactggggaacagtagtggagaattattttctttctttttctctttcttttatttttgagacagggtcttgctgtgtcgcccaggctggagtgtagtggcatgatcttggctcactggaacctctgtctcctgggttcaagcgattctcctgcctcagcctcctgagtagctgggattacaggtgcacgccaccacacccggctaattattttctgtttgttgttgttgttgttgttgttgttgtttggttttattttagagacagtgtctcactctgtcactcaggctggagtgcagtggtgcgatctcagctcactgtacaaccattgcttccccgggctcaagcaattctccagcctcaacctcccaagtagctgggaccacaggcttgagcaccacacctggctaatttttgtattttttgtagagatggggtttcaccatgttgccccggctggtcttaaactcctgggctcaaagcgatctgcccatcttagcctcccaaagtgctgggattacaggtgtgggccgctgtgcctgtcctgtcctttctttacctattggcattcccaatccaaggccaacgtccttgggttccagaagctgggttcttggggtgaactgtgaaggagctctgaattttgcctgaactgagcctgagtagaacygggccagttgccagctctcggtgcagttatgcaaagcctggtcctgggttacaggctttgagaaggcagagcatcaccactattatatgggcaagttctgcagcccaggagaggctcagatttgctgaagctgcacagctcttctgaggtctccactgcgactgtgaaatgtaccagtcttgtaagtgttgcttttagcacatatagttcttacctccaagtataggtcttacctcctagcaaactgtggcccccaggccaaatctggcttgctatttttccatgacctgtgagttaagaatgcattcagatgtttttaaatggttggaaataaatcaaaagaagaataatattttgtggtacgtgaaaattatatgaaattcaaatttcagtgtccataaagttttcttgaaatacagccattcctgtttgtttacagattgtcagtgccggctctcatgcaacaaaagcggaattgagtctgtgtctgaagtactcactctctagcccttcacagagaaagtttgccaccctgtcctggtctgaaggattagttggtggcatgattgaaggacatgagctgtaatggaatttgcacaaatgtttgctagtgtttggttgtgactttactagagcctcttagcaccagcttcttgagacgccagaagcaactaatttttctgcttttcttgcagcaaaaagttgtgaacacacagtgtggatatgatgtcaggattcaggtgagaactcccatgtatacaacttgaagagttctttaggttttattccctgtggttcaacattctgatttagcacgagtgcaaattgaagtgggaaaactcagggcagtgaagctcttgatgccacctaagctgagcataggcacagggtcacatacactgcttcctgagctggcggcaggactcctgggagcagtaatggtgattctaagccttgtgagctgcagtcccaacatctaggagttgctgcatttaaagaggtgggatggaagttttgagggacaaagactgcatttttaggaggctccttggcatcccagaagacgtctctcgttaaggggacagctgcaggagtgtaggtgccttgttctggcctccgtgtggaggcagtagtgacaaagagggaggcaggcctggggcaggggcgaggctctgtcctccaggacttcctttaggctgtagggagtgtgctcttagatgcaaagagaaggaagaccccaccccactccagtccttgttctagtggtctttggtgatatgaatgactgctgttctaaaagggaggagtctcgaggaatcttcagagaccccacctgttagccgtggatatgagggatgtgtccctacagcttggggaactgtcctcctttagggacctgcatttcacagggagaaagtgctgtaaactgaatgtgtgtgtctctccaaaattcacatgttggaacttaaactccaatgtgatggtatttaagaggtggggtcttggggaggggattgggtcatgagggcagagtccttatgagtgggatgagtgtccttatgtaagaggcccagagagcttatttgtcactccactgtgtgaagacacagtgagagggtgccatccatgaaccagaaagtgggccctcatccgacactgaatttgccagtgtcctgatcttgaacttcccggcctccaggactgtgagaaataaatttctgttgtttataagccacctaatctatagtattttattctagttgcctgaatggactaagataagaacctatatcaacatcagcttccctaattatgattttttttgccacttatattaatttgctaaggctgctgtcacaacataccacagacagaaatttaagccacagcaggcatttattttctcacagtttggaggctagaagtccaagatcaaggtgctggcgaggtgaggtgggtgccttcagagggctgtgatggaagggtctgttccaggcctctctcctggctgcaggtggctgtcctctccctgtgtcctcacgtgggctcccctctgtgcatgtctgtgtcctgatctcctcctcttagcaggatgctcttcatattggattagggggcaccctgatggcctcattttagcataattacctctgtaaagagcctgtctacaaatacagtcaccttctgaagtcctgggggttaggacttcagtgtatggattttgaggacacaatttagctcctaacacctctaaaattaggggctaatactccatcatgttgccatggaggaggctgataggtgtgagggggctggggccgattgccctgtgtggggtgggcagggctggggtgtgtgctgggatggttactgacaccccaccggggttagcagtggagggagctggttggctggcgactgttgcctgctggctctgtctcctggagctgagcttactggtgggatgcccgctcmgagaagcacccttcttctcttcttaggagactctggacccccttctccaggtttctctccctttagaggcacattttcctccaagccttcaagccccttctctttctccagatgtggatggtggggaagggtatcttgagaaagttgggctttaaatctctggagacctgaaaggaaacagccagggagcctttggtcagacaggtggtgcgatggcacagtgcccagcgaggggcagagkctgagaggagctgacgagcatctcctggagagtcctccttgcctgcctcctggatccctcgttcccaccctgctttgccctgctccttascagagctcactaggggatcaggtggggacatcktgtgtgccaaaggctcagacccctgtggtgttttcctgcagctgaagagcaagtgggatgagtccatcttcacgaaaggctgcatccaggcgctggaaagctggctcccgcggaacatttacatygtggctggcgtcttcatcgccatctcgctgttgcaggtgtgtcccaggagcctataggattggcaggtggccttttttcatttgagattgggcccttaacatagagtgcatgggtccagtttgggtatggtattaaggaagcttgcagaagwaaaaaagggattcaactggatgtccaaggctgagagagtgtatgcgtgtaagtgtattggggaggagaatggtggcttccataaacgctacctataggggggccctctgggcgggggcaggctgggaggggcttgtggccctgcacaggtcctggtggcagccctctccagagggcccaatgggctgcagaagggtcactgcctatctggaggtaggtcaggagtgtgctcggggtgggccatcaagtgctgcagatggggaggtgaaacccttggtcacctggggcctgagggtggcctgaggctcacgtgtgtgcacttgccccaggacctctcctcctgtctctggcccctgggctggagttgtcaggtatcttccctgtccatgagacatcctctgaggcctgctgccgtttgtggcatcctttcctctcccaggctgtgcttgttcatttgaaccaggttgcacatgtgggaggatgttggtggctgagcaggcagtgaggcctggggtgactgggctggttggtgactgctaggagaagaactggcagagaaagtcaagaattcagtgatcagagaaaccaggagtctttccagtgctgttcagggcttccaagaagccgcagcttctgggtccactgatgcatttcttgtgtggaaaataacaccatttagaaagtgtttgactctgtttttgccttgaagagggtgactgaggtagacccagggccaccagccacccacacatgccttcctccttcaaggaagactaagaaataggaggaagcaactggaaaaggaaagaaaaaagttatttgcaaaataggcaagggaagaatcagacttcagaaggactgactagtcaaattagaaccacacaagaatttaaagggaaaaaaagccatttccagaggtcaccaagttcgtgttcatctgttcacgttagaagaacatcagtctcctctcatgatttccctgctcaccaaggttgggatggatcttcagacattattagcacagccaaaattggggatggccttggttttattatggaatcgacgtttacaggaaacattcaagatttattattttgggaatsagaaccagtcagcgtgaccctgttatttttggtttaacccaggracaggcgtgtcctgccccatggcttgtgacatacttaatcatgttggaggcaggacagagtgtctgttttgcttgtggtgcctgtggtttgcctcttctaggctttgggaatgtaacagactagaccccaggaccccttttttgcgggaggggtggctgtgctgtgccactcgctctgcggtgctgtctctacgtcttcagtcgcagctggggggtgaggagaggcgtgcagtgggagctcccaaccccaccctccgctccctgccctctgcctttgggccccagcaatggccgctgactctgctggtgttggtttcagatatttggcatcttcctggcaaggacgctgatctcagacatcgaggcagtgaaggccggccatcacttctgaggagcagagttgagggagccgagctgagccacgctgggaggccagagcctttctctgccatcagccctacgtccagagggagaggagccgacacccccagagccagtgccccatcttaagcatcagcgtgacgtgacctctctgtttctgcttgctggtgctgaagaccaagggtcccccttgttacctgcccaaacttgtgactgcatccctctggagtctacmcagagacagagaatgtgtctttatgtgggagtggtgactckgaaagacagagagggctcctgtggctgccaggagggcttgactcagaccccctgcagctcaagcatgtctgcaggacaccctggtcccctctccactggcatccagacatctgctttgggtcatccacatctgtgggtgggccgtgggtagagggacccacaggcgtggacagggcatctctctccatcaagcaaagcagcatgggggcctgcccgtaacgggaggcggacgtggccccrctgggcctctgagtgccagcgcagtctgctgggacatgcacatatcaggggttgtttgcaggatcctcagccatgttcaagtgaagtaagcctgagcmagtgcgtggactggtgccacgggagtgccttgtccactgtmcccctgtgtccaccagctattctcctggcgccggaactgcctctggtcttgatagcattaagccctgatggcgccggtggcgcggtgggcatggttcttcactgagagccggctctccttttcttaaagtgtgtaaatagtttatttataggggtaagaatgttctcacaccatttcacttcctcttcctctcctccagcattctcctctgagcagccttagatagtgtccatggctggagccgaccctttgagtccccttgagtgtcttaagaaccagcccacaacagcctctctttctcctccacatactgcagcctccctccatgcatcccacatacaagcactcccccactccccagcgtggcctcactgtcttctggtcttggtgctactgaaattgtcacccagaatttgaatcctgaccctccccactgcaagcccagggagccccagcccaagatggccagcctgaaactgttggccagggctcctcttgtggccatgtacccagggctggctggcctgccatttgcctctccccggagacagccgttcttctgcaaccacaccccgtgcctagccacaaccccaggctgcagctgctcagaagctccaggcattttgtttctggtgaccgcccctaatgggatatcggtgatcactggtccacccttcctgtcagggcttttcyggggctgctcttggaaatgaagtcttaagtactgaataactcccctggggatagctggggcatttgtctagctgggctactttctaacactttgccatagctcagaccacttctcatcgttcagggatggactgcaaccttaatttacttgccggagtgtacattctagtgtggtgtatactggtggctgttgatgatgatttttttttttttttttacacaattctctgtagactaggagaagaatgcttgtgtttttcggaagtgtgatgcttctctttgactgccaaactcttttatggaatatatctttatattaatgctgttttggtcatttttgtttggggtcactattgagatattgctaagcatctcagtggtaaacgcggctgccagaggaaccaagggatagggtatgtagaccttacagaaggatggatggtaaaggcagtccatcatcagcacaatctgacttacatttcattgagtaattttttttttttttaagattctgtatggcagcactttcagttgcccttgtgtgccggccacagccgcacaagttggcttgtggtttatcccccgctataagtgagagctggagaaacttcaactccataggtctagaggaaacattgttttaggttatttctgtccacccctgtgcgatactatttattgatccaagcagaagagcttggggacactgagtcgaagtggggacatgggattgaagcctgggcactgctgctgcatgagctgtgtgtcctgggtgtgccggcctttctgtgaagggggttggtggcagtgcccacctcactagatgcctctgacccagcctcccctgggggagtgggtggycacagaccctccctgccagagctcctggaaggytcctgcaggcctgacccatctattcctgtagacctggtttaggatgaagtctcggtgcgatttttgcagagttgggtttatctttcaactatagacccttctggctgttctcagccatatcatgtgactctgaatagttggatgaggaatggaaagaaagcaaggatgagagccggkcaygtggcagtctccgcccagcatcggctgtccgcacagaggcacagggcaggcctcctgtgcactccccacctagcactggcctgtcctgaatccccgccttccctggttggaggccagctgtggcatttgcaccctcttctcacctcaccatgcacatgctaactttaaagccttggggtctttcctgtaccccctcctcaaccctggtccaccccctctcaggatcttgtcaacgttatttttcctgtcccgtcttcctatcgctggccttcctttcccatcctaaaaacttgccgaggccctatggctccctccctttctttcccaggcagcttcttatctgggctgtctgtaccccttcctttgcaccacccaccatgccccacgtagctgaaagctgcttatcccaattgtcaactctggccttcttcagcctctgtagcaccagacactgcacctcctgaatgtcctctgcttctctgcttcagaggcccaggctcgccagttctctgacctctcccatatgtctgcttaggactctgctgcagctgtcctcaccagcctccggggaatcccactacccacagggcagggctgtgggctgggctgaaaaaccatctgcatggtccacaagaagcctggcactgggtttccccatgaataacaatgaaaattaatggatgcacaaccttcctggaacgtggaatttctctgggagattccatgcagaggccactggggaggtggcaggcatgcatgtgactgtaggtggctgcagtgttggaaggctcccagcagagcagagagggtgtcagtctcatcagggaacccacctgatggcttctcagccagcagtctcagaggaacatagacgactgctgagaaaggagggaggcagcagtggtcccagcacctgaggcatcctgctgtcatgggaaggtctccgcccaaatgtcagatgcatcagcctgtcacccgctggtccagagctttcagctgtactggtagggggtgggtggtggagtgctgaatgaccttcacaggtgggcctttccagctctagggtcttacgggtgtcggtccacagaaccacggtttttaggttgtgtgtccggggctatgggaacctgtcccccatgatggatcttggtagagacacttccctctgtcatcgtgcccaggaggatgctgcaggtgactacctgcagccctgttctcattcatttggatgccctccagaaatctggggagccatacacctttagagccttttttgctccttatcaagttggcaaggcttggccaattcctgttcaaggctgcattaaaggcatgttcaccatcctggctaatacggtgaaaccccttctctactaaaaatacaaaaaaattagccgggcttggtggcgggtgcctgtagtcccagctactccggaggctgaggcaggggaatggtgtgaacccaggaggcggagcttgcagtgagccgagatcacaccactgcactccagcctgggctcaaaaaagaaaaaaaaaaaaaaaaaaaggcccgttcattctcaaatgcttttggcgtctccagggtgcctcaggaaaacatgaagtgggcattgtagaacttggggctactgtgtaactttggaagaaaaagttaagggtacttttaagtggatactgttttgatgaaattgccaacttcagggagcccagcttggagaaggaggacgtgagtattccttacaaggctcygaaacaattctttcttcacttagttttctttctgtgctctgcatcttatattccagcagggtcttccaatgcatggtttaataactacyagaactggccaggtgcagtggctcacgcctgtaatcccagaactttgggaggctaagacaggcagatcacttgaggccaggagttcgagaccagcctggacaacatggtgatacccagtttctactaaaaatacaaaaattagtcgggcatggtgatgtgcacctgtagtcccagctgctcgggaggctgaggcaggagaatcgcttgaacccgggagacagaggttgcaacgagccaagatcgagccactgcgctccggcctgggtgacaggagactccatctcaaaaaataaaattaaaaaaaaactactacaataaattatcaccttggactgtataaaacaacttttaaactagtctttttaaaaagtacacttaaataaaaatctaaacataagagaatgtaaagtgaaaagtgaaagtatgtcttctgttacgcagaggtaactactattaggaatccttcctgaaaatgtccatgcatctactcaggtcatcacacccatggaatcattttacatactattttatgagtgttacttaatatactgatccacagtgcgttttcacggtcacgccatcagttgtaggagtgtgccaagaacagatgggccttgcctttgtaccagaggagtccatttacagttgcaggtaatagaaaacccaattcagactggcctaaacaatgaggggaggttttggctcttgaaactggaaagtcccaaggtggggtgagtttcaggtttgggttgatccaagtggctcagtgacrtcaacaggatcttgtttccatttctctgccttccacagcctccccttcatctatggtggagggaaggagtctaccacagacaaaccccgagcctccccctgatgggtggtgtggtggtgaagccagcaagggaagggatccccggacacacccctcctcatgctttatcccactgaaaccatgcggctgtgaaatgcagcatcctccaggagggggatgaaggccggggatgctgtcagctattgccattgcacttctgtggatgggtgttacagttttttgcagggttttgcacttacaaggacatatatatatatatataaactacagtgttattggaattgcttcttacagtttgtaagaaaaaaacatgtttttagaggagttctcctgggaggtgggatcacatttttttttttttttttttttgagacggagtctcgctctgtggcccaggcgggagtgcagtggcgcaatctcggctcactgcaagctccgcctcccgggttcacgccattctcctgcctcagcctcccgagtagctgggactacaggcgcccgccactacgcccggctaattttttttgtatttttagtagagacggggtttcaccgtgttagccaggatgggggatcacattttaataagtaggtactcagggctggggtgtacctgttgctgcctgaccactgctggtgtgtgtgggtataaggtgacaaaacctcctacccctgtgaggttgtttcaaggattaaatgagttgagatgggtaagcatctaacaaagatccagattatttagtatgcatcccctgaattattgctaacataattttaatgattggggaattttatctgtggctgccagtccctacgagagagctgcctgggtcacatgtcagatagctcaagctttgaatcactgaaacgaaacggtccacttccctgtccctttaggaacaaggcttcgaggtctgtggcaagcctcagcaggcatttggagttcaaggtctgttctctttctgtgccatagaggtggggagacaaggtagggtgttgcttcttgcctggagcgcagatgctaccagaaaccaacacaaccaaagttgcccgggagcccccagaagcagcagagtggccatcaactgccaaggggccagggtaggccacagaggcctggggcccaggagggatggtctgtggggagaaaggggattattgtgaacatcaacgctggggataatgtgccctgaagacagcagcatatcacgtttggacggttggtggaccccatctggtcccactcataaggagaacagaggccctggggtgtgctgggacttgcctgaggcctcagaccgggactgggtgctcctccgcacctcctatgagggagggtgtccgtgtctgtgaggacagctcagcagggctgggaacctgggggcagtgctgggggacatgtgtgagactagcgtgtgtgggccttgctcggcttgccctggtgccctgagaaaaacctggtatttgaaaatacacatggactgctggaaggtcaggaaatccagggttttgttctgaggcagtggaagtgttaccgtgagcctgtgttggcctctctcctcactccacctgcagccaattcagccacactgcctttgcatggaacccagggttgcaggccgcgtgtgtagatgctgatttaggcccaagcactcagctgtcagcaggaaggaccatagtgttttcttctagttttagatatgcactcgttctgtgttttaaagtcacagctgtgagccaatatgggaagaagtgaagtggcctctaggagggactgagcaccctgtccttggaggtatgcaagcccaggctacacccttcctgtctgggatgatatggctgggggtgggctttgtgctgcgtggaccatggcaagcctttccatctctgagaggtagtggtccttcccgtgccttctgttaaagataattttttaaaaaaaggcataactcatatatattacatgtacacatgtcaaagattttatttaactcagtaattgagagtgctgctaagattaacagccagttcaaaagagaaatcacaatgaaccataaatctgtatggagtaaaggaaagttgaaactggctggggtttttttttttttttttttttttgaggagaaaggtcaattgaatcttattcgtataatatgcacatccatagacaagaattattttgcattaactctacaacttagttgtaaaaatagctcaaaggcagtgaaagactagaatcagataattggaagggtgcaccctaagcaatgcatagttctattttctttctttttttttttgagacagagtttccctcttgtcacacaggctggagcgcagtggtgcaatcttggctcattgcaacctctgcctcccgggttcaagtgattctcctgactcagcctcctgagtagctgggattacaggcgcatgccaccacaactggctaatttttgtatttttagtagatacagggtttcactgtgttggccaggttggtctcatactcctgacctcaggtgatccacccgcctcggcctcccaaaatgttgggattacaggcgtcagccaccacgcccggccccaatgcatagttttttactgaagacaaccagaatctctgttgcttattccaaatttccttccaccacttgtccatccagcagagccacttttaaaataggacacaggcagaaatttaaaggagtcaatatctcatggtgaaaagtgaatcctgagggttagagcatccaccaggtgccctaggtaagggccagccactctgggaggcagcccggggcactcactgtcctctcagtagtaaatgaaatcactcaggccatgtctgctacccagagagcctgagtgtcctcaaatgcttgttctgcctctccatccactcctgcagacacctcagtggctgcatcccaaaccgctgaactttgcttctctttctccaacccccaattccacccacatccaaaactgctctgccccctattcccatctcagctgagggtactatcatccaccctgtggccacatccaggaatgtgtgtatcacctgggctctgaggatgacatcagctcttctaagtcaacagaatgtcgggtctgttctaaaagtctcatctgacaaggagatctttaaggctttactcccttaaaggctttactcccatcatgatgggataaccatcatgatggatttcagtgtcattctgtctttttcttcggaatgattcctgggactcgccttgtttgcaacatgtgcattgaaatatcttttcaacataactttgttcttaattgtgtttacttcctttctctgtgaatctcagtgattcctggaagctgtggttggtgggggatggggtgggaggactttggtagtataaaagagtacctgcaatgaatgttctaagaaactggagtgttggggtcctccagcccttggctggtaaactctccactccttcctctttgcaacacaattctcataactggcaaaygtgtgcatgtaaaatttgtgactgtagtctgaggttttttttccctgtacaattccgccttcccccctgyaagcctgtaccaggagaggtctcagctgccttggaggcggtgagacacgtgggtgctcactgtggccctcaagggtgaggctggcactggggcatctggggccagaagtcctcctttagtcccaagtctctgccactcaagtgcatcagtgagaggtcctcatagaaaatctactgtgggcacaaagctgccaggctgatgggggtggggagcaaacgaacacccttttccccttttacaccagaggaaagagacttagactgaggaacttgcctgctgccagacagctgggaggtggtagaaccgggcttacagcccagggtttccactctaggaactcttctcccttcctctgatgacactaactcgcaggccatgatcaatgagcaacgatgtaggcaggcactgacgaggcacagcaggaaggcagctcagtgcccatgacggccaggaactgggtaccatttcctcagcaaaatgggatagtaactcccacactgcagctacgcacttgggcagtggttcacaaggccagcagccacaacatcaccccagaccagcagcagctgcagcattacccccagcacttgttaaaagatgcaaattcaggccaggtgtggtggctcgtgcctgtaatcccagtactttgggaagccaaggcgggtgggtcacctgaggtcaggagttcgagaccagcctggccaatgtggtgaaaccctgtctctactaaaaatacaaaaaatgacccgggcatggttgtgggcgcctgtaatcccagctacccaggagaccgaggcaggagaatcacttgaacccgggaggcagaggttgcagtcagccgagattgtgccattacactccagcctgggcaacgagcgaaactctgtttcaataaataaataaaaatgcaaattgtatgccccttccttcaggcctatgggaccaaaaactgggatggggcccaataaaatgttttaaccagcccttcggtggttacagaaggatagagccagaatagactaaccactgtaacaaacattacctatacttgggaggctttgaaaaatgtttatttagccgggtgcggtggctcacgcctgtaatcccaacactttgggaggctgaggcgggcggatcacgaggtcaggagattgagaccagcctggctaacacagtgaaaccccgtctctactaaaaatacaaaaaattagccaggtgtggtggcaggtgcctgtagtcccagctactctggaggctgaggcagtagaatttcttgaacccaggaggcggggcttgcagtaagtcgagatcacgccactgcactccagcctgggtgacagagtgagactccatctcaaaaaaaaaaaaaaaggaaagaaaaatgtttatttttttgctcatgccacagtctctggtagttgctgggaactagggtgggggattctctgctccacacagtctttcatggacccaggttcctttcctgttgtgggtccagcctcctgtagctgttggaggcatctctagtcagctggtggttggggaagaggtgaggatcagggagggaagatggagagtactctgcttgttctcacattctgctggccagaactcacaagccacctgaaatgatgcaaaggtctagctgtgtgtgtaggagaaagaagagaggccagatattggaagacagcagtggtctgtgccccaggccccatggtttagggaagtgaaccttggcactggatttcctggctttctaaatctccctttatagggaacttagggcccagtctgtggtgggtggatttgcctggttcacagcctctggtcagccttctttctgctccacagggcggcctggagatggtgggctccttgtcacactggttggggatgtgggctccatggggccagagatgtgtgtgctctgtgttcagattaagggacagacggcacatgaattccttcagtgcc

SEQ ID NO: 6832 - DNA, 46968 bp, Homo sapiens
ccagcctttgttctgttggataaatctatatctatatctagatagatagatggatggatagatagatagatagatagatagatagatagataaataatttccagtagcaggaagatagggaggtgaggacaaagggaaaaagctatcaacaaaccaggcctagttatgttctctgcatgtgggctttcagaccatccttgtcctcacagatgtgtttggagtagacatgtgttagatagcttacccttttctcagagaccaagtagagaccaagtgcttgagccaagtacttattttttcctcaaaagcaagtttcagcagcaatttttaactataccatcttttaaagcaagctccccccatcctaggaaactctgtgctcaggcacttattagttctgcagggtggcatgcaaaggcttttctaaagcataatcataatggaaaaataatacataaaatctgtgcacttgtgtgtttgtgtttaacaagaaggcacttatgcagcatacatcattaaactttatgtgcatttggagaataaattatcatttctagcctgcctctggtatgggttgaagagtaaaatacattaacctaaagttattatttatatgctaacaaatggagttaatgaaaactatttcacatagaaaggaaagataagtggtatgcagattttttgagaattcacctgaaaattgatggtaaatacaaagtcttctgtacgttaagatcatgcaatgggataacctcattgctcgaggatttcaccaaagcaaacagagcaagaaacgttctgtacgtggtctcttcctgccaagcacgcacaatcatcaactgttttctaaagaatacacatttggaatcacacagactttttgaaaaattgcttgaaaaggtcatttgtggcagggcatcagggctcacgcctgaattcccagcactttgggaggccgaggcaggaggatcatttgagtccaggagttagagaccagctgggcaacatagagagaccctgtctctacaaaaaatttagaaattagctaggtgtggtgacccatggctatagttccagctactcaagaggctgaggtgggaggatcgctggagcataggaggtcgaggttgcaatgagctgtgattgtcactgcactccagcctaggggacagagcaagcaagacttgccaaaaaagaagaagagagagagagacagagagaaagaaagaaagaaagagagacagagagagagagaaagaaagaaagaaagagagagagagagagaaaggaaggaaggaaggaaggaaggggatggaaggaaggcaagcaagcagggagggagggagggaaagaggaaggaaggaaggagagagagagagaaagaaaggaaggaaggaaagaagggggaggaagggagagagagaggagaaagaaagaaaaagaaagaaagagaaaaagaaagaaaaagaaagaaagaaagaaagagaaagaaaaagaagaaagagaaataaaagtcatttgtttttaatttaatgttggatacaatgaagggggaaaaaatcacatgaagccatccataaaaggccttaaggaatcaatcagatctatcagaaattaattcaaaatcccacttactgtcttaagagaatggcttgaaaatggttctcattattaatatcatttacatcaagatatataaacctatttttcaggactcaaaaatctaaatgacatctcaacaacatgtgattgtacccaggcatttccccctgggagcaccaaagggaagaaggtaatttttcggtcttttggaagctgtgccctggtgccaagatgcctcaagccaaaaccacacagagcagcctgcctgacagatgggcccagtagcctttatcaagctcttaggctcttatgagcttccctacttgcgaattaaacataaatttatcctttgcggctctttcataaaaacactggctcatgagtgtttccatttgtctttttacggatcttacaagtcagtccaaactgtttgcagaataacagcatttcctaagtctttctgaggtaggaaggccaaaaagaatgcaattgcccaagacgaacaggacaccctgctcacttaatggactcccaaaggcctcctttactggggcggcgccctggagcaaggagtcttgcaggaacttctgtgtggccttggctcccctgagacccagtgtgttccattagaggtagatgttgtttttccctcactcccgggtggtacagacaccaccacattgggccatcaggcacaaacctggactctgccactatctgcacatgtcatttggagggggaactcagcctccctgagtttgttttcttacctgaatctggcaaaaagaaaaaaaaaaaatcaatcatacatcagatattgattaaacactgtgacaatccagacagaatcagtttttaaggaaacatagtgtctcttcctctaggagctcatgataaagactggaatatacagcatgccagagtggtatgcgtgggtcagggacgggcattttacagagggcccagggacgacctgaaaaaggaggtgatttgtgattaaagacctgaagcaggggaaggagggagcgctgtggacatctggggaaagagccctccaagggaaggaatgaccctgacaggaacaggctgggtgtgtgggagaaacagtgtgatcagagcagggagaaggagaggcagtaggaggagatgaggtcagagagacaattaggggacaagatcatctagggaaggggttggcacactatagccctgccatccattttttaaaatagttttatgagaaccacaaccatgtcctttggtttacatattgtctatggctactttcaaactaccccagtagtggtgagtagttgtgacacggaccatttagcccacaaagcctaaaatatttactatccagccctgtacagaaaaggtttaccaacctctgccttgaagaaataggggctaatttttctccatggtagggagtctggagtaggcagtgcagggttggtgcagaagctccatgatgttaagaaggatccagacacctttgatctttatgctctgccagcctcagcatgcggacatgttgctttatgatctcaacatggctgccagtgctccagacattacacatcatgtcctcatttgagacaggcaggcaggagagacatctgttctttctaccagaaaagcaaaagttatcttcaccatccctcagatctctcctcccccaggacaccttcccccatctctgcgtccagaagtaggtcgtatggccacttctagcttcactgaaaaaaagctatgaaaaggattgtcaagacttagacagctgttttgttttttttaactgtaacccacagtaagaagcacacataactgaaacataaacaatgcaaacaaaaagttccacaaaacacaacttatatttactatttgtgctgtacactggtattttcccttgcatttttgaagtactagtcacatcatcaactaaattaatttcatgacccactattgggttgtaagtagagtatgaaaaatacaagtgggcatgagccataactaggggctggcatgttgctgctacagacaagtgggtatttctctctcctttccttccctccctccctctctctttcctctcttccccattccctctttcctccctccctccttccttccctcctttccttccttccttccctcctttccttctttccttccttccttccgtccttccttccttcctccctccctctttccctttcttccttccttccttcctttttgtccttttccttctttcctatctctctttcttttttccaaagaaggaaatggacattggctggcaaccaacagtatctgtagcctccaccataagtgagctggagaccacacccagttctactgaaccctgaaagaaaaggtgacccctccttctgaggggtctgacaatggaccctccccttctgaggggaggacgctgacaatggacacctgtgtctgatgtaaaatgcaagcactcacagccataaaagagaataaaatcgtgtcctttgcagcaggatggatgtggctggatgccattatcctaagcgaactaatgcagaaatagaaaagcaaacaccacatgttctcgcttacaagcaaaagagctaaatatcgggttcacctagacataaagataaaaacaatagacactggggacttcaaaagtgggagggagacagcggggcgaggggtgaaaaacttcctattgggtactatgctcaccatctgggtgacaggatcaatcccaaacctcagtaccacacaatgtacaattgtaacaaacccgcacgtgtatcccctaaatttaaaataaaaatggaaattttaaaaaatgcaagcagtaacaccaactgcccaggagtgctgggggaattgcatgggatccccaatgtaaagcactagcatagtgtctgagcccacaatgggtgcacaggacacatggggttgctgtcccaaacccagtcctcactcagagccagtcatggccctgtgaacagcattaattaggtcagagagaatgattcacactcgagttctggagagcccagggaaactgttatgtcaccctggtgctatgtttacttctcctatcaggagtgattaaattcttaggatctcatgctcagaggttgacagttayattgaattttacccacttttaaaaaacctttggaagcacccgattatttgtctcagctttgatgagggctgtggaagagcaaatgtgtcatgacaagtcaccaaccacagggagcctcagagctgtcaaaggatgggccattctccaaaaattcaagcaaacgcagaaacgggagggcccctggactgggtatcttcagtcctgtcactttttgcaggtgggggttccaacataagtcatacagcagccatacaagcattagcacagcccctctaagtcgaagttcagggacccatgagactcaaatcccaggctgattttggtgcatatggccacctgcactttctagaagatccatatcagattctaaaatggccatgagaccctaaaaatattaggaaacgcacactgaatgaaactaaaatgatttatgttaggggtgggagagaacaggtccagaggtcagrgctgggaatcgtgaggtaaagcagaaattgcaaatgttttccatcaaccccatcccccaccttgacacccccacaccccagaaacactgaactgttcccagttccccaaatggcttgtggttttctgtcctctctgcctccgtgctggcaaatattcgtccaggaggcagtgactgggagagaaagactaacttcttattcaccagatcggatttcttaaacaataaggagttctaagaggccatgccaagcaaacggccagactgtacaaaggtgccccttgagcaataaatagcaaatgctctgggctttactgataagcctccccagactccaagccccaccaggcatgcagacaagtgcctgcagtgattgcagcgcctgcgcagcggcccttgttggaagtccaggagtccgcgctaccccgcaaagtccctggccgctgcccgcacaccgaacctctcggggctgagtcgggctgctttctcctcgcgtcccggggcgccctcgggaactcgggagcgcgcggcgagctgaacaatggcctggggacacctggcaggtcgcaggccccaaatcttccccgccgcccctaggccaccgccctgcacccggaacctaccggcgttcccagagcggggcggacggggcggtgccattggccggtgcggagtgaggggcgtgctcggggcgggacggagagaccggggcggcacctttggccgtgccgggcgagaggcggggagcggggcggggcgaggggcgaggggcggggcgaggggcgggcctggccccgagcagctgaagccyggggtcagcaggcgctgcgggcgcagctccggtgcaagcgaggacacgacacatgcagtggcttctggactgcgcgatgactggacggtgagtgatgaacgagcaggagagtgcttgggcgtccatggagcatcccctccgacccaggactgccaccaggcagggacgctgaagcctgggcacttgtgcccttcggccgcagcgcgcagggtccctcccccgccagcctggcgcattgcgggcctcgggctcattgctgagagggggcactgcgcctggcacctctgttaagcaatttaggggctacaacctgagcaagacagatgagcccggccactggctacaccttttttgttcaccttgtccttaaccagtttcctagaagcactgatcctagagttggggagagagcctagaggcctctggcacaactctgatttcactgatggaaatcgaacgccaagataatagcagcagggggggtctgtctcacaatcgctgtctgtagagggctcgccttgctctgggccaagtgctttaacacgatatgcctcttactcctcacagcaagtgagagtcctactttcgttatccccttttcagatgtgaaaactgaggcttaaagagttataaaattgtccacctttaccggatgagttggtgatggagccaggatttgaacccagggcttgttgtgcccctgagtctcttgctcttcacccttagtctccgaaggtcagcctgcctgctgccctgctcttctgggctcctgactccggtcccatcctgcacttcccacttccaaaacatgcctcagtgttttcattaacctggcacggcggagggagggaggcctcctctcacaccagaatcagtgcccaggccagggccagcactttcttaaaacacagtaaggacagcttcaggagccccatttcacataggaattaaataaggtcgcacagcaaataagggctgggcttctggaatttgaacccaagcaggttagactccaaagctatgctttgcactcacagaggagcccctcgctggctttgctgtagtttaactgcccacagtactaaggtgtcaatcaggatttgttgccagaaaccatttttttttaagttagaagtgaattggtgaagtaacaggtaaatgtagaccatcctgccttctgttcctctgtgtggttccttagctacttctgccaggacagcaggttaggggagaagacaggaagggagagggtcagaggagaaagaggaagggagggaagaggagagatgaaactcattaaacttaggttaaaaaaatgctggccggaaattgtcatgggctgtttcagcactttgtcagtgtatgtgaaggctgttgtcattagttctagccataattctctcagtgtgtagtgctggtgatttgacaacaaaaaggttgatgctacagattaaagtgtctgtctgaaactcaggagattgggttgtatttccaccatgaagctccagtgggtagcctggaggtcgagaacagaatcaaggtccagggtcgccctgggtcaggaccaagtggaccatgacagataacaaagaacatgaacgaaacttgggtgtgtgtcagagttcagattctggaagtgcaaagcctcaaaggggagacctaactaggggatctgccagaaagccctctgccctgggcccctggggtctggggcctggtttcaggtgtcagctcagactctctcctcattcatggccactcctgcaggcaggcctcacattcccatctctggggctccacagtctctccagagcccccaactcccagtgtcaayaagaatagtaatgggagcctcttttcattatgggtgagcccaacacaaggcccatcttacaggtctcctcattcgtcttcacagaagtcatcgaggattatagttatttaattgatgaggagcccaaggttcagagagggaactggacttgcttaaggtaacagagccaggcagtcacagagcagagctttaaacccagagccttgcaaaggctaggtggttattctctcacagagtatgtttggggaaattgttttaaaataaagaaaatcaaataagaagtggctgcacttcctaaagcttcaacagttttcttatttttgtaaaagagaaacttgtagttcccggggtctccttttctggctgtcccaccttctgccctaggatatactgttgaggaagaggcccggaaccccctccctttgccctgcctgaccttgggaagcaggggtggggtgtcattgagccccatagctgcagtgctgggaagagccctgaagactctctatcagctgccacaacagctctggctaaactgatgcccaagagacggcgcaacacgctaggatcacaggccaagttaatgccacagcaaaactcacatgcaaggctctacaacgttcctctgcctcctctttcttgctgtgacaggtttcagcagagattctaaacctaagatctggggatctgggagtacatggacaagagctgtctcatctccctgcagtgatatgcaaattgtgtgtgtgtttgcacgtggatgcagattgcaacaacatgcacatacatgcattttctggggagagtgcactaagctttcaagagactccaaaggactctatgacccaaaagattctgggacccttttgtctcacagggcccttatgtccccagcagtgacatgtggcacacaggcctggggcagtggacagcacaggtgagggcagccgtagagagcctccaragcagccctgcagcagcaggcacccagaggggtctgcccctctgcattgcactcccagccccaggcaatcgggatattggacagtgcccattttgagcacgtttggcccgaaaaccatagctaagaagatctttgtttctgtggatcttctcttccataggctagaggtgagcctggttggtggggaagttgaggagtggttcagggggttccaggagcagagaatgtatgtttaaggtgtaagkggggagcaggaggactggaaatggttttcttgtcccaaattgctttgccttgaaacaagggcagaagccagaagtcttgcccactgggaaggctggtctgcgatctacatggctgctcagggccaggctctcagaggaaggggagctgtatcagggaggcctggatgctggactggactcagagagacctgtcagtgagaggccagaaccgcagyggggagtaaaggtgagctgggcctgtgtggtcagtccagggcaaggcgggagtggaggtggargggagctctgtgcccgcctctcctggactcccctggtctccatcacctccacctggacagtgcagagtcttctggggcagggaggagtgagttgagccagagggatgatggcgggagtggagaggaggggtctggtgattggaactrggcagcaggaggggacagcagtgtggaaggaggtgggagcagcagctgctgagtcgccgcctgccatctacaaccagacagccggctctcaccacaaaaatgcttggctgagggtaccccctcagaggcacctggtttcggcagacgctgcaacttcttcactggccaggctcctgccatttgctggcgaacaggtgctgggaggggccttttaaagcttcattgtcctctgtgccctgctgccgttgtggctggcaattcgaatgtggtagccacagactgcagtcaggaacttagtccccccaggaatgccgtcagcgtggcctgcacctgctctgtggcctgcacttgctgtcctccaccagcgggagcagctcaggctcccagctgtgccccacacacttgtyctcctttcttttgcttcccaggtcactttcgttatgacctatttgatttaaatcacgctgaaataagaaaataaaaatcacaatttcaggaaatgtgaaaacagaggtaaccaagctctcagacttcacagatatgcttagaacattttaatttggatgcctgtacgttttcccttttgccaagtgaggacaccacatctgtgttggccatgttttatgtaagaagggacactgtcagaaggaaaagcaggcagcacagtcttaaaataaaaggctttcaagtggactcaatttcgtgtcacgaaagcctcacttcactcggcatcttctgttccttttgccactggcctgtaggaattgggccccgggggtgactgaaagaatcacagtcaccttcttctgtaataactttccccacaaacacaaaaaaggaaagacggcccatgcctagcagctctaaagccctcggcggcctttgtccctcagtagtgacagcagactgtctctctctgcacggctggcagagcagcwgctgaagtggaaagggagaacaactcactgcttgttcactgggacaggtagccatggctggcatgccgcctagggggcctcctctggggtacagacagccctggctgcagctgatcactctggttggggacagagtgtcctccagcctgggaaacaggcgtggaggcctgagctatgtcctgggacctgggggaggggaacgggcccagacaaagaaagctgtactttcccagcagaatggcacggcttgggggaggggagagcctgctggccgacttggcctgtccagctgcatctgtcactctgtggttttttgagcctgagcctgggtggcaggccagccccagcccatcctctcctgactcctgctgccacccatgcagcctcgctttaatccatttgtgtattgggcttctacctaggatctaatttcaagataaggttgtgctgtttataaaagactgaaaaatactccagcagagattctcaaaggccccacccagtgcacttggagattcaatgcaaaaggctgttccaggaaaatgctccaaatagagagatggctccctttcctctcctgttgggtgtgcgtgttcccccttgcagtttgctgctgccacagctgtctttcagacaccccttaggtactcatgcagtttcctgtagatgtgatgtcaaaacgattaaattcatcaaaatgaatgaaagtctggtaaaggggatagggcgcaagcacagtgttgagatctgcagtggaattctgtgagtgatcctggagctcaggaaaaacaggtcttcttgcggtgttggctctgagaaccagagagaccaagtgacttttgtgggagccataggctcttggccccttaaagtttcactaaaaatcacagacatgaggcagattgattaataggagaaaagtcatacacatgtacttaaggtgcatgcatgggagccttcagaatgatggtccagcttcccagtgagtaacagagacttatataccattttgaggttacagaaagaatggggcttagattctggtgaaacaggctatggaaggaggagaggcttggctagtgaaagtgaccttgttatgtagatgaagcctccctcaaagagacttttaaaggtgtggattctcagtctctcctggatgtggggaaagatctggaaaggggagggggcctggctgcattaatggagattctctacagatgcaaattttcccactgaagacactctgctagccacttctttcaggatgggcaagtggcagccatttaagaatacgtcaaagaaatatatgttggggataaaatattttcatctccttcccttgcttagggccatgaagctaatgagtgctggaggacacagaaatgtgtgcctctctcaaaggagagactctctttgtgtggagccaaggttcccaccctgtaaggctcaggacccagcccagcaagctggaaaaacctccytttgctgcagtgggccctgagccacctcccttagctttgctcrctgacccccctgccctcccctgggatggtgtgccccgttctctgccccagctgtttaccctacaagcccaccttgccctttatcccttcactttgccatctgcagcctaggactctcctttactttcctcctggtctgtctcctctgagcaggtgcccccagctggtgccattcagtcatggccggagacactcaacacgttggttgtgtcctataaataagcaggcgtgcaggggaaaagcactcctgaaggccagtgagggagaaccatgcttttcaagtagtattacccagagctctagaagatgaggctctctgccaccaccacctcactgtcaaccacggcaatcccctttaatctgttttgcatacattttctatttgaacaaagagttccacagttaagaaaatttcaaacccattggaggtcaatattcttgttgtacagatgggaaaattaaggcccagagaggagaaggcatgcaacgaagcaccccagagctctttaggaagcattttctatgaataagtaaccactgcctgacttatgggaaattccacttctaagtgttcctactacatatggcaaaatgaacttcttccccacacactataggagaccggaagtaaatgtaaatcatgccgtgtcgtgaatcagaagtcacaaactggagcctcactgtccagtggactaggagaggtccccaaacactggtgggacttcgaccccagctgatgtccaggctcttgactccttgaattccttcccatatgagtcagaaaatagtgaaagtacacactcaagaagggagagtgtgcaagggggttgggagctgcttcctttatgggtttctttaaccaaggggtgcaatatccaagaagattcctggaaaaaggtggaactttcttgaaactgtggtgccacccatttttacatgaaatatgggtgttctggaactgtcatggtgcctgtgggtgtgtaatttagcatctcagagagttgcctggttaatgagcgtatagtgaggtcctagaagaaacctaggtcgaatccagcaccaygttggtttcagttggtcttagccagcttggcccacactctgatttttttagagtcttatgacccctagcttcttatgacccttattttaacagtttccttttgctggtcatgtgaaatggctgcctagaattttctattctcctgtgaccatctgtattattcctgtctcaccactaggtgtatctgtcttgcaaagatgtttagtttatttataaacatatttaaatacaaaatattacattaaatatttgttgttttgattggattatgtattgcatgagacttggtctgggttatgctgcagtaacaaatccctgatacaccagtggcttgtcacggcagaggtttatttctccctctcagtccatatccagtgtgggttggcagacagttctggtccacagtcactcagggacccaggctgaccatcgagtagctgcacatggcttgaaacacatggctttctgggtcaccacggtggagacaggagaactggagggttgtgcactggctcttaaagctgctggcctggaagggacccacaacacttttgttcgcagctcagtggtcagaatgaggcccacagccccagctagctgcagagggccggggtggtgagcgaccacacgggcattccagggacagtgcatgcctctgccagccagccacctttcagtagtgaaatatagcccagaaaaatccagattcctggcttcttatgaaacgccaaaagagttgccccgtcgaagaaggaatgtgccccccattccccatggaccccgtgacgaatgtccctcagcggagtcacctccgtggccattggagacttttatattatttattcctgctgtatgtgcacagctttggaagagtagacttggagggagtctagaagcttcttgtatttattcagcaatttaacaaccatgtatggacttcctgcgatgtgccaggcttatgcttggggctggaaactagtggtaaagcaccccccgcccttacccccaccatgttcccgttctcttgggagggaagtctaaacaagagctgggttctgcagggcccagtggggaaatgggaagagacgatggggcagagaggggctgccccaacatggactggggcttttctggcaagggtttccaggaggagctaacatcagaagacaggagtagttctgggttctgaacagagaacagcactacaaaagccctaagggaaaaaaagcatagggctccttaggggagccgtgaacttgctcagtgagcccagggcttagagcaggaagttggggtggaagctggatacagaggaaggcaagagaaaaaaacactgcctgtaattttggggtaaatccagcccttcctgtaatgagtttgctgaaagcaagacttcgttatgctgaagacccacagaagcagtgtgggctaagaaacccagttccatggctcaccctgggctgcactaggcttctgccttgcaagtatatgaggaactacccagagaggggggcagatcactttttccatgggcaagcggaggtgccgaggaactgaaactttatgttgaaatccctgttgcctggccaagaaaaatgcagcaataagtccccagctccaggccttgctgctgggggcctgacatctctccaggccctgaggtgcctaactctggagcaaggcagaggggaggtatggataggatgatcctgaggtcatcaggaagcccactccctcaaatccttccccttctccaggccaactgtatttccctgcctcttgcatcacaggctcatgcagggctgatgctagcacrgagggcaggtttgtcacatttgtgggtgtcaagcaagsggggagagagcaaactggactggtccragtgagtgcctgaggagatgggcattctgcagggatgggctctgaggacattaataaatacgacagcaggtggagctgagcttgagccccccgccccccgtggcatttgcacacactcaggtcgggaagacatgatgggtttgtgtgaacagatgtgggggagttgtgaatgagcagagctctgtcgtgggcaggatgtggtgtggccccaggctgtgccccctcccaatgtgtcctaacacccctagccctgagctgcaacttgggagatggaaggtggaggcaaggtcagcactggagtatgtgtgtgtgtgagtgtgtgtctgtgagattgtgagtgtttgtgtatgtgtgtgtgtgtgtgcatgtgagcatgtgtgtatgtgttaagtgtgagtgtgtgtgttgagtgtgaatgtatgtgtgtgtgcatgtgattgtgtatgcgtgtgtttttktgtgtgtgtgtgtgtgtgtatgtatgtgtgtgtgaagctttacctccctgcctagcatgtaggaggccttgataagagtccttggccacattgacatgggggagagagaggaacaggaagctgtgcagatgccaacaggttcgagaaagctctggtggatttactgtccgtgaaagaaacctggggagggcaggagcggctcctcaaaccaatcaaggctgtgtgtggaaagagggaatagtatgtgtgtggaacagtgtgtgtgaaccgcgtgtgtgtggatccactaatgatcctgtgggcttgagattaccttgttgcacagacgaggaaaggaaggtttgggagtttaagtcactgcccgtgatcaatatagagaaggtactaagagaccagaatcaggggtccaaatgcttgtgctggaacagtggcttttctgcttacttgctggtaatcttgggcaaagtgcttaagctcttgtccctgtcttctcatctgtaaaatgggaatatggygatactcacctcacaatatcgttgtagggactggaggagataactcagagaagatgccaaccatttacagcacatagggaacacagtgccgactaacccactgccaggacagccagtgatgggccactgcctggctgagcgggaaggcaggagagaggcccagggtagctctggaggattgcaggagcaaccgaggcagaagccagtagtcaggctgtccctgccaagggaagggagcatgtgatctaaaatgcttaggagatggatctggattcctggggattatggagagtcttctggggtgggcggctgaaaggaccagtgtcactggctcagcatgaccttgcccaaccaaggcagcttgactgacatgtggccatgtgggtctgggccagaccctttcagccgcagccaccttgtgccaaggcggtgtgatgccaaggccgacggtgtctgtgccarggctgcgggtgttgggtgctgcactggccggcactcctctggmtcacctgtctgtccacccttccttgtcttcccagcaagtaacttctaggtctgcagacaagaggaagagaagatgaaggaagactgtctgccgarttctyacgtgcccatcagtgacagcaagtccattcagaagtaagccttggtgtgcaggttgggygggggagtcttcacatttgycatccccctcatcctgggcagcctttaggtggaggggttctgagcacttgttcagagatctgatggggtrccctgggggacagtgatggggtgcttctttttgagcctgtccaataggggatccccaagctacacatgaccatggctgggaggcatgggcaatagaaaagaggctccagatggcaggcactttatacgaaataggtgtgtacagggcctcattataacttttacattgattgcatgttgacaaatagtaatttagatatattgagttcaataaaatgtgttattaatgctaatttcacctgtttcattttcccctctgtattaggccattcttgtgttgctataaagaaatacctgaagctgggtaatttacaaagaaaagagatttagttggctcacggttctggaggctttacaagaagtgtggtgctggcatctgctcggcttccagggaggcctcaaggagcctccagtcatgttggaaggcgaacggggagcaggcacttcacatggcgaaagcaggagcaagagagagggagtggagggtggtgccacacacttttaaatgaccagacctcgtgtgaactcagagcaaaagctcacttatcaccacggggatggcccaagccactcatgagggatctgctcccatgatccaaacacctcccacctggccccacctccaacactgggaattacaattccacatgagatttgggtggggacacacatccaaaccatatcacctcctaacatgtactagaagattgaaattaccagtgtggctcacatcccacgtctgctggccccacagccccacagagcccagcttgggttcaggcagctgtccaggcctccccttcctccaacattagccagggctgtggctttcccttcgggaagggagacagcgttgagggaaagtggcttactgcagacttcagggccttactcacaggrccatcaccttccactgcgcctttggaaagtcagggtggggaagaagcaggcacccctcagggtggcccgcagcagccacagcaggccttgtaggaagtgatatggggaaaagcaagaggctgtacaatgccaaaagcaagtccagggcatttactgtgaggaagcaacgcaggtggagggcagggaggctgccagggccttacctgtgatagtgaaagtgtcggcaccctggacatcctggaccagacgcaggcctgtcccgtgagtctcgcctcctcctcagcccgacccccatgccccccaccagggccatgtgcagaaccatccgggtgcattgcgatggcagtctggtctcctctggttatgcctggcyggcgagaagggtgctgtcacactcctgttacaaatgaggaaacagaggccagggaagccaaaggccagaagctgaggccctgccacaccctaggagtacatgtgygtctttccctttttaggtcggagctcttaggcctgctgaaaacctacaactgctaccatgagggcaagagcttccagctgagacaccgtgaggtgagcctgttgctcttgttcatggggtcaccatgtaccctgggaggccctgcctgatacctgttgtttcagggtaatgatgaagaccatccccttcactctcagcagtgacctagtttggacaataagttatatggtcactctcatcacwcacctctgaccctgagccagggaccaggttaccagcagccaggtcatctcccttgcagagggtcagtgcatcccttccagagttcccagtggcagaaatcaccttgggggtcttccccctttccccttcccccgagacctttgtccatgtgaactgctgccgagaacaggtccgtcctcagcccatcacaccattcagcggacaagaggagtcagtccctctctgttccctgctggtcccgccacatatctgcagrgtctcacctgtggcccctggtccccagtactctcatttgtaaagtggggtgtggggctacacaggggcttataggctcagatgctcacagcaggcagcgcaggtgtggggagtgggtctccactcaaggagtcagccgcccatcagatcaaaccatccctactgtgcaggaccgtgggcctggtgcagccagaccctttctgatttttcagaagaggatagattatctggaatttcatgaggaakttcccaaatcttgaaacatcatgtgggctaaatacatgtctgatgccaaacacagcccttgggcactggctggactctgcagggcctaggcttgggggaccacccactgggcagggcaagtggagccctagtcttgcggtcattcacatcctctgatgtttcatgcgggaatcttggttgggctttgtggccctatcttggtctaattcaacatatttgtaccgcctaatggcaagtcttwtcgtggtraggctgttttttggggggttctgcagttgagattgggttggctcccggactttctctcctcactagtcttggctcactagtcctagtcctccctcttcagtaactcagacacccttctatagctcccaggccagagctagcccaggcatccaggcaactctgggcagctggggattgccagacagtggcagatcagagggccggctggaacctgctgccagacggcctcagccagcccctgaggcgtcccctcggctggccaggccagacatcacacccttcaggagcttctggctcctggtccaagctgtgctgggctgcctgtgaccaccaggcatggtacaaacctcacactctgcctccttgacctgcccaggctgcgaggccccacagcttgctcccctccctctcctgccatcccacctcctcatgctcacttctgtgacacctgtctcaccctgcctgcccccatcctgcactccccaggccgggcaccctgtgggtccctgtgcagagttggtgggtgacttaagcagcaggtgtaggcctggagagagttggggtgagtcctcggtcctgagctccagtgtgctgggtagagggaggcattggggagagggtgatggcaccacagggatttccacctgtgctgttaacacacgccacttcatatcttctggtggaggcctggggtgtggtcactgctgttcttcagctctggctgttcagggattgatctaaatcccaggtggctttccacaggtggtccaagcaccagctgccctgggaactggttagatatgcaaattcctaccacgcccctctcccagcctgctgaaccgaaaacacttagtcttcccgtccaagttttaaggagccctccagggcattctggtggaaggtcaagtttgaaaaccactagtaagagcttagttttggcactcgggattccccaagataatcccctctgtaggaacagttgtcgggggcaggggcgcgggagcgggaagccccaagagcctccaccctgcgtttgtggtttgtgtgtgttggtgtatgctgcgggacagcccacatagagaagtaggggactctcgggctgggaagaggtgttcttgacagcccttaatgatagaaagttaacccactagggggattttcctgtccctaacgctgaagaaagtgtaagggtttgacccggtctccatggagtcagaaagtacctttcaggaaaattctgtagccttaacagcccagggggtaccggcctgaagaagtgtgtgtttttgctgggtcgcaattaccacataagacgaggctttaggctgtgacactgataggcacaactggtccctggggcaccaagcccctccaggtctcactgccaccctgtgatgcacccaccacgacctcctgggccactgggcacttgctgcaggggcagggccatcccaggccagtctctcctcaggcaccacaggccccaagggctgggcagacaagaggaacagacacttccccagagaacctccaatgcaccaggcactttgcctctcctttgtttaatataaggtgatataggaatgattattttccaggcaaagagatggaggctcccagagtttaagtctctagtccaaggtcacattgcagtaaatgaaaggtgctggccayggccccaagctcacagccacttacaaaacagcaataccgtttccattaggctttggaggtctccacccagtatcagtgaacaggtctcagggacacagggtgctgtttgttgcccttgagccccaagctaaggggctctcaggctggcgaagggctcaccacccggggcgcgctcccagagccgcctgaaagagacccccccccgtgttgtcactgcccctcacccgcagcaccggcagccttagcagtacggtttggggtgccttctcctccactgtctcatcccacttctccgaaggtgggcagggccacgcyctggggccagcgtcacgccctgggaccagcggctccttgtgagccttctccccgcttccgaggggctagaggagggacgccatctctggaggctgaggcgccgacttcctgtatcatgaacctcgcctttgggataattttgcttgtattacaacaaaaagcctgagcaacggggaacaatctgtgccttttgaagatggcaaagggctttagccaggctggctggtatctcaaaagaaaaaaggaccgcccggaaatgtccttgtgtaaacccatggctctggacaagcaagtgagccccaggcggcaggaccttttctggggactgtgtgccggccccgcccgcctggggcgcggcgccgaggctccggggcgccccctggtgaccgcgggcgcgctccacatccagtcccgctcctcggcccagggacccctcagcaatgagagaaacggaaggggcttcccctggtccgggggctccgtctctcccaggggtgcggaaaaccagcatcccgccttgagagagttgccccgtcccctctccgaaggcctggcagaccactggcccctggagtgactggccagccccacgaacatctgttttctgggagccgcaaagcgcttcccagcctgcccgctctgggcagtgccttgtgtcccactcactcccttcttcgcctcccatccccaccttccacccccacccccactcccctctccacctcccacccccacccccacttccctctccattcccttctccagtcccctctccacccccagccccactcccctctccattcccacccccacctccactcccctctctacctccctttccactctccccatccccaccccagtggcaagtaggaaggagaatgtaactgctctacaagggccccaccaggaggcttagcttgaagggaaaggaattcccctgggcctctctgcaggagcttgggacactgccagaagccccaaccacaaacctgtattctactgggagggagcgccttccaaaggtgccattracctctttcacacagctgggtattagtgaggaagcccggggatggtctcctcaaastgccagacctccccagatgcagcgaggtggcttctgagcataggggagtctgctgacctcatcctagttgccggactctccctctgaccccgtttcatgatgctttgcagaaggggctgtagtgaggctgggcccagcaagccyggacctcaacccctctgccttggtgggtgggccctctggatctctcccgaggatgatgattggctaaaggctgccccggctaaaggctgccccacacgtttgcccaaagtcagggacctgcaggtttgagaccaccacagagacacagtgggctgtgacagatacaaacatttgtctacagtgctcataaatgcagctccaagttcacatgcgcagattcccagcccttgcagggtgtgaagaacattgctgatgtccccattttatagataaggaaactgggtaattgcttgtctgaaactttttccttttaatatggtttacattctatctccagagaaaacacacttaacagaagacagaaaacatttaacaaatccaaagcaatyaaamatagccacaaaaaaagagaataacctagactgacagctcacagagcaaggaggtggcagagacctgcccaggtgagcttggctgttgcccccagctcaatcttcctcctctcctctctctgtcccttcacctctgatcagtcccagcctgattcccgttccctgatgcctcaccttcttgctgccagatgcctctaggaactagggtccttcagactccagatgccctgdcctgggccttaggacatcttgacttccccagtggacagctggacagtgccctgctctcacccacagctgggaccctgaccatgccatgaggcccctgtgtggaagtggtgtaggggtggggatggtagcactgagtggtacagattctatcttggccctcatcatgggggaactctcccaatgccaccacaggacgtatgagttgtagccagcagagtgccccagtggtgccaggtgacagtcccccggaatacattagtgcatttgctaagactccatgtgttctcttgggcctcacagaacatgggctttgagggtgggagccaagaggcagacttgggagtgcccgaggccttgttctgaaacacctggggggctgacacccccactaccctcacacccctaccaccagtttccccaccagcgatgatggtagctactcagccagtgggctcctatatgcggttacacgtcagaatggcctgggaggcaggtgccagtaattatccctatattacccatgagaaactgaggaacacagatgttaagtaagttgctcaaggtgatcagccagcaagggtcagagcgaacgggattggtaacatctcctcatgtgaaacaggctgttatcatattcagagggggtcggtctcactgtgaactgcccaagcaggggcctctgcagaaaagcatttccctttcagagacctgccaggggcagtgaccaccatggaggagaygagaggagatgcagacccagcatgctctctacagaagcctttactggggaggggtcagagttcatggatcaccgggaggtgcgagtagagtgttctgaggacactgctggggcgggggcggtggcgggaggccatggcttgggcagactgcccaaaagtccagcttcttaggtcagagctctgctgcccatcctgcggtggtcttgccagggaatgcccaggcatcctggcttcacagagcctccctctgggggcccccatgggcttgctgctgtccatctgtctatgtggaccccagaggccagcagaggggccagtcctccttggcaggtccctctggcttggctgcttttcctgggactccccaaaaagccagtccagggggtccacagtatcagccatgggcagtgtgggctgctggccactgaaacgtgcggtgatgtctcgcagggacacagcagggcggcccttccggcaggcctgggctggcctgtggggtggcctgggttggccctgggccgtggccttgtcyagcacagaggtgggctgtgccagtcgagatatagacctcacgtagtcatccaggctaggagagggtgggggctcctgtccaggacccccaagcagcatctcctccgtggtctcccgaattgtgggcagatgggccacggagagcagaagccgggacctcatcactctggcgagaggaggtggcaacctgttgggaaacagaagcctggtggtgagggcctgccatgcgtcccactgcccctcagcgtcaccacactcctctggggctgcctgtaggaatccggtgccctgagagcaatttgaagtctacagagcccagaccagagctcagactgctgggatcttttcttcctgttcaggttaaaaaccccaaaggcttaagattttatcattatcgtttcagaatgtgcacagataagagaacctaacctaacaaacactggtcagaggaaggctgggtttaaaaccaggatcggccacgcactgaccatgggacctttggcaaggccacctctccaggcctccacttacccatccataaaacagggttataaatacccctggccgggatgttgtaggaaatgcatgaaataacccctgaatccctttataaatgcaaagccctctacagacagccctggtctctaacccatagggaggctgtgcaagttcaggctgggaattgccctcaaaaataaacaaagcccttgtgttttgtctcaaacccaagggcagctgctctctcttacctggagctgaggaggtctgggggtggcaggagaatggatgagcagggacagtccagtccaaaggaagcccctgggaagcttgggggccgaagggtggagggtccggcagggggtccagcgtggggtcgctgggaggaggacagtgcactgagtctcacagtccaccgtagcaggctcttccctgagcagtgtgaagaaccttcgcaggcaagctgyttttataccttcccagcagctatcaatcactgtcacgagggccaaaaatagcctgctcsgaaggctgtcttaggaaaacagcttggtgggcggggcctggcccagctgccagcttggaggtgtttttctgcctgtaggaggctggggaatgtttacgctgcmgggcaggaaaggggtgggttcactgctggtcaagtaggggcactgggagagggaggggttccactgggccctcacaggtagccccagggccacccctgccccaaagcttgtttcccactctgtgttacaccaccccatcatgactcctgtgaagttgggccaggtccttggcaactttgatgaaaaatcagcagcacaggaccccagtctggaggcagctgaggctgggtccctaggcctgctcctaggagagacacaccctgctcgcaagggaccaagggcggtctgcggggtctgaccctggtcttcttacaccccagatggggtgctttcggaggatttgtttgtttacttgttcaccagatatgaggtgctagtgtgtgctgtgaatgcactaagcacagcaaacgtagcagcggacaaaggtgtggccccctggagctcatattctagtaagggaggagatcaagccagagatgaatgggtgctgtgattcaggcaacagcaagaactgcctgaaggaaagcagcgcagtggcatgctgtggtgggctgccgccacaggtacagtggtcakgggtgtcttccctaagagcagatattggagcagaaacctgaaaaaaatgggaaaatgcacattccaggtggcaggggcagcacgtgcaaagcccctgtggtgagggcgcgccggacagacatgctcagggcacagcaaggggcctgcagactggcccatgtaggagggggtcagtggaccttggggtggatgctgtgtttccctctaggagggagggaaagactgcagggtttgaacaagggcactgcagtctggcttctgcttcaaaggatcgctgcagctgctgggactgggctggggctggggctggggggctgccaaggagcacctgggcaacattagaaagccactgcatctgtccaggagtgaccatgccagcaaaggaggctgccaaggatgagagaggcagcccctgggaagctcctgcactccccagacaggccacagatcctctgccccagccacagccccacctggaacacgcctgcctgtgctgcaggtgggggagaaagaggagtcttgagagttagcccaagcctgagctctgagtactgggcagaccccagactccctaggcaagcaagagggaccggcagtcccaagttcttgaattctaggtgggaactccatgtgcacaaaggcatcggggcagggagtgcctgagacagtgaccaggatttcagtggcacatggcacttctcaccttgcccaagctcttatatcttttgtagaccctttgtctagttcgctggctcttctttgaatttattagcaatgagcagattagtcaagagaccaaaagagggagggaggcggagaattcgctgctggctgacggggctttccctccattcagatgcggccaagctgggggagggtgaacagtgggcggctatgytgggggcacacacatcacctgtgtaggcatgtctggcctgagtcatggagagccagcctgtccccagtacagccaagcccccgaccttgtccaggcaggtcctgaggtcagggccacctgctcagctttcctccctgtcccccttcactcgtcttccagggtgcagtgcacaagcacctcctccaagaagctccattgcatctccttctgygtccaagcccgagcccctcgtggccagggctgtgtctgctccatcttcctctgcctggcgtccagggtggggctggagggcagygggtctccatgagtgagccatccccacaagctctctccactgagaggcacccgagaccaagaggcaagaacagaaccccccakagacctttgaactccatagatccatgctggcctctccttcataggaagctcagtgacacatctgtgcttgtagagcaccagtgagtatcaaaaacagctctggtttctgcttgtttgttttcctttttagcagatagtgcaaggtcatatctggaagctgtgtgtatatttgataacctttggatacactattttctctgtggatggcaggatgtttgaacctagaaaccccatttctaagttaccatgaaatccacattgtgcagggtcttcctgagtgctgccagggatacaaagaagtttccatggygtccctgttctcacagggcttttagtgccaacgaggagagagaaatgggatttgtgaatctaaaatatgggtcagaaatactgcatgattcccttatataaggaatctaaaataggctcatagaggcagagagtgaaaatggtggttgcagggactggggcaggggaggaggaagtggagagttgctgtgcagctgatataatgtttcagctatgcaagatgagtaagtcctggatatgggctggacaacgttgtgcctacagtgaacaatacagtattgtgcactgaacagtttgtttagagggtagttcttatgttaaatgtccttatcacaataaaacataaataataaaattaaatgttggttgagatggcaatgagagaatgatattcaaagttaattgtgggaagactagtgtcagagcacattaggagtgtgtagtttcgagactgcggctctgggtagagggcagcygaggttgctggcaagtattctggcaaatgactcagcttggccaggcttacacacagagtgaccgggattggcacagaggcctggggtggtctcgcagagacagaggcctggaataggtcagaggcactgaatcaagggcccaaggggtgccaaccagcactactagcaaggtgcgtgcagaggactctgttgattagggccccaggttggcagcaggagagaagccatgtcacctgcagacctagggaaaccgagggaggttggggacatgggatgaaggctgttgtagaaattctggtatgggatatagggctagtgatgtctaagcagtggtgagaaaagcaagaccctttgtcagccctggcaagtggacgctgctgctgttggaaggcaccgggagaagggtgaggctgagacacagctaggacagagagtgcccacttctsctctggtgggtgtgggaccctgccgggcctggtggccataggacctggtggcgcaggaccccctcccaggtgcagtgtgggcagagaggtcccctgcttggcatgagcagacaggctgtgcgtccctggaaccacttcttcaccgcggtgtggacgtgcctgccggccagcagctggcttcctgtgggacacctgactcagccactgtgttctgcgctgtgcccctggccaggcatgagctgagcacatctcaggctccctcccacagggcctggtcacacgccccagggcacgtagtggctgatggtccttcctgaggggatggggccactcaggaggagggatgtgcaaggcctgagtgttcagagcatcccatccctagggggcacagggaaggtaggcagctgctctgggggaagggctgatgtgtggacccccacaggaagaagggactctgatcatcgaggggctcctcaacattgcctgggggctgaggcggcccatccggctgcagatgcaggatgaccgggagcaggtgcacctcccctccacytcatggatgcccrgacggcctagctgccctctgtgagtacccggtggcttctgtgacacctgctcagcctgagctcccgggttggggatatcccgagcctcagggtgggagccctgttcccttatgggacactggcacaggagggtgacccagcctcatccccatgccctgtgactgcctcagtccacagcctcgcccagggtggcctctccctccttcctggagaacattccaggctcccatgacctctatttctgtttctcaaaccttcctgcaagccaccttgctggcaagaagggacgactacagccaggggggctcccaacacctatgcaagccgaacatgtctcgccatctcttgttctatctttaaaattcacacgaatttagcctcttactactctgttttcattttaatgtcaaaattttaaaaataaatttatcagaatttcacattacatttgtttaatatcagaataatgtttctgtcaggaggaaatggtctcctgcctgccttaccattcaatgcacatttatctcctcctcggcccactcccaaaagacgcagttagtagctgggccttgcctgcttctgcagtagtaactcctgtagagggcacacattcagagctttgcccccttcagatttcatatgaaacccatgctgtgacagcacccaccaccctgacagccccagcacatacctaggtgtccccagtcactcagcgaattctgaggcacacagaattagagcataaagtcagactccttaggaaggctgcaagtgtgactcacatgtgcccctcttcgaggtaaagcactcacagacagcagtcgcggctgtgcccgtgtattctccaggatcccatctgtcttctcttccccaggtcccctgggctacagggctgtgccccatcatacccactccttctccagcccagcactagctaccctggcctggggctcatcctgmcaagaggcctggaggttgggcccttctaggtggcccctgcctgacaccccactaggccttcgggaagcccagcgagcctgtttggcacacagctgctggcctggctaagcctggtgtctaggaatgcgcaggccctgactatgttcatgtgtccgtgtgtctgtgcgatgcagcccagcacaagccctcaggtctgcagggccaggctcactctccgtccagcagatgctggggggaggcctctacttttcttttattgtttcagactgactctcttggtttgaaatccaggcctcacctcagcctgccttgcttcccgcctgtgtcctaccccaggggctgctggtctcttctccttggcctgagctccctttctctgccrgcagccatctcagccctgcagttgtctgttttcagaaaggagccatcgccccagaacgggaacatcacagcccaggggccaagcattcagccagtgcacaaggctgagagttccacagacagctcgggtaagcggagcccgcaagctgcccagacccctgcctcatccggggtaggagcagaggggcttggctcacaaccacaatctccgaaggacagctttgtgccccagccaacgaggggcttcacctgctggacccctacccaggtgcctgcctgtraggtgctctgccctcattctcgctcctttttatggaaaagtgagcagaggcttgggaggtgacagtgacagtgtgggggtggcctgagtcccccrccctgtgtgtgctatgggaaacaggagcatccacagaaggcactgcgctctcctggcccctcrcctccctctgcgacctcgtcctcaccctctgtacctgctcactcatcctttttattccccttcctttagccctcagtgaagggcctgtttcagagcaggggctcagaagacagggctggggccaccaaagacctccatgggcaccctaagacagagaccaagaggggtatggccatgtgacattgtgacccaggttaccctgtctgggtctcaccttcctatctgcaagctgggaatatccagcctccagtccaggaatggccctcacgtccccatctgccccagtgcacgtgaccacagggctctagggtgccagatctcccgacagcaggcagttgctctgtcagcatcacccacsctgccattctctcacccatttctcatgcagggcccctggaggaggcagaggaggccccccagctgatgcggaccaagagcgaygccagttgcatgagccagaggaggcccaagtgccgcrcccccggtgasgcccagcgcatccggcgacaccggttctctatcaacggccacttctacaatcataaggtgatgccccagcctggcctctcccctgggcgcatggggagccaggcctgagcacaggcacagcaagcaccatgacctgtgtgggggctgctggcattcctgtgccctcaggaggaaaaaccaggttgcatccacataacagccccgtttatgacctaagcattttccagcacatgctcactgtcagtgcatcctcacaagtcacacagaattctggcaagtaagctggggatgccctgggcagacagtaacgctgaccgtgtcttcaatgagggcgctttctaggaggcttccccccgaactcgattggttgatccctgggaacactgtgtatccagccatcactctcaccgaataattaagcaggggtgtgcccagggcacatgtgtctgtgccccagagaacctggacgaccccagattcccagcacacagccttttgtccaaggatgcattgtactgacctcaggaaaagctttctttccccaaattacatcattctataaacaaactgaactgtagcaggagaagttgattgttactgtaaatagaatgattggctgtctgggcaaggccctggatggagcgtcttgtgacaggccatatctttccctcagcactgggaaatgcaagccgagatttccagttgaagcagctgcccttcttgatagaggatgacttatggcagggagggggctcaggaggagggtctcagggtccgatctgaaggagcaggtgtcccaggttaggctatccaggggccattcaagccacacttagggtgccctggactttggaatgtctactttggaattctgctgggcaagctgaagggaccctgctttaatctcaggatctcccttccaccycctgctaggcttgtggtgagtgaatgaatgacaatagggttgcctttgctaaatctggaaaaatccaggactattccaaagtagagtctcctgagagagtaaaggggacccaggattgaagttaggcagagattaacaaaggtgtagattagcccaaggacacatracatgacttgagtattctttaaatcttgttccaaaaggggtttagtgtgtaatgtgttgggtacccattgttagcattcaaataaatgttgatatgctagtgtaaggaattattcaaaaattttccaaaatatgtgcgtgggtttaggtattttccagttctatgttccttaccaaaaaaagggtgggggcagggatgttttgctccatgattcaaagtactgaatggtggagtttagcattggtacattcgcttctcctcgaagggtctcattcatcactaagaggtgtgtctggtacattaaaccttattgtagtgattgccagtgtcataggaacactgagctctctgcatgtcctgagcactctgcagcctttgaaatgaacagtgagggttttcatcgcagcctctcatttccaactgaaccacactatcaagaagagctactcagccagacaacatggggtctcagcctgtcacccagtgagggcagcttttcctcctagtgacagatttgcccttgcaatgtgaatccattcttccagaaaaaagtactgctttcaaggacacagaatagtgtcttaagcatttgggacagtagctcccccacctcctgggtaagggaagtcccaaagaaaagcactatgcaaaaagccctttcttaccacgctcaacatccatacagaactaatgtccttagaaatgaggggacagattccttgagtcagaggcaacaattgaaaaaataaataattcctagcattgaatttctgagatagttccaggttttgtttcttagaactgtgcaccattacttcactcagtcattttccaaaactgttctgattcccagaaatgttggttttatttccagacagggtgaaactttgtagctgtttctactgcctgacctattggattcaaatgcgttctgttagagagaaaccatttgtggttagagataagaaagtagccagggggcctttgttcctacttggagttggttggtatcatcttgagaaaaggcttcgtgcagaagaaacacagtgtcttgttaacaagactttttgtccctttgaaatagcctaactcctctgtttcatgtttctttttttatttgagatggagtctcactctgtagccaggctggagtgcagtggcacgatctgggctcactgcaacctccacctcctaggttcaagcgattcttctgcttcctgagtagctgggactacaggtgcgcaccacgatgcctggctaatttttgtattttttgtagagacagggtttcaccatattggccagactggtcttgaactcctgacctcgtgatccgcccgcctttgcctaccaaagtgctgggattacaggcgtaagccactgcacctggccctctcttccatatttctttggacaagaaagcctaatcctaatcctggctttctgtataactcagtcattctgcacctcaactagaatcgagctgggggaagcaggtcgaggttgagtctgactctggcacagcgtgcttcattttattgtgcttcttgttactgtaccttgcagatttttgcaaatggaaggttgctgttcagcaaccttccatttgcaaaaatgtgcacttttttttttttttttgctgcacctgcggtttctgcaaattgaaggtgtgtggcaaccttgtgttgaacaagtctatcggtgccgttttccaacactatgtgctcactttgtgtctctgtgtcagattttttagcaataaagtagttttaattaaggcatgcatattttttagatgtagtactgtctcacccttaagaaactacagtatagtataaacatatcttgtatatgccctgggaaaccaaaacatttgtgtgactcactttattgagatattcgcttcattgtgatggtctggacctgaactcacaatggctcccaggtgtgcctggacttatcagagcggggatactgaataggtccttgagctctctgagccttagctacctccttgggaaaacagagctaggatctcagaggaggaatatgcgaatctaaacttgagtttgaaaagcaaggagaggttcacctgcagaggagtcacattcgctgggaggcaccagcaccaggggggtaacatgtaggttttcaggaatcatggaatcctttgagtcagggctctgtcttttctaggtgggtaactctgaacaagctggttaacctcctaaagcctctgattcctttctaagaaaaggggactagttatagctgcctcaaagggttgttatgaatattaaatcaatgattgtatgtaaaatcttagcgggttcaatacacagctagggtttattgaggacggacctattatgtgtcaggcagagtcctggttgatttcatatatggtgtctcttaggcaaaggcaagatacctgcaaaaatataatgtgtccccccaccccccagccaaattgtgaagaagctctgtgactggagcacatggtgcttgttaggcaaccatagtgtcatacgtgcgagacaatgagaagaactacagatgttattgcacagtccccaggaagccttcagatacttttagacccgcgctttcaaacagtgcttctcacattgaactgcacagatcgcttcgccttgtgttctacagacgcagactctgattcagatggtatggagcagggtagggaagggagccgagactgtatggatgcagctgggctagacgtcacttggaggtgcaagggttttagaagtccgttcctgtaggcagcggtgcagactacggattagagggactgagaccagaagggaacaagctgggaagctgatatggtgtgaycagtgcctctactaggcactgctgggagaatgaagaggaggagacagattgggtaactttcagccttagaatcaacagacaactggtgacttaatcaatagaaagagtgatggagagactgattcccccacccttgtgaatgacttccatggccctggttcctcgggtccagagagctggcccttctgggtgtgtagacatcttccttaggcctctggaaggagtgcactactacagcttcccggagtgtctcccaggtctgggaacagcttatgtgtgcatcagcgtgaatggacaggtgcaggtgttcccagatctcagcgtcacctgctgccttggtctgttcaccgttgtgatgtcagtcccttgtcccctctgggcctgacctgaacttctctcccttcctggtacagacctccgtgtttactccagcctatggatccgtgaccaatgtgagggtcaacagcaccatgacaaccctgcaggtgctcaccctgctgctgaacaaatttagggtaagcctggtcaggagcagccttgccccaggatgccagtggtctgctattctgttgggggtggggttctggggaaagctgccmgtggcagaagctgcctgggcagaaggtctagcaagggtccctctgctgagctttggtttctcggatttcaagcaagaggaggktgggagaggacaggttccttgcracttgygtgtgtgttactgggggtgtagttactgtcaggggaccctctcagttctctcccatctccaagcaccgtgatctgacttcctgtgactgcctgtgcaggtggaagatggccccagtgagttcgcactctacatcgttcacgagtctgggggtaagtacctgccccacttctggatcgtaaaagcaaaaggtctctacctgttcagcaagccccctccccaccaaccactgactgtactccctyccagatgggctccgtgctggcttgcctagtgggctagggcacactgtgcctcccagcatgaacatttctcccccacccaaacccaggcacactatggaagccttgaggaaaagaaaacatacttttggcttcgaatttaaagcacattaaaatgtccttggattttctaggtcgctcagtacattaagtttaattctttcaggattctgaaggagaatcccaccaagctataggaagcctccctctccgcctcttccagagaaatggatgggtgggtacctagctccttggcgccgagtcaggaagggtggggtgcgtgtcgcagtgcatcaggccctggccctcccgtctcagctttcctttctcccacccctcagatcttgtttctcttcaagctgcacctttgctgaatgacactgtaggggaggaaaattatcttctctttctacccatttaggttcactggctggggccctgtatttagattaacaaaagacagattaaggagaagaacaaacagaagtttgttaacacttgcatcatgcatgccctttggaatatccagggatgaatggtcagaatttgggcttaaatagcatattcacaaaagagcagtaagtttttagagaagtgacaagacagaggagaagggcctgagtttctggggaggcgaagggtgggaaggtcaccgcacggggagctgcgggaagggaagggcttcagcgggacgtgctgtgcaggttcctctggtgccctctccaggctgaggaggggctcgggttgtctctggtgattaactccatcattgcctagagagggacgggggcacaccttgacaaatttatgtcctgctttttggcaaataggggagggcaaagagcctcacttgtatcttcttcttctcaattgccagccgctccacttaatccttatgccaaagtggcagatctgggggccctgttctgcctcccttctgcatgagcaggaatctctcagggcagcgctgttagcgaggtctgtgttcttagggttccctgcgcccctagacgcacattttctatcagttcctaatctggaacagacagaggtgatcctaatctcccrtgatttttgtaaaccaccttctttttcagagcggacaaaattaaaagactgcgagtacccgctgatttccagaatcctgcatgggccatgtgagaagatcgccaggatcttcctgatggaagctgacttgggcgtggaagtcccccatgaagtgagtgggggccaaggctggggaggcctgctctagggtgaggggttcttgggtgacrgggcctcccaaggactcctggccagagccctgtcagttgatgtctccaggagctccacactctcccaaagggctcccagcctagcacagggaggcgccagccctccctctcccatcagtgaccgccagcaccagcagcttaggggaaagaagaatttgggtcctataaaaccatggcctgtccttttcctctagggaagtaaagtcttttccttcattggaatgtattttgttgtcattatgtgagagacctatgcaaaggctttttaactaggccctacctcgcacctgtggaaaacagggagatatttaagtcttaccaacagcctgagttctgaccagacagtgagtgcatttccaaactcctctgcatagaagatgcttacagggtttgaacctcaagtaggaggcctagtgaccccgtatccctcaggctgctgcaattgcattccattgttagaaacaatggtgctcccacctccctaccccctagcccagagggcacccaatgtgacaatgctgctgtactgaatgctcttcctaatattcagtttaatatttcctcccagggataacagttgcctttgagatagtaataggctcccgtcctggcatctgtacacaacacagcagtgtggrggtggggtgggaaaagcggcagctccttctgtggatacaagatgttggctggatgggccactatggaagccttgaggaaaagaaaacatacttttggcttcgaatttaaagcacattaaaatgttcttggattttctaggtcgctcagtacattaagtttgaaatgccggtgctggacagttttgttgaaaaattaaaagaagaggaagaaagagaaataatcaaactgaccatgaagtaagcagcacttaaacagacagtcatgggtcctgaacatcagggcaggtctgcaaagcacagcaccagtgccggctgggaggtctctctcctccatgggcaccagtaccctggtacgggaaggcctgctaaccctagctccccagcatcaccctctggccccctgctcggtattgccaccacgctggggtgacagcttgccaaaacagtgggacacagccccgatcacccatccagtcttggcatcctcaccagcgcaggcatgagctgcagaacacctggcaggaaagtcaggcaggaacccaagtgggcgctgggtcaagcttctgagttctgctggtgatgtggctccaaggagcaggcatgctgaggcagacttggcctgattagggccttttgtcctagtgggaattctgagccttccccaaagtggcagatgctggaactcccagcctcagccgatgttttcaggtgcagagggctagttcaatgaaaaggtgagcaggtctcacctgccagctcctggggacaccacgccagggtccggatgcatgagttagccaggctgtagtcccaatgacgtctccccctcagcaaagtgaagtgtggtccaggacttgtggagggcaccccaccagggctggtggggaggcagctaggaaggaaagggcaggagctcactgagagggcctggggtgtgtggggaaaggatggatgttagcctctggttgaatgacccgtggaaagccacatcctccacaggctcctgtctgtgcagccagaccccaaacaggcagaggagaccaaagtcagagggaatcttccattctgcagtcagtcctgaccccgtaagatttgagagctgaaagggatctggggggcaactagtgggtccactcaacgtacagagtggacgctgaggcccagcacaaggaaggttgccgcataggttatggcagaatctgggctgaaacatgggcttcccgatctctgctctaccgccctgtccactccagtgtgctgttgtctgtattagagtctgcaatagaaatgacaacactctgctctgatgctctgtgcagtccacarcctggtttgactgcacctcatgaggcgcaggccacagccttccccctccttggcagaggagagatgaggctgctgcagggatctcctgagctggccatctrcaggtcccttgctctgctgcccacctccctgccctgtctggcctcagtgagtcctcttggcgatgtctccctccaggttccaagccctgcgtctgacgatgctgcagcgcctggagcagctggtggaggccaagtaactggccaacacctgcctcttccaaagtccccagcagtggcaggtgtacactgagccctggttgctggccccggccggtcacattgactgatggccaccgcctgacgaatcgagtgcctgtgtgtctacctctctgaagcctgagcaccatgattcccacagccagstcttggctccaagatgagcacccacaggaagccgacccaggcctgaggggccaggaacttgctgggtcagatctgtgtggccagccctgtccacaccatgcctctcctgcactggagagcagtgctggcccagcccctgcggcttaggcttcatctgcttgcacattgcctgtcccagagcccctgtgggtccacaagcccctgtcctcttccttcatatgagattcttgtctgccctcatatcacgctgccccacaggaatgctgctgggaaaagcagggcctgccagcaggtatgagatctagcctgctttcagccatcaccttgccacagtgtccccggcttctaagcctccaatatcaccctgtgagcctcgcacagctcagccccaacacagaggtgagaccaggaataaggccacaagtatctcactttctctgcagaaatcaatctttacttcatcagagagacctaaagcgattcttacaaggagcttgctgcaagaaacacggtcattcaatcacattgaggagggtccacatggcattgagagggtgctgcccgctcaatgcccagcagcagctctggaaggcagtgctcagccccatcaccactgtcccgtggatgcctgtgtacctcttgccttttctgggcttgcgtttctctcctctagtgggtggggatgactttcaatgactttcaatacttcccctgaaggaagaatgataaggagaaatgtctgttttgaggaaagggctttgaattccccagatactgaacaatttgtgtttgtgactgatggagaatttcaggaatgaatgagaaagcctttgcgaaactatgcaacagtttacatcagtcatgtgaagtatttgtctaaaacagagcaaactgaagaccaaattattctcctgttgaggtccgtggatggcagatttaaagggaagaaccacaaaggcttgcaaagataggagaggctccatctctaatgcatgtagaagctccttacgggtgcccatcaagagcatagcttggaagccaccatgctgtgcggaactgcgtcagggcaaatgtcacagcaggatttccccaacccagctccatcatcacagacacagagagctgcaggggaggcctgcccactgttttgtcgactctgccctcctctggcagcatagatccttaggtgctcaataaaggtgtgctgtattgaactgaagaagtgagaaccaagcttttttttttttttttgctttctgtgcatccaccctgacccccggctctaacttctgaaactcttatcctaaaggatgtgtggccatgtttggcagaagagccacaactcgctgctctaggagccgacatgactccttcatttctgtgcatgccctggggactagggtggagcctgaggagaggctgccatggaacacgcaggcgtcactggtgggagcctagaggtgacctggatgatgagcaatagagtcaccccgagtcacagaatcttagcatcaggagggccccaagaatcttccaggccaggggctcaggtgggatggaagcagggcctaggagagggtacaaaacaaatcaaacaggagctcccaggtaattgtactcccaagctattatttacaatctcaggtggaggacagctcctgtcccattgttcagctgtaactgagtgactgccttgtgccaggcctgtgctcagccctggaggcacaaagatggagccagtctgtcctgtgtctaggggtcttctcatcaggagaagaaggccagacactggaagggtcaagagatcagctgagcaacgaaccggcaaagctcctgggagtgaggtggaggccaaggcagagttggctaagaagtgcatgtggcgtcacaggccaagatgcacctgccagctaggagcaggccaggtcctggcacacaggaagccagtggagcaggagaccctccctaagtaccagcctgtttggttggttggtttgcttttgaaagttattacaatattatttaaggccttttcggataagttcacttttaaagtaggtgttatcaatctaatttctgaacgttatgggtcagaaaaatcactagcaagtggctcagaaaaagggaaaaggtacacttctgcaatcagctgaggagttcacacctttttttctaaatcaacatcatatttgctgttcagaggcaatctgaaaagctgcaaattcagctcacctcaaccccataatttcaaacgttagaggctggtctctgtggtttcctactggttcctgtggggagctcccgctttctttctccatagagcttagggtatttctcatatgccccattggctacctagtgtctcaggtaataaacgtatccgaagataaagcaaagattgctatgggagagtgttgtctcctaaaataggactgtcttgccaggccaggcctcaagaaccagagagaataataaacagcacaggatgaaatcagcatgattgcaaaaggactggactcaggaaaaacaagtttgtttgcccagaacaaattaccagaagggatcaaaaacatcttgtttttctttggtgataaccatatgctaccggattggaatgtttaccagaaaatggaataaagaccttcccactggcaaaatagagccagggttcacccaggatacatctggccccttagtcccatggaaacaaggcccaaagcttatccagtctgaccagatgatttgtggaggaaccagccctgcaaaatgtgtcccgggtgtgtaggacgcaggtgccttgcagctgcggaggggcagcgggatatccttgccaggtgcagtggtgggcagcatccccctgccctcagttcctcagtggtgatcagacaggaagcttggtcgatcagagccaagcaactgagtataaaaacagccagatgcatgggctatatttaggccctgagagctgcgattgtttgggatcaggctagctgctcacgtgccctgcctgagactcacgttgtgcagggtagggccctgtgccctcctggtcaacttttaacagagatgttttctcagacctaggaatgggaactcccagggttttctttcccagagagtccaaaggaaacagaaagccaagtctcaggcttggtggaaagaaccattgttcaggatccctgggctgagagttcttggtgggagacggaccactgttgttaccgcacatgagccacacctataactgcctttctggcacttgggctggggatccatgttgccaaacacagacccaaggcagcagtgctccctgctgagacagcgtgtgtgtgtgtgtgtgtgtgtgtgtgtgtgtgtgtctgtgtgtgtgtgcgcaagccagtggtgtgcaggggacaaagacataggaaaatgaaactgtcttgccaggatttttctcaccccagaagactctttttcctggaatgaacccttcaaataccactgggctcagggacacactggtccctgctgggtagtttcccagagatgtcccagccactaagggatctggcctctcttgggccagaatccccagaaatatgtgcagaaagatgcccagactgtgtccaccccctgcctcccacacccttgttccctttctcccttgtgttttgtaaatatcatgcgtgaccattttcaataatttaatttgcataaaaattgcctagaatcccatttgggagatagactgttatagagaggttaataggctctggagccaggctttctgatttcaaagtctggctttgccacttacaaatgtgcatgaccttgggcgagtttcttgcctcagttttctcatctgtgaaatggggattctgtgtggaagaaaacaaagtgctttctactattctctcactcagcagcaataatcacaaaagacttctgtgaccaaacggggtgagggattctccccacacaccaaccaagcaatcatttctgcagggacaccagctgggtgtcctctaattcagttttgacactatctacttggagatggcatcacctcccataggttgagggctcagtcccataagatggtctccacccttcccattagttacaagccctggcctctggaacttgtgaactacccacttcaagttgggattctcgtgaccccctccttgggttaatttgcaagagcggttcacagaactcagcgaaacacatttcctggtttattacaaatgatattccaaaggatatagaaaaagaaatgcatatagtgaggtatgaaggaaagggtgcggagcttccatactccttcccctttgcaccccccgaccccaggtggcaccctccagtaacatccatgtgttcaggtatccagaagctctctgaacccagtcctttgggagcttttatggagactttgtaacacaggcatgattgattaatccatcagccattggtgatccacttcaccttcagttgccctcctccccagatgttgatggggtggagctgaaattgccatccttctaatcctgctgtggtctttccagtgaccagccccatcctgaagctacccaggggctgccaggcatcagtcaactcatcagcatataaaaagacatcactttggagattctaaggattttagaagttgtatgtcaggaaacggggagaagatcaactatgtatttcacaatatcacaggataataacaattcctatctcttacggttggtgggaggtacattagtcaactttaatgcaataataccaccaagaatctcagtgttacaagagcatttgtttctctaacattacgtgggaccgttgtggttacatgtgagcttctgtggctctgctccatgtgtcttatcatcctggttcctagactaaaggggcagcccctacttgggacatgctattctcaaggcagagggaaagagcagagtcctggcagaaacacaatgacttgaagtttcttctgggatgtgatgtaccccttgcatccagtcacatgcggtcagccaattcaaatcagtggtcaagtcaacatcagtgggacaggcatgtggttcaccaggaggcaccggagtcacaccacaaagtgcagggaccaaaaccagagaaggtggagcaaaccctcaggaataatcatgcctcaggaatctcacgtgagatcctcaaatgctgcaaacagtgcctggcacacaataagcactcaataagtgttaactattattatactaacagctaggctgaaggcataaaaccctacctgctttctctccctgtctttttcccattctcctttaccctcctctccttcatatatttttctggctctccctcctctccatccttactgcccaggactctgtccacacttagggacacacacccctttatttcctgactttcgtctctctctttttaaaaaatccatcctcgtttacccaatgctttagttgacatacctctggcccttctatggctggcccagttgttttcaggtataggaaaaagggataatccatctttatgtagacattaaaggagttagttttaattagtaactaccttactaacaaaatggctttttaaaaattatctttttattttagtgtacatagagcagacagtcccaacgggtcatgtttgctcctgacgcttttcctaaaccatttctagatctctggccattgccctttaccccaaactctccaaccaccagcatcaaccaacttataacaatttaataataaaagtaacaacgactctcatttcttctgtgttatacattgtgctaagtgccttacattacctcatttaatcactgcaatagtccagatactctctagattgcgagtggagcttctttgtccagacctcattcagctttgtgctttgccatatgcagagacagctccctacagagcagaaagccccaacttaagagaatgaacctatgacttagtttagcctccaccaacaaaccactgtattacttcaggcaggtcagcctctcttgcttcagtttactgatttgcaagacagatatgataatctgtgcttcatgagactatggtgaagatgaataaccagaagataagatgtaaaagtactttgtaaacaataaggcatcttataaattcattcattcaacagctatttactgagtgtctgttccctgctgagcactgttttcagcactgcagacacaataaagaactaaagagacagatcatgagaggcatcgggtgccactgcgaggtccttggctttgctctaataagttgggaagcctttgaaggttttgaacaaatgaatgacatgatctaacttaggtttaagaggattactctggggccgtgaatagactgtagggcaacccgtctggaagccaatataataatccagaaggtggatgaaggtggcttggtggttatagcagtggaagtgttgaaagtggcttgataatgaatatattttaacgatgaagccgacagaatttgtggataaatcacaggtgaattttggatgaaaaaaagaagagacaacagtgacatcaaggtttttggcttgagcaactggaaagatgatgggatcttcacccatccctgggaagaagactgttgcaagaacaggttaggtagatatcaggaattcatttggggggtatgttaggtttgggatgtccattacacatgcaaatgcagctcttgagtaatcagttcgatatacaagtctaaagttcaataacatttatgtcccacagtcagactggagttaccaatgcgggagtcttcagcatgcagcaatagcattggaagccaaaaggcggaggagctccccagggagtgggggaacacggaggtcagctggtcagatgactgagcacggccaggatggctgaggaggagcctggaaggaataagaacaaagagagatcattactaatgagcaacaaaaggggtgtgttgaaatcagactttggagccacaaagaaccattccaattctgggtcgtccgcttacacacggtgaacggagcacatttcttctctgagccttggttcctttcctgtaaatggagtataaccactcccatcttgcaggagctttttggtgataattaaggtgacttcgtgaaaagtaccagggtctcaaaaatctcaaattttgtggaaagtatgcagtttctaggttggagaggctagagtttggtttc

SEQ ID NO: 6833 - DNA, 60316 bp, Homo sapiens
taggagtttgagaccagcctggccaacatggtgaaaccccatctctactaaaaatataaacattagctgggtgtggtggtgtgtgcctgtaatcccagctactcaggaggctgaggcacgagaattgcttgaacttgggagaaggaggttgcagtgagccgagattgtgccactgcactccaacctggacaacagagcaagactccatctcaaaaaaaaaaaaagatggctaccaatttattaatactcttccaacggagagacaggctctacagttcttccatctgaattttggtgtgctctgtgattgcactgacaaacagaacaagacagaagtgactctgggccagtttctgggcccaggccttaagagacaagcaacttccacttcttgtttctttcaacacaaccactctgagaagtgcaagccaaacagagaggccacgcatagctgctctggttgacagccccagctgagctcccagccgatggccagcctcagctgtcagccacgtggttgtgccatcttggatgtccagtccagtaaaaccttcagatgactgcagcccagccactaactgaagccatctgaaagcccaggcaattaccacctgggtgacccattcgatccgtaagagataataatatgttttttttttaagctgctattttttttttcaacttaagccactaaattttgggggtggtttgtacactagaatagaaaaccagaatagatgtggaaggagagagagacagcagaaccaaggatgatatctagaattctggtttgagcagaaataaagactggaagtagggctgggtgctgtgctcccacctgtaatgccagcactctgggaggctgaggtgggcggatcacttgaggccaggagttcaagaccagcctggacaacatggtgaaatcctgtctctactaaaaatataaaaattagctggccatggtagctggcgcctgtaatcccagctactcgggaggctgaggcagaagaatcacttgaacccgggaagcggaggttgcagtgagccaagatcctgccattgcactccatcctgggcgacaagagaaaaactctgtctcaaaaataaataaataaataaataaaataaagactgggagcagacaaacagtttttaggggatggttctgggtgaatgatcataagctaggaaatatatatttttggaactatattaaaatacctttctagagatcccactatgttccctctgcagcattagctatccaggttttacacaggtttatgttttatagatacctatctctaagactctttaaaatattagttttaatatctcttcctagaagaaaagttgtatttctccaaagtatcaagaggaactggggcctggcgtggtggctcacaccagtaaccacagcacctacggaggttgtggtgggcagactgcttgagcccaggaattcaagactagtctgggcaacaaggtgacactccatctctaccaaaaatacaaaaattagctgagcatggtgggcacatgcctgtactcctagctactcaggaggctgcggagggaggatcacttcagcccgggaggctgaggctgcacagagctatggttgtgccactgcactctggcctgggcaacagagtgagaccctgtcttaaaaaagaaaaaaggaaactagtaccaatatcatcatattcagtccttgttgatctagggctcaacttccaagtcccctattcatttgtcaaatatttactcatcctctactagttgctcagccctttactggctgtccaggcttcatatccctgcccctatggagtttacatccaatttgaaaagcaaagaacaagtgaagaaaataattaccccctctaataagagcagtgagaaacaagcagggtactgatagagaatgatggttgaggggaaagctgagacctaaggaagtggaaaaagttagctgtatgaagaagtgcagggggaagtgaggggtggtagccatggaaccaagagtacaaaggccctcgggtggttgaaagcttgaccagattctaggaaccgaaacacatgcatgtttggggtttaatgatcaaggagccaaggagcactaaaaaatagagttggagagacatacagaggctagattaaggtattaggtcatatttaaggatttacaatgtatccctttttttttttttttttttttgagatggagtcttgctctgtctcccgggctggagtgcagtggcgccatcttggctcactgcaacctctgcctcccaggttccagcaattctcctgcctcagcctcctgagtagctggaattacagatgtgcaccaccacaccaggctaatttttgtatttttagtagagacggggtttcaccatgttggtcaggctggtctcgaactcctgacctcaggtgatctgcctcagcctcccaaagcactgggattacaggcgttagccaccatgcctggctaggatctacaatgtattctaagtacaaaagatatacagaagcctgaacatgatctgatgcgtgtttttagaagataatggacagaacagataggagaagaggaaaaagagagggaaaaaagcctgttgagaaactgccacagtgatgcaggagagaaaaagatggtctgggctgaggttcgctctcattttctttccttagattaaatctctccttttcaaagggcagatggatgcttagtaaaaacagatcagcaaacaattattcccatgtacccaagtataaataagactccatggattcctgctttgcataaaggtttgaaatattttattttattttttttttgagacggagtctggctctgtcactcaggctggagtgtagtggcgcgatcttggctgactgcaacctcagcctctcgggttccactgattctcctgcctgtctcccgagtagctgggactacaggcatgtgccaccacacctggctgatttcaagatttgaaatattttaaagattgatggtgtcctggtttgatcttgggttttggcaccaaaaaataaaattaaaaataaagattgatgtttaccactcatcttcaccaaccaacctacttcccctaaacctaaggtttcactgtagcaggaactaccatctgtggcatgagatcaactcaaccaattagtggctttcaagcctcttcaccttaagcagtatttgtcatctacaagttcccttgcaactggaatgggtggggtggaagatccaagaaaagcacagaattttctttttttgagacagggttttgctctgttgcccaggctagagtgcagtggcatcatcatggctgactgtagccttgaccttcctgggctcaagtgatcctcccagctcagcctcctgagtagccaggactgcaggctcatgccaccatgcccagctgattttttttttgagactgagtctcgctttgtcacccaagctggagtgcagtggcacgatcttggctcactgcaacctctgcctcctgggttcaagcaattctctgcctcagactcctgagtagctgggattacagacgcctgacaccacgcccaactaatttttgtagttttagtagagacggggtttcaccatcttgggacgggttggtcttgaactcctgacctcgtgattcacccgccttggcctcccaaagtgctgggattacaagcgtgagccactgcacccagcctgcccagtttttttttttttttttttgagacggagtctcactctgttgcccaggcgggagtggagtggcgcgatctcggctcacttcagcctccgtctcccgggttcaagcgattgctctgcctcagcttcccgggtagctgggactacaggcacgtgccaccatgcccggctaatttttgtatttttagtagagatggggtttcaccatattggccaggctggtctcaaactccaaactcctgaccttgtgatccgcctacctcagcctcccaaagtgctgggattacaggcatcaatcaccgtgcccggcctccagctaattttttttatagggacagtgtctctgttacctaggctctacagcacaggctggtcccaagtgattctcccatctcccactcctggccccaagtgatcctcccatctcagcctcccaaagtgttaggattacaggtgtgaagcactgtgcctggctcaggtacaacattttagatgcactcagtccgttaaggcttagtccaggtttgattgttattgtccttctgttgggccatagggcctgtactgtgaactaaaatgaacttcagtgttaagtaaggaagggatccttattagccttaaattcaattcccttatctcagtgtcttcaagtttctcacaactcttgagtatcgataaaatagtcttcacctaaaacatggttaacataattcagttgacatgcttaaatttctcttcaagagccagaggctgatggcaattgtgaaaaaarctctttattgttattgctaataaaaaaaaaagggccaatagtcaggtgtggtggcctgtacctcttgtccctgctactggggagactgaggtgggaggatggcttgagcccaggagatcaaggctgcagtgaggcatgattacaccgctgcactccagcctggacgacagggtgagattgtctcagaaaaataaagaaaaagggttatttcatattggttcaaaaatataggtagtatgaccccctgatgacttgaagacagagcaacagaaggaccttctttagtcatcattagcttagccaaaagaaaagtcagttacactcactgttgcataatcagttgtatggtcaactgtgcactaattcatttggtcacaaatatatacaatcaaattaaggttgaatgtaaatttaaactttacttttgctttcttctcccctcccccccagaaagatccatggtccaatataacatatcttcttcaagtatttatggggtaagaaacattttaaaaagttgttacattctttcctctatcttaatgatttaaatatgagcaagttcggtctatcaaggcaggctctgaatagctactatcgagaagtatttgaggagttcttgaatgccaaatcttcattgtctgctgactctgcagatttatcacgtgctgaaagcacaggttttccaactgtcaacgtctttacgaaattcacctgcttaggctttcgtggggtcggcctcttggagctgagaacacagcttctgcttacacctgtgtcctcaatgaagctagagattcctaagagaattctagaaaaagaggaggggggtagaaggcaagcaaggaacagtttctaagcttagggcctaaacctttgcatacaaggatcagctaccacgtttacagcggctttaagttacagccctcggtaggtgcagatcggcttcccaatgaaacctggctttcactttcatctctgttaagggttaccttttcaaaagaagccgcttttcctcctaccaatttcctaaagcgcccaccggcaacgcactaaacaaggagggcacagagcgggaaaaaggacacgtgtgatttccgaactcttcccggcgggctccgggccccggcaagcccagccccgcgggaggaaccaaggccgccacccccgagaggcagcccggcccgcgctcctcgcccacgtggccgccgcacgcgcccgctcaaagtccaagggcggcgatccggctctgggaccttggaccgagcgagctcccgccccgacggcgggagtcagaacggtggtggccagcagtccccgcccgcggctccgtgcacctccaccccggcccgcgcgccgcctcccgaaccaccgtggcagaggccgcaaggggaaccggaagccaaaatggcgacgccccgcccttttcctctcgcgagaggcggggaaggaaaaaaagttgtgcgagcgacggggacgtaaccaattagagtgccgggagcgcctgattggcggccctcccggcgcctgcaggccccgccccggctgcggaggctcagtcacagccctcccctcctcgctccctcccctcctctccccgcccagttcttctcttcccgtctgaggtggcggtcggtctcgccttgtcgccagctccattttcctctctttctcttcccctttccttcgcgcccaagagcgcctcccagcctcgtagggtggtcacggagcccctgcgccttttccttgctcgggtcctgcgtccgcgcctgcccygccatgaatgaggagtacgacgtgatcgtgctgggcaccggcctgacggtgggcgccagggctgaggggccggggctgagcagccggggcgggcgcacccccggctcctgcacggcccgcgggtcgcagctcctcgggggtctcgttctgccgtcagccgtagttttcgggacgggagtcgtggctaggggcgcgggcgggttcaggggcgccccgcgtcccggggcgagcgggcggctcccagtgtgaggggcaggcggggaaatggagatgcgggccgtgaggctcggggcggggtgacggccgagcccggcctctgcgcttgcccccagcggaagcggaggggaggggagaaggccgcccgggccaagggtcccgctccccggtttgggccggtgacctcgcccggttggaaaccagcacccgaggcggaggggacggtgcaggcctcgcggttgcatttcctattccgcctcggccgctgccccgggtcagtctggctgccaaagccgagtacggggtttcctgacaagtcttggataatcactgcttcggaactgctagggcttgattaacttatatttttggcgaaaacgtggaaattagtcttttaatcctttctcccccctgctaatgagaagtattattgaatccttttagccaccctcccttctcacttactgagcatctgtagaattggaattgagttttttcaaaacttgtccgtcaaatgctttcgcacctgaccttcgccgccttttccttttgtttggtgggttctctgcctcctttgtctcttctggactgttttcccctaagaattgggttggtgatggattgctaaaagccaagttctctgtactccgaagctttcttcagggagttggaagataataacatgaagaatgcattgtaatatatgaatgcaaggtgtacctaatatcatggtatattgattttcctggttatctgtttctaagggaactttaggtaatctgtagataacgcaggcaggttctgtagtttgtactttttctgttctttttttttttttttwaaatgttcatcttgcaaaagaattcactttggagaaaaccattttaactatcaatttttggggaaatttgaaattctaactttgggctgcttgatcataattaagatgaatactgatgtaaatcttgtgtatcctatgtactctgacttcaaattcctgagtcatttaatgtagacttccacttcaaattttttgaaatttattataatctctcagggtcaaaccaatttttttttttttttttacaggtaacatcccaaaataacacttttagatgtctctaggcaagagaaaaccttcgaacttttatttggctaattttttaggaaaggtttgtgaagaattagaatsgtgtttttctggtctgtcatttttctgtttatagttatatgcaattattrgagaatattcattctgaatacttcgttatgtttgaccaatccaggaataatcctgtgtctgtctttgaaaagctggaagactgttggatgcctaaatgaataggccctacccactgcaggttttgtgctttttttttttttttttaagtgcctaattgggattccaagctgagcttagtagtttgtggtggattttgcctgttggaatgggtagtgttgctgccagcgtgttttaagagccggttagttccaccgtttttctatggttgttgctggtctttcagatttgctcacaattgaggtcagttaagcatgcacgagtgagtgcaaatccaccatcatgcaggcttccacaagcctcgttcacatcactttgtatcaaagatggtgaaagtgtttttatataacaagttaagataatgagctttgtttaaattttcattcggattgtgaactctttgatgaatggtagatgcatacttaactagaaatcagacctgtttctgctgtcattttgtagctgtgataactttaatctctgtgagccttcctaagttttctgagatgttctttgataattatatcaattcaggacaatcacattattaccatcattgataggagtagtgatgacaggatgattttgataatgagaaatcatatatccttatttttagtgttaccaggaattagatgattaaaaattagaagaagagaaaaccaaagttagcactcagaattaacttttgaatgtctggagttaattaattttcttaaaatttactttagtgcctgagacttaagaacctaaaaaaaggcaagtactttcagtgttaggaacttgttacttttaaagaagtgtaaggaagtgctggagttgctgtgttgcttagtgctgccattgtttgtatgagttgttaagtctaagctcataatcacaaatattgatagttatcttaatcaagaagatacaaaacgatttggtataaaggagtaaaatcttcattctgtgtgtaaaagaaatggaatattccacacaattgaattttctgaggaactaaaggttatctctaaagagcacagcttttggataatgcctttctaaatgctgtcacaacttctttaacaaactaagaaacataatttacttgataaccaagttttcacatagtgaagattaactattgtgttatgctgtaacatggtgaagccatgaagaccccgccagctttgtaggaacttttgccccctttactctcaggctgctatgctttttgagctcttcagtttactcttcatattttttccctctatcttactttactgttaggctggcaacatttacttttctctgctttcagcatgtgtaggcagcctctcaccacataatttgcacatagttcactatggacttggaaataaattcacgagtcttgttagacatagtagattaaaacaataagagtaactagttccacagctgtttgtgcttcccagaggtttttttcttcccattttttgttctacacagtaagratttatgaatagaaatatatactttagtgatgtataccagatgattctcagcatcatrtgtttaaaaacttgctttacatcccagatacttttcctcatttctctttatcagaattttgtgatttcagattcagagaaggttttatacttgattttaaaattctgaactaaaattcagattgcctcttggatttgcttaatctttgatttgctctttgagagttcttgcttatagctgtgttagagttctgtagacaaaggactttctattcactacagtagtgagcataggatcaatatttgcaaatgctgttacacttgggagctgtgttgtaggcagtttaaaccagcgttaagcatcctggccaaaagaaaatataagtgaaattagacatattttagcatgtagagatgacaatagtgtgacattggtttttaaagaccactggtagatgttcacatgcgtgatacactgcaattacctctgtcttccctcccatggtacctgattggagactcttactggagtaatagtttcagtttcagttatttaaacccagtgactattgtgatcagttatgggcagtaaaaaggtaaacacagaacctgtctataagtagcttgttctcgtgttggagagtaactaataagaattagtatgagaaagcattaagtcccctaagaggtgcacttatatgagttcagtcagggaatcaggaaaaccttcgtaaagaaggagatatttagctggctttaaaaaaatattggcaaggtttgaatggaggaatgattttttaggcagagagcagtcagtgtaagtcaatgctaagtcaaggatgtatgtagggaatggggagtggtttgttttgcttgaaacagaagctttggagagagattctaggctaagaaatgtgaaaattatcttcaaggcagtgagagaggactttgagcaggagagtgatataattagccacatttcaagagaaggtatcttttgacagtttttttttttgtttttttttgagatggagtctcactctgttgcccaggctggagtacagtgatgtgatctcggctcacygcaacctctgcttcccaggttcaagcagttctcctgtctcagcctcccgggtagctgggattacaggtgcctgccaccatgcccagctaatatttgtatttttagtagagatggggtttcaccatattgatcaggctggtctcgaactcctaacctcaggtgatccacccgcctaggcctcccaaagtgctgggattataggcatgagccaccgcgcctggctgacagtttttaatgagatgcattagaggggcagagtcatttaaagaaacattcttcataaaacagccatttttattatgttgctgtaagatacttgccattgaaatgaactgatttaaaatttttctggttaatttctcatgtttctaggtaagtagttttgaaaaggcactttaatattagttattagatactttgtactcctgatcacatttgtgtgtgtgtgtgtgtgtgtgtatttgtagtttttttttttttttttttttaataacaacaatactttttatttctgagacagagctctctgttacccaggctggagtgcggtggttcaatctcagctcactacaacctctgcctccccggttcaagtaattctcctgcctcaggctcccaagtggttggaattacaggtgctcaccaccacgcccggctaatttttttgtatgtttagtagcratggggtttcaccatgttggccaggctggttttgaactcctgacctcaggtgatctgcctgcctcagcctcccaaagtgctgggattacaggcgagagccaccgcacccagcccataacagaactttaaaatgcagtaggatttgatagggtgtagaggattttttgtttgtttgtttttgagacagggtctcggtctcttacccaggctggagtgcagttgtgtgatcacagctcactgtagcctcaaccttccaggctcaaatgatcctcccacttcagcttcccaagttagctggaactacaggaggcatgtagtttgggtattttttgtagaaatggggttttgccatgttgtccaggctggtctcaaactcctgggctcaagcagttcttctgcctcgtcctcccaaagtgttaggattacaggcgtgagccaccttgcccagccagggtatagagtttagtttgtcactaggaaggtatatcaaaatattaataaattttggctctattcccttccaagtctaaattgctctgtaatcggggttggggagtgggcattaatttttcagcataccattgttactgsccgtggaaacaccatgtaggtgtaacaattcatatatagaaatttcattcagcctcttcaggtgctttgtctaatatatttgggtgttgtccaaatgagttattctgtttttgatgattgcaactctggtggtatgtgtagggtgctgaaggaagagaacgtcagtatcgctgatggttctgtcccccagccccacatccacatatctacacgtactagcactttggtgcaattaaatattaaaaaccattttggttggttacctgtttttatgtaggagaacgtcaagtgccaggtgggtggcagatgctagtgtcatacagaacttggattctgaagatggttttatagtcttagtgattttggatgtgaatatgtattcttatcctgcttaggtcatttgtaggtgagtttgaagttacagtgggtactcttacctgttacatttacaactcatgttggtgaatattcattcacatacaagtttcgtggttaaagttacttgatgtacatgatagatggaccagcttttctagtgtgaaaaagagaagcttagtttttatggctttaatgtgctttgcttgtgaatattgtgtattcatcagataggttgtagtagaatttaattttgagctggtaattttggaaaaatattaaaattttaggatcattaatatatactgtgcccagatatgactgataaattctatcaattaatgacttcacccatgttttaaaacaaagyttattatgtttgtgctattatatattcttttagcagtgtggaagcagtcttttataatagttgggtatagaggaactagtgggcctgcagattttttattagctttagttagctcttgtcatatttgctccaagtggtgcctttgaaggtagttgctgtcagctctttggactcggccacatctttaaattactgggccctttattttaggcctcagtgcttgctttacggccatagtccagtgggtcatgcttagtgtgaaaggttatatatagaagctgtgcaacactccaatttgcttgctgagattttgctttcaaaagtctgcagtctacttttgtcagctgggaatgtaactgtcttcctctgctgtgtcataacttatttttaagatagtaaatattttattttcatatgtggaactatatgttggtgctgctttaggttgttttcttcccccaccccccaaaagtaaattgttttagtcagtattagggttgatttttgtagttgttaaaataccttcatttccttttatgaagacataatgaagaaagtgaaaaggcaggccacagaatggaagaagataattgcagtacatgtaactaataaaggatttatatatagtatataaagtacttttataaagcagcgagaaaaagcccatttaaaaaatggggaaaaattttgaataggcacttatcataagtgccttatcacttagcttgatcatcagtaaacgtttttttgtttttttttttttaaattttcttttgtagagatgggggtctcactgtgttacctgggctggtgttgaactcttgggcttaagcgattctcccaccttggcctcccaaagggctgagattataggcatgagccaccatgcccggtccctaatcattaatcaactatttaaaaagtgttcaaccttatttgtcctcaggaaatgcaaattaaatcacttcttaactagaatggctaaaattaaaaaggcaacagtgtaagtggtcaaggatttgaaacagtggggactcactgcggacaaaagtgtaaattggtacaaccgtttttggaaagctgtttggtaatatctgttgaagttgaatgtatttatactcttcttgatatataacagaaatgcacacttagaagacacatgcgagaatgttgatagagcattatttgtaatagtgaaaaactggaaactatccaaatatccaccaggagtaaaatggagaagtaaattgtggtatagtcattcagtggaatcgtctacagctgtgttacccaaagtgtgctgcatagatcagctgcatctgcaacacctgagaatttaccagaaatgcggaagtttaggccccaactcggatattacacagaatcagaatctacagtttaacaggatctccaggttattcttatatataataaaatttgcaaacacagctttagtaattcttgaaattggtcctggaccagcatcatcagtatcacctcatcagcatcagtggtggctgacacctgtaatcccagcactttgggaggacaaggcaggaggattgcttgagcaaaccttgctttgcaaggccaaggctgggctacatagtgatatcctgttgctacaaaaaattaaaaaatttggcaggcgtgktggcacatgtctgtagttccagcttctcaggaggctgaggttagaggatctcttgagcctggaggttgaggctgcagtgagccatgatcacaccactgcactccaggctgggcaacggagtgagaccctgtctgcatcctgccaaccttttttttttttttttttttttaaagagcaaattctcagatccaacctcagacctactaactcagaagctctgtagatggggcctagcagtctgtgttttcaagccctccaggtgatttggatacaacctgaagtttggaaatctgggtagaatttacatttctaacaagttggcaggtgatgccaagtcaggaaccacactgagatgccctgcttgcagggttagccatacactctgaaaagctcccgatagtagccgggtgccatggctcacccctgtaatcacagcactttgggaggctgatgcgggtggatcatgaggtcaggagtttgagaccagcctgtccaagatggtgaaaccccatctgtactaaaaatacaaaaattagctgggcgtggtggcgcacacctgtagtcccagctacttgggaggccgaggcaggagaatcgcttgaacccaggaggcagaggttgtggtgagctgagatcgtgccattgcactccagcctgggcaacaagagagaaactctgtctttaataaaaaaaaaaaaaagctccagatagtaaatattttaggttatgtagacgttctggtctctgtcacagctgcccaactctgctgtggtactaggaaaacagccataaacagtatgtacatgaacagatatgggtatttaccaataaaacttcacagaaatagccttcaggctggatttgtctcatctctggggacctttgctctatagcaatgataataaatagaccatgcacaaaacatgaaagaatcttaaaacgtgttgcataatgtcagacgcagaaagttaatacacatgattagatttttagagttcagaagcgggcagaacaaatctttgctattagaaattatgagagtgctgggggatggtggtggttatgattggaatacggcatgagggccttctggagtgctcagaatgttttgtttcttgagctaaagaaagaatgattcaggctgggcgtagtggttcatgcctgtaatcccagcactttgggaggccaaggtgggcagatcacttgaggccaggagttcaagaccaacctggccaacacggtgaaaccccatctctactaaaaatacaaaaattagccaggcgtgatggtgcatgcctgtaatcccagttatttaggaggctgaggcaggagaatagcttgaacctgggaggtgaaggttgcattgagccaagatcgcgccactgcactccagtctgggcaacagggtgagactcctatctcaataaaaaaaaaaaagaaagaatgattcacactcctatagtgaaatttgaacctcatggtaagtaatttaagacatttaagaaatactaaatgaatagatacattatggaagaaaacttgaaatttgtgtgaattttaaaaatacgggtttcaaagtcaaatagacttgtagagaataagattgttctttgacatctagggtcctttggataaatttgagaaatattaaagatttataaagatacatggaatttcctttgtctctttaagaaataaagcactgatcactcaaaccctttttgagtgattatatgccccatctctgtgtttcttcacattaattgtattaattttttccctcttcttaatttggtttgtcttagtgtattcatgcttgctttatctttttcctgagagtggtcatttatacttttcggttgatggtcaatttattggtggttgtcctatatgctttgcttagggctctagttttcaaactttttagtctcaggatctgttcacgtgctaaaaaattcaggaccttgagcttttgtttataaaggttgtagctattgatatttatcatattagaaatggaggaataaataaatcactgacaaataataaaccgattacatgttaacatgtataacaattttaactgtatatgtactttttttttgttattgagataggatctcactttgtcacccaggctgaagtgcagtggccttatcacggctcactgcacctttgccctcatgggttcaagtaatcctcccacctctcagcctcttgagtagcagggactacaggtgctcaccaccacacccagctaatttttgtattttttgcagagatagggttttgccctgttgcccagactggtctccatccaactcctgggcttaagccatctgcctgagtatattttctaaaacaaaattgtgagaagactatcaatatttcacgttttctgcaaatcctttaatgtctggcttaataaaactgaattcacatacatgcttctgtgttcagttctgttgcgatatattgtctaggctgaagtatatgaaaacaggtctcacacagacatgtaattggaaaagggaggagtaatttaaatatagcctttcaggttattgtagatattctttggtttacacaaaagcacaagtggtagtttttaagagatagcagtatgaaatctgaagccacattaatgaatgttttatattctgatatattaacacccactgatctagcttgcactttgaattcctcttttttcctcctgtgtgattttgtaatttcattcacccgttatttggaaaacaaggtttactctgagtaaagtgggtcttaatgttgacatgtttcattttacattatcaaaacatcatatttgttagtattgtcactgataatgttagaaaagttcttcatatattggggaacctgacgtgtgcccatggtggtagttgtaagttttccataattcttttttttttttgagatggagtcttgctctgacaccaggctggagtgcagtggcgcgatctcggctcactgcagcctccaactccctggttcaagcgattctcctgcctcagcctcccgagtagctgggattacaggcatgcgccaccatgcccagctaagttttgtatttttagtagagrtggggtttcaccatgttggccaggatggtctcaatctcctgaccttgtgatccacccgcctcggcctctcaaagtgcttggattacaggtgtgagcagctgtgcccggccaagttttcggtaattctaattttcatttaaaatttgacttattggcagcacgtgtcagttattttcctttaggttttctttgagaaaatgtcaaatacctaaatctgaataatcatagtttgttggtcagttctttcaaataaaaatgattattcataaaaaaaagcggctagttcagcttacagatcagtggcacaggttttccctgagctgaagtgctgtctgtattcttcccattttttcacacacaatgtttaaaagatgactattgaagggtatatgtttattaaataactttattaattctttttgctactcagtcttgctctgtcacccaggctggagtgcagtggcgtggtctcagctcacagcagcctctgcctcctgggttcaagcagttctgcctcagcctcctgagttgctggaattacaggcatgcaccaccatgccctgctaatttttgtgtatttagtagagacagggtttcaccgtattgcccaggctggtctgaaattcctgggttcaagcattacacccacctcggcctcccgaagtgctgggattgcaggtgtgagccaccatgcctggccaataaagttactttttaatgcttttatcaaggacatccttttttttgttcttgagatggagtttagctcttgttgcccaggctggagtgcagtggtgtgatcttggttcaccacaacctctgcctcccaggttcaagcaattcacctgccttggcctcttgaatagctaggattacaggcatgtgccaccatgcccggctaattttgtatttttactagagatgtggtttctccatgttggtgaggctggtcttgctcttctgacctcaggtgatccacctcccctggcttcccaaagtgctggggattacaggcgtgagccactgtgcccaccctatcaaggacatccttaaatgaatgcctggcgatgaagactgtaatgatgactagtatagtttagagccctgtcttaatttgttttatccaccattgattttacatcatcagtggaagtgtcaacactgaaaaggtgactaggctgggcacgatggcttacgcctgtaatcccagcactttgggaggctgaggcgggaggatcacctgaggtcaggagttcaagaccagcctggccaacatggtgaaaccctgtctctgctaaaaatacaaaaaattagccgggtgtggtggcgggcacctgtaatcccacttactcaagaggctgaggcaggagaactgcttgaatccttggaggtagaggttgcaatgagctgagattgcgccattgcactcctgcctgggcaagaagagtgaaactctatctcaaaaaataaataaaaaaaaaaaattaaaaggtgactaatgtcttagtgttattatgaaacagttttaatcttgggatgcataggagcccacagaccacacctggacccctggtttcttaagggctttcttcataaattatgtcatgttgcatgaatataagtgtaattactaagagaatgtgtaatggcaggcttgaaaaaaatgatctgttttaaatatgctgtagaactttcttttcaaggtactatgctttttctataggaatgtatcctgtcaggtataatgtcagtgaatggcaagaaagttcttcatatggatcgaaacccttactacggaggagaragtgcatctataacaccattggaagatgtaagtgttagtcaaatttcataygcctctcacactttgtgagtatttcacytgtgaatctctaccttattccttagagatggtcttaattttgttttgttaaatggaatatctggagcactgtttttcaggagcttctggtttgaagctcatagaaatttacattttgacttttgttgctatgtggagcagttatctcttagcrttaacagagaatagtctaggaagggagggtagaggatcgtctgatgtgccagcgcaagtccagtgctttcctcatggctttatttattttctcagtccctcaaagattttttttttaatctccatttaacatagtctctgtggggttaaaatctgagatgggttgtaaacccaagttacatgactacaaagcttagttccttttgctatactgccttgtttcctactttttttgaacgtggacacatagcatttccacagtgtgttttaatatattgattgtttttctgcgtgaggtttgttgaacacctacgtatatggatatgatgtgtactgtgtcttatgggagatagatatcatcaatgactttaatcagtgacttattagacaatacttaccaaaaaggatttttttctatattcagtaatactgaaaagtttaaagaataatacgatgtataaaaaaatcttccatcagagttcagcagttaaagtttgctgtatttttttcatgtctctttttttgttactggttttgatccattgaaagtgataagacatcatgaggcttgagcaaaatatttcagcattcatctgctaagaataacattctcctgcataagcataataccattatatcatatccagaaccatattcaaatttcccagtggtcccagtaatctcttacgtagctgtttgtatttggtataattttctctttattctcttatttatttttctggagacagaatcttgctctgccgcccaggctggagtgcagtggcacagtctcgcctccctatggcttccaccttctgggttcaggtgattcttctgcctcagcctcccaagtagctgggattaaaggcgtgcaccaccatgcctggctaatttttgtatttttagtagagacggggttccaccatgatggccaggctggtctggaacccctgacctcatgtgatctgtctgccttggcctcccaaactgctgggattacaggcatgagccaccacgcccgagcgctttattctttgttgttgttgtttgtttttaagagacagggccttgccctgttgcccaggctgaagtgcagcagtgcgatcgtagcttgctgtagccttgaactcctggrctcaaacgatcctcctgtatcagcctcctaagtagcggggctaaagatgcataccacctgcctggcttattttattttttgtagagatggggtctctctgtgttgcccaggctggtctcaaactcctggcctcaagtgatcctcctaccttggtttcccaaagtgttgggattataggtgagagccaccatgcctgggcacctctttattttcttaatctacaaatctcctcacaatttttttcttttcttaattttgttttattttatttttatttttatttttttgagacagtcttgctctgttgtccaagctgatgtgtagtggtgcagtctcggctcactgcaacctccatctcttgggttcaagtgattttcatgctcagccttctgagtagctgggattacaggtgtggaccaccatgcctggctaattttttgtatttttagtagagatggggatttcttcttgttggccatgctggtctcgaactcctcaaatgatctgcctgccttggccttccaaagtgctgcggttacaggtgtgagcctctgtgcctggcctagtatatttcttagctgatcttcaatacaatgagtaagatttcttttcttttttttctccccagatgtattgagggagtcatgaattttttcttttttttttttttgagatggagtctttctctgtcacccaggctgcagtgcagtggcacgatcttagctcagtgcaacctccacctcctaggctcaaacgattctcgtgcctcagcctcccgagtagctggaattacaggcgtacatcatcacgtctggctaattttttgtatttctggtagaggtggggtttcaccatgttgatcaggctggtctcgatctcctggtctcaggtgatctgcctgccttggcctcacaaagtgctggaattacaggcatgagccaccgcacccagccagaatttttattgaataaatacttactaattttgcttattcttttccaccttagcagtaggattcatgagctcaagtgactgttctctaactttataagctttttgaaatctgagcttcatttcaattcatgtgaattataaattaatttgagtattcttaccacaaaacatcataaaagaacaaaaggacaattttggaggtgatggatatgattggtaccttatggtgatgttatgggtgtaccttgtgtctagactcaccaaaatgtatgcaggaagtaggcagttctttatgtatcagttatacctcagtaaagctcaaaaattataaatgaactagaactaattttaattatcttttctgattaggaagaatctaaggtttattttgaattccttacataatacaaaagcaaaattaagcctttgatagctttttatttgggagagaatgaatttagatgattgctatttgtcagtgacaccctagttctgcatatacagtccgtatagagaactatacagtgtcattgacaaataatcttgttttatttatttatttcttgagatggagtcttgctttgtcactcaggctggagtacagtggtgccatcccagctcactgcaacctccacctcccagattcatgtgattctcctgcctcagcctctcgagtagctgggcttacaggcacacaccacaccccgctaatttttttttttttttttttttttttgagatggagtctcactctgtcactaggctggagtgcagtcacgctatctcggctcactgcaacctctgcctcgcatgttgaaacgattctcctgcctcagcctcccgagtagctgggattacaggcatctgccaccatacctggctaatttttgtattttcagtagagatggggtttcaccatcttggcctggcttttcttgtactcctgacctcctgatccacccgcctcggcctcccaaagtgtttgggattacaggcatgagccaccatgcttggccaatttttgtatttttagtagagacggggtttcactatgttggtcaggctggtctcaaactcctgacctcaagggatccacccgcctcatggattacaaagtgctgggattacaggcatgagccattgcgtctggccttgttttatattctttcttttctgctagtgaaaaaccttacttctgccatatttgttaattttaacatttatgagtttagtaattaatttacatatatattggaccttgctaaaaattttatctgataaaagatgaaatgcccttatactttactagcatggtggtgtttagttatactaaaagcacttaataaaaaatatgtacatattgtaataaaaaattaaattttgttaacattatggctatgtttttccttgcttttagttatacaaaagatttaaaataccaggatcaccacccgagtcaatggggagaggaagagactggaatgttgacttgattcccaagttccttatggctaatggtaaagaatttctaacttaaatttatgacagtactttgattacaattttaatatcaaaactaacttttgacagagtactattctgggtatgaggaactggattttgttgaatgaaacagcatggtgagtaacatggtccattagatgtctggagtcaataagttaggaaaggaaggaaggggttgtgacttactagtaattggttctggagaaacaaatgatgctgtggcataatacataacaagattgtaagcctttggcacagacttacctgttgatgcttatgacagtcttaaataactgggccttttgaaacagcattattttaatgtttttctagtttgtagggttttaaaattttcacatttttttaattttagaggatctaagttttctttttctttttttttttttgagacggagtctcgctctgtcacccaggctggagtgcagtggcatgatcttggctcactacaacctccgccttctggttcaagcaattctcctgcctcagcctcccaagtagctgggattacaggtgcgtgccaccacgcccagctaatttttgtatttttagtacagacagggttttaccatgttggccaggctggtcttgaactcctgacatcaagtgacctgctcgcctcagcctcccaagtactgtgattacaggctaagtatttttttaaattgctgtaatattagtacttttttctgagatgacattgaaaaactaaatttttggttataggtctgtttgtgcacatgaaataaagcatctgctatcctttttccttgtttgagtttatattctattgtttgtttttattaattttttttagagacaggggtttcactctgtcacccaggctggagtgtagtaatgcaatcatagcttactgaagccttgacttctaggttcaagtgatcctctcacttcagtgtcccaccacacctgggtgttccaccacacctggctaatttttttgtgttatggtagagatgaggtctcactgtgttgtgtgggttggtcttggactcttgggctcaaacaatcctccctccttggcctcccaaagtgctgggattacaggtgtgagccacctgtgcctggccaataatactataattccaaacctcatatctctaataaatttttcattgcttttgcaaaagcaagttgatagaattattaacctttaagttgtaacattaaaaaaacctatgtattcaaccttgaataggaaaaaaagataaaaaataacaaaaacgtgtaatatgcagtgcaataagtttgcattctggttgtcctatttaaaatacagctttggaggttattttgggccaggcgcggtgcctcgtgcctataatcccagcacttgggaggccaaggtgggtggattgtttgagcttaggagtttgagaccagcctgggcaacrtggcaaaaccctgtctctacaaaacaatacaaaaaaaaattagccaggcatagtagtgccaggtactcaggagcgtcaggctggaagcttgcatgagcccaggaggctgaggttgcagtgagctcgtgattgtgccactgcactgtagcctgggcaacagagggagactgtgtctcaaaaaaaaattattttgttggagttattgaacatcgttagaaaaaattttagaagctgttagtattagtaartgttctttataatttatagacttaagttatagtttgaattatgtgacttttctaggtcagctggttaagatgctgctttatacagaggtaactcgctatctggattttaaagtgactgaagggagctttgtctataagggtggaaaaatctacaaggttccttccactgaagcagaagccctggcatctagtaagtagttttattttctctagtaactagttttattttctcagaataatgagattttatactggaaaagagtcttagagaggacccagtcaacaaatatttattgaatgtctatcatgtgccagacactgttctaggcagttgggaacacatcagtgaacaaaatgttcaaaaattcctacccgtttgaagcttagagtttaaatgatcatctatagatcatgtaccttgtggctggtggatctgagcttatctagggttaatagtgttcttttcacagtaattcataatagctatgctttctgttgagtatttcctgtgtctaaaggctctgtactgaacactccatattgttttcttatttgacttctgaaacatctctatgacatagggtctccattttataggtgatgaaactcaggcctaaaattgcatacgtaataagtagctgggataagtagctgggttggaagtgaaatgctggtagtgtggctccagagccctggtgcttaatcatgttactaagcttaccctacgctatattacccaacgtgccaacaggagaagtactcattctgatgatgctcatcttctaattggtcttgttagtaattcccaatatctttgattttaggaactcctggtgagttttatatatatatatatatatatatatatatatatatatatttwttttttttttttttcttttaaagacagagtctcgctctgtcacccaggctggagtgtgatggcgcgatctcagaggctcactgcaacctctacctcccaggttcaagcgattctcctgcctcagcctcctgagtagctgggactataggcatgtaccaacacgcccggctaatttttgtatttttagtagagatggtgtttcaccatgttggccaggctggtcttgaactcctgacctcaggtgtttcacctgccttggcctcccaaagtgctgagattacaggcatgagccaccgcgcccagccttggagtgatcttattctctgcccaacattatttcctctgttgcctcaccaaagagttctggttaacatttcctatttcagcgtctctcttaaatagcaaacagtccagaaaagacctttttgttcttcaagatgttttagtccttgtatggagcagtttggagaaggataaatttgtataactaagggtaggtgagggctctaggagcttagaagagggaaagtgctcataagttctctcataattattttggcatcagcgctgaaaagttttctcatctgtaaacctaatttgaattattttggcagtttcctctattaacttctgattaggggagaaaatattgggtataaaatattaaagacatagccagaaagtaaaaaatactgcaaagaatcagggctaggttaggactgataattggggaagggaaggaacagtttctcattcagttgcgggtagttagtagtgtaatcatgggttcgaaattattttaaatcttttaaatgactatgaaaatttaatccaaataaagtatcttcatagaagtaggagtttgagtttgaatagaatcctttttaacagtggtgtggtgtggtggctcacgcttgtgatcccattgctttgggaagccgtggtaggaggattgatttaggccaggagttgaagaccagcctgggcaacatagcaggaccctgtctcttcaaaaaataagaaaattagccagatgtggtggtacattactgtagtcccaggtattgtggaggctgaggcaggaggatcgcttgagtccaggaaatcaaagctgcagtgagctgtgattgcatcactgcgctccaacctgggtgacagagggggaccctgtctcaaaattttttttagataaaaataagaaatagaattttttttttttttttttttggacaaaggtcgtgggttctttcttttacattttctttcttggagctcttacttatattaaagcttcagttacctccttcatctaatagaaattatcgtttggcagttttattttctctgattttttcagatatataaaacatttacagagcttgaaagttaaaaggtatatttcgagtcttggtckcattcttacttttctacttccattctttctgacctgttaggtaatcattttctggcttatccttcttctgttttttttttttttgaataagcgcatatgcttctgtatatatttttaaggctaggtttattgaggtataatttatgtacagtagaaatcacttgttttagtaaacacttttatgcattttgaccaaatcactaccttatcagcatctccttatattaatggaaaggattttgaaatcttgagttgcaggcaagaaaattctaggcagaatgaaggaatggggtaaggaaaggtggagaggtggcaaagttcaagagatgggtggataagtaccagttgttttataattttaataagaactcagttttttgagcacttacatgctaggcatatatgtattaagtacttcatgtgtattatctaactttacatagttcttcactgcaatcgtgtgagatgcaggtgctattactattttttattttacagatgggaaagctgaggtataaaaggaaagcacaaagtagtatagctagtaactggtttggagccaggtctgtctgactttagaatcccacactcttaaccacaagaaatactatattcttacggtatataaagctattaatatattgctttttagatattttaacaatgattacataccttctaattcttttttttccaaagtaaatacttgagtctccttagttgtttctcatataatatgctatctagatctcttggccactccttggaaattctctaattagtcaagatcctatatataatatggcagccagaccagagacagtatcccagatgttttctgctcattcagtgtaaacaggactgtttttttctttgtcccccaggctagagtgcggtggcacaattttggctcactgcaacctctgtctcctgagttgaagcaattctcctgcctcagcctcctgaatagctgggattacaggcgcaygccaccacacctggcttattttttttttttttttctttttttttgagacggagtttcgctcttgttgcccaggctggagtgcaatggtgcgctcactgcaacctccgcctcctgggttcaagcaattctcctgtctcagcctcccgagtagttgggattacaggcatgcaccaccacgcctggctaattttgtatttttagtagagacggggtttctccatgttggtcaggctggtctcaaactcccgacctcagatgatccgtccgccttggcctcccaaagacctggggttacaggcgtgaaccactgtgcctggccataatttttgtatgttttagtagagaccgggtttcgccatgttggccaggctggtcttaaactcctagcctcaagtgatctgcccaccttggcctcccaaagtgctggggttacaggtgtgagccactgtgcccggccccagaacatttattattttatgtatttatttttttgaaacagggtctcactcttgctctggctggagtgcagtggcatgatcacggctcaatgtagccttgacctcctgggctcaagtgatcctcctgccttagcctcctgagtagctgggactatagggatacacatgcctataatggtgcaatttaaaaaattttttgtagaagtgaggtcttgctatgctgcccaggttggtcttgaactcccggactcaagcagttacctctcctcagcctcccaaaagaggcatatcccaccatgcatgcctatagtggtataattttttaaattttttgtataaatggggtcttgctataattgtctaggctggtcttgaattcctgggctcaagcagtcatctctcctcagtgtcccaaagtcttagcactacaggcgtgagccactgcacccagccaagaacatttataattcatgggaggaggtcaaaataccaacattaaaaagagtttggaagaagtgagttttaaccctcttagatcactttcagagattaagacttcaagacttttgacacttctgaaactactaatagcctgttgttgaatggaggccatacggataacataaatagctaagtagttgattaacatttattttgtatgtgatttttttttgttttttgagactgagctttgctcttgttgcccaggctggagttcaatggtgtaatcttggctcactgcaacttccacctcccaagttcaagcgattctcctgcctcagcctccccaagtatctgggataacaggcatgcaccaccacacctggctaattttttgtatttttaatagagatagggttttaccgtgttggtcaggctggtcttgaacttctgatttcaggtgatccacctgcctcgttctcccaacgtgctgggattacaggtgtgagccaccgcacctggccttgtgataatgtattatatactgtgttcttacaatcaagtaagctatagaaaagacagtgcccttaagaagatgataaggaagagaaagtacatttacagtaccatactggacttattggtaccaaaagtttaggttgtatgtgtatgagatgaattgtctgtctgaaatggcgggcaactgcagccgcagacctgaagtcagttggtacgtttcaaggaattcaactttttcttgtaatgtcatgactttgcttcttgggagcacttccagcatcagtggcattccctgtgggtcctacgttttactcagtgtttatggtgttgcactaaacacgatgaaaaatatgtgagaacaaggagagatcactttttactgtgacagataatttactggagaggtgaactgctcatgcagagatgattattgtcacatagagttttaagatattcaaacacttgagctcaccacattagcaacaaaaggtggctccagagttattacagtagtacagtatgtactgcagttaatcttacgcagttaagacttaatactacatctttctttgtttacagtggcaccgtgtatggtctgtgtttgtgtgcctaagttttgtgattaaattttaactttgaaatagaattgcatatatttatgatagtaaataatatctacatatattttagcattcatgacatacataacttttttctaatttttttggtatttctaggctatgcggttcatctgcaagttttttcaaattgtcacaaatctgctgggcatgttgctgtgcacctgtaatcctagccacttggtaggccaaggcaggaggattgcttgaacccaggcatttgaggctgtactgtgctatgttcacacctgggaatagtcactgcacctctagcctggacgatatatccttatatagcaagaccctatctcttaaaaaaaaaatcatttgkccggctactgtggctcatggctgtaatcctagcactttgggaggttgaggtgggtggatcacttgagcccgagagttcgagatcagcctgggcaacatagtaagacccctgtatctacaagaaatagaagaaaaattasctgaataccctgtagtcccagctactcaggaggctgatgcaggaagattgcttgagcccaggaagttggtggctgcagtgagcygtggttgcgccactgcactctagtctgggtgacagagatctcatctcaaaaaggaaaaaaaaaaaatcaagtaaaataaaacgtagaactgaaagaaaaaacaaacctggctgggcatagtggctcatgcctgtcatcccagcactttgggaggctgaggcaggcggatcacttgaggtcaggagtttgacaccagcctgtccaacatggtgaaaccccatctctactaaaaatacaaaaaaaaattagccaggtctgatggtgcatgcctttaatcctagctactcgggatgcttaggtgggagtattgcttgaacctcaggggcagaggttgcagtgagccgaaatcgcgccactgcgcactctagcctgggcgacagagtgagactccttttaaaaaaaaaaaaacatgcaaacctccaaaaattttttcagtacatttattgacaagaaaaaatctacatcaagcttgtcctgtctgtggcctatgggctgcatgtggtccagggtagctttgaatgcagcccaacagaaatttgttaactttcttaaaacatgagattttttttcacaatttttttaaagctcattagctatcgttagtgtattttatgtgtggcccaaggcaattctttttcttccaacgtggcccagggaagccaaaaaattggacacctctgatctacataaaaagtggcagttcagatgtgttattcaagggacaactgtaaatacagaaaggcatatcccatggtgatccattgctgtgggggaaagaggaaggagggagtgtgagaaggacgctttaaataaagtgatctgggaaggcatcagcatagataaatagtagttgtaaaaaattatctacctagtagggactaggtgcagtggctcacacctgtgattccacactttaggagcctgggagtttgagaccagcctgggcaacatggcgagaccttgtttctatggaaaaaaaaaaaacacagtaggaaacacgttattgatttgaactttttcaattaggagtttttcagaatgagcactgggtgtttgaagtatttgtaatacaattatatctggttctcatgctgttaacagctagtcattgagatcactatttggcgccatgcatagcaacatggaattaagggatggaaaaacagccaggacgtctctactgtgctgtgtaaaacaggagtggcactgatttctatccctctctgggtaaggatcaggtaatggaggaaaataaaggagaggaaagagaaggaaacatgatagatttttattttgattaaaacaaaagttggtaacagcaactcaggtttctattaaataaacaaaagttgggagatactccaaaataactgttagtaatagctttaagttctgacaggctgtgccgaccgraatatgatacctaagttttaagtgcattgaaatagtgattcatgtttccttttgcctgtcttatacccagctcttacaactacacttgtgtcttaagtatagtgctgatgtggtaataggatatttctattcagccttatgcctttactgtgtgtacattctgtccatttaaaaggctgaattgtaaatcttaattttaaaaaattaaatgtagtcagttgtcattaatagcctcatgtttcttttttttttttgagacggagtctcactcttgttgcccaggctggagtacaatggtgcaatctcggctcagtgcaatctctgactcctgggtttatcaagcgattctcctgctccagccttccaagtagttgggattacaggcgtgcgccaccacacccagctaattttgtatttttagtagagatggggtttcaccatgttggtcaggctggtcttgaactcctgacctcaagcgatccaccctcctcagccttccaaagtgctgggattataggcgtgagccactacgacctgaccagcctcatggttttaattttcagttttgttggctggaaaatgatcttggatgtaatattaaatctatcaaaacattaagctgtcaatagaaacatttgagagtttgtttttaaaactgtagttgtattttaaaaatagctgtacagcttaggaatggggggagaagggagataaaatcagaaaattttcttttttgttggctatttgtctatcatctatgattagttgaaatacagcctagtaataaaagctgaggatttataaagtggtaatttgtagcttcttcatctgttttttagtgtaaaatgcagcgaattggttgcttatgtaggacttcagtaaaataagtgactagcagcagtagcagcagcatcgaaattttatcgaggtcaatttgttcttgttatcttaagctgttatcattaagtgcccggttgtatcttagcatacagaggcggaaaagcaagagcattcagaatttaggcaattggctgagtgtagatcagagttgtcaaagggagactcttcagatgggtggcttcatggatacttgttcagagtcacatttaccttgtacctagtaagaaacataatttgacatttttcattcagttaagtagtagttttaattacttgtaattgtatggtagaattgaagactttataagtaacctgttataatcgtgtcagtttaaggtgttgtgaaactggaagccatgctgtccaaactcccatatcttaaattgcatcctgcattttaggcgcggtggctcatgcctgtaatctcagcactttgggaggccgtggtgggcggatcacctgaggtcaggagtttgagaccagcctaacatggtgaaaccttgtttctaccaaaagtacaaaaattagctgggcgtaatggcggttgcctataatcccagctactcgggaggctgagacaggagaatcgcttgaacacgggaggcagaggttgcagtgagctgagattgcgtcattgcactccagtctaggcgacagagcaagactctgtctcaaaaaaaaaaaaaaaaaaaaaaattgcatcctgcattccgcagttgataacaaggcatgtttaaactttgctctcatacttcgttctcctcaatgtctgattgtgagtgtgctttttgaaaaattcttttttatttaggcctaatgggattgtttgaaaaacgtcgcttcaggaaattcctagtgtatgttgccaacttcgatgaaaaagatccaagaacttttgaaggcattgatcctaagaagaccacratgcgagatgtgtataagaaatttgatttgggtcaagacgttatagattttactggtcatgctcttgcactttacagaactgatgagtaagtattttggtttttagatttgtatttttcttgaaattctcactaaatttcccaagtcttccaagtggaaattctaacaaaacaaatacttagccatattgcactatgaatgaagaggttctagttgaaattagtgttgggaccttttaagtgatttaaatataaaggtagtgggccaggtgtggtggctcacgcctgtgatcccagcactttgggaggccaagttgggtggatcatttgaggtcaggagttcaagaccagcctggccaacatggtgaaacccycyctctactaaaaatrcaaaaattagttgggcggtagtggtgcgtccctgtaattccagccacttgggaggctgaggcagaagaatcacttgagcctgggaggtggaagttgtggggagccgagattgcaccactgcactccagtctgggcgacagagtgagaccctgtctcaaaaaacaaaaaaacaaaaaagaagatagcggattgaaatcgcttcaaaaaaaattataaattgaacaccatgaatgaaaactaaagccctttcctaatactcatttcctttcttccagttacttagatcaaccgtgttatgaaaccattaatagaattaaactttacagtgaatctttggcaagatatggcaaaagcccatacctttatccactctatggccttggagaactgccccaaggatttgcaaggtaagagcctgtgtttaaaacctcagtgatycaaaacctcatcttcaacataatgtgtatatgagatatagtttaaataatgagatgagatcagtctatgagtaataagatgctttttrtttttattgaaataaaattaacatataatgatatgcacggatcttcagttaaaaaaaatccagttttatacaactgtagctgatgtgctcttgtaagtgccaactcctggctggaggccagccaatacaaaaccagcgcacttaacaaaaatacaaccaaggaccttcacagaatctacttcacacccctgttacctccaccagagtaagtgctggtatccacgcctgagagacctggagacagatcacatcacaggactctttgcagacactctccagtaccagcttagagcctgattatctccactgggcggctagatcragaagagaaataacaatcactgcagtttggctctcaggaagccccatccctaggggaaaggggagagcaccacatcaagggagcatccctgtgggacaaaagaatctgaacagcagcccttgagttccagatcttccctctgacatagtctatccagatgagaaggaactggaaaaacaactggggtaatatgacaaaacagggttctttgacactctgaaaaggtcacactagcttaccagcaatggatctaaaccaagacaaaaatctctgaattgccagaaaaagaattcacaaggtcattattacgccaatcaaggaggcacgagagaaaggtgaagtccaacttagcaaaacaaaaaaagtgatacaggatatgaatggaaaaatttccaggaaaatagcataaataaataatcacaacttctgaaaatcaagggacacacttagagacatgcaaaatgcactggaaagtctcagcaatagaattgaataagtagaagaaagaaatttcagagttcgaagacaaggcttttgaattagcccaatctgacaaagacaaaaaagaatttaaaaaaatgaacgcagcctccaataagtttgttaaacaaccaagcctaagaataattggtgttcccaaggaagaagaagaatctaaaagtttggaaaacaaatttgagggattaattgaggaaaacttccccggccttgctagagatctagacatccaaatacaagaagcttaaagaacacctgggaaattcatcacaaaaagatcatcacctaggcacatagtcatcaggttaactaaagtcaagatgaaggaaagaatcttaagagctgtgagtcaaaagcctcaggtaacctataaaggaaaacctatcagattaacagatttctcagcagaaactctaaaagctagaagggattgggatcctatcttgagcctccttaagttatcagccagtaattttgtatccagtgaaacagagcttcataaatgaaggaaagtagtctttttcacacaaacaagtgctgagagaatttgccactaccaagccagcactacaagaactgctaaaaggagctccaaatcttgaaacaaattctcaaaataccaaaattgtatctccttaaagcataaatcacacaggacctataaaacaataacacaatgaagaaaaaaaacaaggtgttcaggcaaacaaatagcacgatgaatagaatagtacctcaaatctcaatactaatgttgaatgtaaatggcctacatgctccactttaaagatacagaatagcagaatggataagaactcatcaaccaagtatctgctgtcttcaagagattcaccagacacaaaaggactcaaatttaaggtaaaggggtggaaaaatatatttcatgtaaatggacaccagaagcgagcagaagtagctattcttatattttttattttataactatatatattttaaaaaaaatcagtttgataaatttatagacctatccctgtcctgggtttaactaaaacctgagtgaaggtatagaacattttcctcaccccataaagttcccttgtgtcacctcataatgaatactgccccccatccccagcaaccacctctgtgatttctgtcactatagattacttttgcttgttttcaaagttcatgtaaaaggaataatacaatatgttctcatttgtgtctttttcattttttgagattcatccatattgatgcatgtgtcagtaattcttttttttggagatggagttccactcttgttgcccaggctggagtgctgtggtgcagtctcagctcactgcaacctccaccccctgggttccagtgattctcctgcctcagcctcccaaggagctgggattacaggcatgcaccaccayatccggctaattttttatatttagtagtgatggggtttcaccatgttggtcagtctggtcttgaactcctgacctcaagtgatccacccaccttggcctcccaatgtgctgggattacaggtgtgagccattgtgcctggccaattctttttttttaattgttgagtagaattcctttgtatgaattatatgagcatataattctccttttggtggacatctagttagttttcagtttttggctattatgaatgaaggcactgtgaaatttttatgtaaaacactttctgtggggatataggttttcatttccttttgggtaaatactgggagtgaaattgctgactaatgtggcagatagaagtctgaattcataagaaactgtaaaacagtgttctggagtggttgtgtcattgtgtatacactcagcagtgtatgagagttctcgttgctccacatccttgtcaacatttagtattgtaagtttttaattttaattgcccaagtgggtgtgaaatgctatctcattatggttttaatttgtatttcttgactcatgttgctcaccttttcatgagcttattgaccatttgtataattttgtgctgtgattgttcaagtcttttgcacatttctaaagattggattgtctttctgtttttgacttgtaggagatcttggtgtatgatggtggcaagtcttttgtcatatatgtattaagaatattttctcccagtttatggctggtcttttgataagcataagtgttaactttttttttgagatagagtcttgctctgttgcccaggctagactgcactggcatgatcttggctcactacaacctctgcctcccaggttcaagcaattctcatgcctcagcctcccgagtagctgggactacaggcatgtgccaccacgcctggctaatttttgtattttgggtagacggggttttgccgttattgaacaggctggtctctaactcctgacctcaagtgatccacctgccttggcttcccaaagtgctgggattacaggcaggagccacagtgcctggcctagaagtgttacattttgatgaagtccagtatatcaaagaaaaaatttttttaatgtttatagctttttgggtcctattttagaagtcttttttttttttttttttggagacagagtctgggtgttttgcccaggccggattgcagtggcactgtctcggctcactgcaagctctgcctcctgggttcacgccattctcctgcctcagcctcctgagtagctgggactacaggcgcctgccaccgcgcccggctaattttttgtatttttagtagagacggggtttcactgttagccrggatggtgtcgatctgctgacttcatgatccgcctgccttggcctcccaaagtgctgggattacaagcgtgagccactgcgcctggccctattttagaagtcttttacttgcccccaagggcacagaaatactctcctattgtctttttttttttttttttagaagttttataattttatctgtgcatttaaatctgattcatcttgagacagtgttggtgtgtgggatgaggtaagacttgaggttcttttttttttttacatacgaatatttagttgttttagctgcatttgttggaaagacttccttttctaggtagtcgtggtgcctttgtgggagatcagttggctacatatgagtttgttttgggactcagttttgtttcagtgatttgtatttcctatgccagtactacactgtctggataattatagttttatattaagtcttgaagtaggtgataacactttcgccaactttttcttcagaatttgttttgggtgttcgcatttccatatacgtttttaaaatcaggttgtcaatttctagaaaacatgcttgttgggattttgatattgagttaaatttgtagatgagtttggagaaaatgatcatcttaattatgctgagtctgccagtccataaatatgattgttctccatgtggttttcttctcagcagtgttttacagctttcactgtagagatctatcacatttttgttcaatctctttgtactgatgccgctgttaatgtattttgtattgatgctgctgttaatgaaattgtcttaattttatgttgaaattgtttgctgctggtatacagaaatgtaattgtatgttgacgttgtatcctatgatcttgtacttaagttttactagttcacttactagtttttctagttttatatatttcttagaattatccttctacacagtcatgtcatctgtgaataaagagattcttcttttataacttttatgtgtttttcccccacttacctttattgcacttgttaggacttcctgataatgtcgcagggatgagaatggacgtccttgctttgttcccagttttacggggaatctagtaaatattttactattaaatatgttttctatagttttttttttttttgtagatggttttgtcacattaagttcacttatatttatagtttggtctgtttttttgtttgtttgtttgtttgtttttttttttggagacacgatcttactctgtcacccatgctagagtgcagtggcatgatcttggctcattgcaacctctgcctcctgggctaaagggatcttcccatctcatcctcttgagtagtagggactacaggcatgcaccaccccacctggctaacttttgtattttggtagagatggagtctcaccatgttgcccaggctggtgttgaacttctgggcttaagtgagcatggtggctcatgcctgtaattgcagcactttgggagggtgaggtgggtggatcgcttgaagcccaggagttggagaccagcctaggcaacctggtgaaaccctgtctctagaaaaacacaaaaaattagctgggtgtggtgatgcatgcctgtagtcccagctattcgggaggctgagtgggaggatcccttgagcctgagaggttgagactgcagtgagccgtgatcataccactgcatttcagtgtgggtgacagagcaggaccctgtctcttacaaaaaaaaaaaaagcatcaaacttttttttttccccctctctgtgcttcatatcggagaatgcctgttcatgtggcttcaagtttactgaccttttctgctattttcaataggctgttaatctcattcagtgaattttaatttttttatactgtctagatctagagttctcattttctatagttttmttttttcttattttttttttttcgagacggagtcacccaggctgaagtgcagtggcgcgatctcagctcactgcaacctctgcctcccgggttcaagcgattctcctgcctcagcctcccaagtagctgggattacaggcacatgccaccacactcgggtgatttttgtatttttagtagagatggggtttcaccatgttggccaggatggtctcatctcctgaccttgtgatccgcccgcctcagcctcccaaactgctgctttacaggcatgagtcaccgttcccggcctatagttttcatttttgtgatattctctatttacttgactgttttgagtacatttataacaacatatttatccttgaatatgtatctttgaacaaggatatttgttctggaacatattcttgaacatataatatccttgaacgtatttataatagctgcttttaaactgcgtattttaacatttgggcatctgtttctgttgtttgtttttctgttttctttggatcacagttttctgtttcttcccatgtctagtaatgttggattgtatactggacacatgaattgatagtttgttgagatgccggattcttcctctgaaaagttggttttggtttgagtaggcagttacatttttttattgactgttcatcttgcatttgtggagactggattttacaccttgttaaagtgggtccttttagtttttccttttgttgtttgctgatttkttttaaatcacaatttattgatttcttacaatcaaatactgccaactagcattacttccactcatgcatcattaaaagcaaaggatatttcctccttggtatttttaaatggtacattatacaataaacaaagttagaacttaaaatgcacccttattaattatgtaaactggtaatttgtttaaaaaagcataactaataatttggttcctttcttcataaaatggaaatttaaatatttctcctgatagtcttgaggtgatcattagtagtgcaaagtgtggcacacacgtatagtttcatctagaaaggtgtgtctcttacacaacttatttaaacaaaatgcrcattaacaaaatgcrtatagtcaatgcatgaaagaaagcatgtttcaattacaaggcagcccctcgggccaccatattatttaagttttgcatgatcatttatggcattatagattaattatgcataacatacttttatacttttttttaaattatactttaagttctggggtacatgtgcagaacgtgcaggtttgttacataggtatacatgtgccatggtgttttgctgtgctcatcaacccatcatctacattaggtacttctagtgctatccctccctagcccccatcccctgacaggccccggtgtgtgatgttcctctccctgtgtccatgtgttgtcattgttcaactcccacttatgagtgagaacatgcggtatttggttttctgttcctgtgttagttaactgagaatgatggtttccagcttcatccatgtccctgcaaaggacatgaactcatccttttttatggctgcatagtattccatggtgtatatgtgccacattttctttatcccgtctaccattgatggatatttgggttggttccaagtctttgctattgtgaacagtgctgcagtaaacataagtgtgcatgtgtccttatagtagcatgatttataatcctttgggtatatacccagtaatgggattgctgggtcagatggtatttctggttctagatccttgaggaatcrccacactgtcttccacagtggttgaactaatttacactcccaccaacagcgtaaaagtattcctatttctccacatcctctccagcatctgctgtttcctggctttttaacgatcaccattccagctggcgtgagacggtttctcacatggttttgtggttttgatttgtatttctctaatgaccagtgatgatgagctttttttcatgtttcttggctgcataaatgttttcttttgagaaatgactgtgttgagatggagtctcactctgtcacccaggctggagttggaatggcatgatcttggctcactgcagcctccgcctcctgggttcaagcgattctctcacttcagcctcctgagtagctgggatttcaggcacctgccatcatgcccggctaatttttgtattttttgtggagatagtgtttcaccatgttggccaggctggtcttgaactcctgacctcaggtgatccacccgcctcggcctttcaaagtgctgggattacaggcatgagccaccgtgcctggcataacttttatgcattttaaccctgaagacaagacaagtaattgttgcttgaaaaaattattctatgtagccatttggtttgtatctggagaaactgaacctccatgaatttagtgtgtactaagttggaatcattagctcgagtcagtgaatcagatacatttcacagtgactgtttgccaagtcctggcaatgcctcttctcccacagtctgccagatgaagcatttccgggattacccttctatgtggttttcccttttaatttttttgctggattaactgttttcgcattatttcctcttctcccctcttctctggccttccattttaattattcataaatcctttcagaatatcctcagctccataaggggaagttctggagatggaaaatccaagggaggaagattggggattggaatgtccttggctttcctggtatttgctgcaaacttctgccaggttaaagaggctgtagcagtttctgaatgtggcggcaagctccataactctgacttttctacaaaatcagcatctacatccagctccttttctattggaccatttagaagtctgcccttttcagccttgagttgtttattttctttccttaatctttcattctcagccacaaggaattccacatgcctcttcaaatctgcttctctataattgttttatctttcgggcctttgcttctaatacatggctctgctggctcactcttttgctaaagtaaaaatagtagcgtgtctggatccctgtcaaagatcccttgaatctcaggcaggcatttctctgtgaaagggctgtgcttctgagaaagggggctctggctctctgcatcctcagcagagggtttgtgagatgggcagctacatcctgtgttctgctgggctttcagtcttttcacgctgggcccttttccacctgtcttggatgaggaggcgctgtttcctattcctttgcaattccagtgaaaaatgagcctgctcagactgtcagcttcacggcttctgaaggatatgccgcagcctttttgtgacaagaaatagcttctttgtagttgctgataaatggtctgttcatctgctctgttgatgagccaggttgagggatccattattttcatagactccggggtaagtggcagccttaggaaggggagcagtggcgcaggggaacatggaggggactgcagggaagcgcgatgcagccgcagggactgtggcccctctctgcgttcaagagccagcagcggggcgcagagggagcaacaamctcaccacttcctcctccagcactgctccacgggcctgccacctgcgctgctgctgctgccacgcacggtgccatgacgtcacacgcgcaagtggcctctgcttattcttaaacgttactcctctggagtaagcaagctcctttgaacatggcaattttaaacttcagacacattttttcttctgtccttcctctataatctctgctaacctctttgagcctttcagctgtttatttctggtggattccttcgcttttccctcctgtgtgagcacttctggaggtagttaaggatttgaagatattttatcatagatttgttggctccttcttttgaggctccctcttttgtgaaactttcccctacaattttcatctcctctggccgccccaaattctgtcacatctcaaatcaataggactgcaggcattgtgcttctgttgtagctgtaccatgttgcaaggactagggaagttgctgcctgaggggaaaaccatataaactacataaagctctcacccacttggttcctttcaagagtttcttcagtctctggtttttgctgctttaagtcattctccagtgctgcctttccccccactttattactatctttttttgagacagcattttgctttgttacccgggctggagtgcagtggtgtgatcacgacttactgcagcctcgacctctcaggctcaagtgatgctgccacttcagcattccgggtagctgggactacagatgagtgccaccatgcctggttaatttttctatttgttgtagaaacagggtttcagcatgttgccaaggctggtcttaaactcctgcgttcaagccatctgctggcctcggcttcccaaagtggtggcattaggcgtgaaccactgccttcagttccttctgatagtgttttaagtccatagttttatttatatgccagaggattagactaatatagctattactggtcaacccttcccttggccttgcccttgcccttgcccttccccttcccctgggtgtgaatccagagaaatggcagatttgcctctgatgtggatagtcccgcgactgcacaaggccattttagaacacacacacaaggaaaaacaggakaatagacagtgtggggttttgggaaagagccgattttagttgaagaagcagagtaaaacccagacatsgcatggctttaggctttagcctcaccacactcacgagcctcctgtccaggagggccattagtgtctcaggtctgctcagtgtggaccccgaagagccatccatcagggtgagcgaggagggataagctatggatgcagagccgctgcggccgagaggaactgttccggtgattggttagcaagcgggagagtggaaaggggagaagaaaaccgtgtatgggggttgaacgcctccagccaaagaaaatgaggtgtagaggtctcttactactagggaatgtatccgagtcacacagcaccaaatgtgttgctggtggaaggtagccgagtcacaggcaccaaaatatgttaccgtgctgagatgaatccgtacgggtctgcagcaacctcagttcttttctcctcagaagaaagaatgaccaaggggcataaggtagaaggagagactgaggcaagttttagagcaggagtggacgtttattgaaaagctttagggcaggaatgaaaggaaggaaagaaagtacacttggaggagggccgagtgggcagctcgaaagacaagtgcctggttagtgrttttttttgacttcgtatttataactgattatgtttgtgtttttgactctgttttcttgctttaatcacttctaagctgacatctttctagaaggaaattgaacaaatgtatattgtctgtaactcattaagatctaagaaaggggactttaggagttgaaacaactatatattattaattgggattttaaaaattttccaggctaagtgctatttatggaggtacctatatgctgaataaacccattgaagaaatcattgtacagaatggaaaagtaattggtgtaaaatctgaaggagaagtaagtagcttttaaaatgaaaaaaattactatgttcttgtgaagaaagttgtgtattctaaatattgattttggtgtggacactgatgcatatgatttctgtatgggaagttagtatttattgtgactaaggactaattacagttgctgtgctttgttttaaaagcatcttttttgttgtcagttgttgattattttaatattgaaatatgcattatgggtgagctctaaatagtaagtattctgtatttatagagtttgggttgtgcctgtctcccaaattttcattgaaattgaactgtacttgcaggccacctacacgggtggggttttgagcagcatttctcaaatgtgaattatatataaagcatcattaatctggttctagtgcatgttctaatcagtaggtctgagaaggctctgcattttcttgaaacctcttaggtgatgtggatgctactgaaaaaaaaaatcacaaggaaaaaaagatcgtttccctttatcaccatatgaattaattcttctgccatttgacactgttactatctgcaacagttcttgcagtagaggatgcacttcaaagtgcactgctttactgtctcactggaatwctaaaaatctaagctttatctttttaacattaagctgtgtgggaatgtagcaacctcctgggtggtggggtggggggcatcttcarttatttaggtctcactggaaagtttgagatcagagtttggtaggtggtgtaaggggacaatgagtaagggagagaaaatacaggactgacttggggcaaaaaacgcctgataataatttgtgaagcacattttcaaactcatttattccttacaaggatcctaagaggcgggtattatgtccaggttatacctggaggcttaaatgaagaaacatctacaagggcacacagtttaatgaatggctgaggtagaattggaattaaggtgttccgcacccacagccctcagtcgttatacacctgaggatgtaaattcctgtgctgggtgatgttagatttgtgtgttttatctactaaaatgttatttatttatttatttatttgagacatcaaatcgttttgctctgtcgccgaggctggagtgcagtggcgtgatctcagctcacttcaccctccaccttccaggttcaagtgattctcctacctcagcctcccgagtagctggaattacagatgcatgccaccatgcctggctaatttatgtatttttagtagagatggggtttcaccatgttggccaggctggtctcgaactcccggccccaagtgatccgcccgcctcagcctcccaaagtgttgggattacaggcatgagccactgtgcctggccttctagactgttacttaattgggtcttttgaacatatattttaggcaacttctttataaccctgtttcatcttgactgtcgtagtgtgattggcttatctgctttaaatgaagttacaaagcacaaaagaagtcatattttgtttgacatgtacattactaggttttgttaatgctaacttaattctcaggtatatcagcacaaatagcactgtttaccatccaggtccaacaaacttcactcagccacctttgtggggttggggtcatcagtatcactgtcttccatctccacatcgtgttccactggaagatcttcatcagggacagtaacactgcttgtactttcagcataatagttgtttaggagatagagataaatggtgtgtttttttttttcttctcagtcaccaggctggagtgcagtggcacgatcttggttactgcaacttctgccttccgggttcaagygattctcctgcctcagcctcccaagtagctgggactacaggcatgtgccaccatgcccagctaatttttgtatttttagtagagatggggtttcaccatgttggccaggctggtcttggtttcttgacctcgtgatctgcctgcctcggcctcccaaagtgctgggattacaggtgtgagccaccgcgctcggccagggataaatgttttaatctgtcttctgaaagttacttttattctgtatttttcttttgtttcattctttgtgtttctgaaacttcagggctttgatatgaaagggaaggaggctataatacatttatcttgcaattcaagtttttcttaggaagcatagccttaagatgataaggattttagtctatgtagagtacatttactgagcatttattttttgtcaggacacccacctataatgacagacttttttacaccatttcatttagttcactaatgtccaaccttttggcttccctgtgccacattggaagaggaagaattgtcttgggtcacacataaaatatgctaacagtaatgatagctggaaaaagggtctgtgcataatttcgtgatgtctgccaccacaaataagcaaaaatgtccttgcattcaaggggctggacgtggctgaattttagtactaacaacaatcctttgaggttaggtagagccaggatttgaaccctgatctgcccaattctaaaacttatacttctgaatactgtgcaacacagttttcctagtatttgaacaggatttacagttcatatatctgttcaaggagaaaatagtagggataattggcaaagctagtttcagtagttaccgacagtttaataattaccttgacttttatattcattagattatgaagataacagattatattcaagggaaaattacattaatatactgtttaaaacattatagacactgaatattagtctttttccctccattttttttttttgtgataaagtacccataaaatttaccatcttttttttttttttttttttttttgagacagtctcactttgttgcccaggctggagtgcagtggcgtgatcttggctcactgcaacctctgcctcctaggttcaagcaattctcctgcctcaacctcctgagtagctgggattacaggtgcccaccaccacacccagctaatttttgtatttttagtagagatggggtttcaccaggttggccaggctggtctcaaactcctgacctcaggtgatctgccygcctcggcctcccaaagtgctgggattacaggcgtcagccactgcgcccggccagaatttaccatcttaaccattgttaagtgtacagttcagtggtattaaatatattcacatcattatacaaccaccacaaccaccattcatctccataacacttttcctcttctttttttttgagatggagtctcactctgtcgcccaagctggagtgcagtggcatgatcttggctcactgcaatctctgcctcccgtattcaagtgattctcctgcctcagcctccccaggtagctgggattatagatgcataccaccacgcccggctagtttttgtatttttagtagagacagggtttccccatgttggccaggctggtcttgaactcctaacctcaaatgatccacccaccttggcctcccaaagtgctgggattttataggtgtgagccactgtgcccacactcacttttcctcttctaaaggaaactaccaattaagtaataactcctcgttctctgcttccagccactggcaagcaccattctactttctttctctatgattttaactactatattttatataaacggaataatatagtatttgccttcttgtgactagtttatttcacttagcatgatgtcyatggttcatctgtgttgtagcatgtgtcagaatttcctttttaaggctgaataatattccaatgtatggaaagatagaccatagtttgcttatccattcatcaatacctggattgcttccatgtttttgtgaatgtattgtgaataatgctactctgaaaatgggtgtacaaatgtctcatcaagaccatgcgtttagttcttttgggtgtgtacccagaagtggaattgctagatcatatggtaattctgtttttaatgtttgagaaactgccataccattttccatagtggctggaccattttacattcctgtcagtagtggacaagaagttccagtttctccatatccttgacacttaattttgttttgatagtagcaatcttaacggttgtgaggtagtagctcactgaagttatgattagtgatgttgaacatctttgcatgtgcttattggccacttacatatcttctttggaaaaatgtctattcaagtccttcgattttttttttttttttcttttgagacggagttttgctcattgcccagcctggagtgcaatggcgtgatctcggcttaccataacctccatctcccagattcaagcgattctcctgcctcagcctcccgagtagctgggactacaggcatgcgccaccgtgcccagctaattttgtatttttagtagagacgaggtatctccatgttggtcaggctggtctccaactcctgacctctggtgatccgcctgtcttggcctcccgaagtgctgggattacagacgtgagccaccgcgcccagccctttgatcatttttgaatcagggttttttttgttgttgttttaggagttcttgatgtattgtggatattaatcccttatttgcagatattttctctcattctgtgagttgcctcaactcttgattagtgtcttctgatgcaaaaatttctttattgtttttttaaaagagacagtgtcttgctgtgtgttgcccaagctggactcaaagtcttgggctcaagcaattctcctgcctcagcctcccaagtagctggggttacaggcacatgccaccatgcctggctatgcacaagatttttaaaattttcatgaaatcctgttttcatgaattctttcctttgttgcctgtgtcttyggttttagatacaaggaattactgccaactccaatgtcatgaagcttttgcactgttttctcctaagagttttatagttttagataccacatttaggtctttgttccatttttagtttttgtggatggtgtcaggtagggtccaacttcattcttttgcatgtggatagttttcccaggacggtttgttgaaatgactttttttcccctcattgaatggtctttgcaactttgtcaaaaatcactgtactgtggatgcgagggtttatttctggctctctcctcgtttcattggtccatacgtttgtcattatgccagtaccacactgaattgatcactgtagctttttagtgagtgagtcctccagctttgctgttcttcttttaagattgttttggttgttccagaattcaatcccttgggaaccaatatgaacttgaggatggtttttgatatcttaacaatactaagtcttccaaactatgaacatgggatgtgtttccctatatccttgtccgcttcagtgtcttcttaaatgctttgttatagattgctcgctgtaagcagctcatctgtgaccccagctacgtaaaagatcgggtagaaaaagtgggccaggtgatcagagttatttgcatcctcagccaccccatcaagaacaccaatgatgccaactcctgccagatcattattccacagaaccaagtcaatcgaaagtcaggtgaggtttgaagaccagcagatgttggtagaattttgtaagatataatttgctttgtgttttatcccaaattcctaattttgtatgctgtattagtgaacagaccttggtttacatatgggggaaaaaaatctttgtacctcctcctgctccggcagcattgtgtcaacgcggacagattcaactcggagccagccttggacttgtgtccatcacctgtagaatgaacagactgggcttggtgaaccctgcgtctcccagctctaactaacagtaggttcctgtggaggtttatgcttaatagttaactgacccgagtatattcttgagctaatgacatagctgcttctgtgtccttatttgtaatcctagtacctacatttgattctagcagtgtccacctttcatttctgtgatcaggacatggctctaaaattgcaagtcctaacttatttgtcttagccagttgtttgtaacccttcgatgttcccattttcctttcaactagaagccccaaatctttttatttatctaaaattcagcttaaaaagggtaatcaggctttatgggacaggtaagagctatctgtataatgattttttttcccccatataagaaatgaaatcatgggaggccaaggcaggaggcttgcttgaggccaggggttcaagaccagcctgggtaacatagtgagagctcgtctctacaaaaacaaaaaacaaacaaacaaaaatggctaggtgtggtggcacacacctgtagtcctagctacttgggaggctgcggtgggagaggatcacttgagctcaggagtttgaggttactgtaagctgtgattgcatccctgtctccaacctgggtgacagagccagactgttaaaacacaaaaaaaaaccaatcacaaaagatgatctgtagaacaaagggactggacttaatcttccacaaggttcccaggcgggtcctgggtccttgcaagtctgaaaagaataaaggaggtcccagagttttttttttttggcctttaaatgctctcctatccaaatgattttctatcctggaaatgacacagttaactggatgagtggtatacagaccaagtctaatcgagaattctatcgttatgccaactcaaaagtggtttatgtggattctgcagttttacattactgtaataagtaaatgaggacgtcagtactaagtacatcctttcttagccattcagaacctttctaaatgcaaggtccagaatggaagaatctcccagaatagttaatatggtttggcaggttttttagttaggtatgacagagctgttaagagatctcattccaaacttcagcagttcgctaccacttcaattcttaatctctagtaggttaaaagaaattcctattgttaaatatctgtgtacttyacatccaactctgtcaccatttagaacttaagtgtagaagatcttgcctrttgagagtaattttaactcacacctcatgacatatgggtgatacctgagtatgttgggtcccagatggagacacttgaggcagtgagctggtatcatttgtttctagatatctacgtctgcatgatctcctttgcgcacaatgtagcagcacaagggaagtacattgctatagttagtacaactgtggaaaccaaggagcctgagaaggaaatcagaccagctttggagctcttggaaccaattgaacagaagtgagttgtgttcttttatatctgccgagatgcaaactgaggcctttgattgtggctccatggtgggacgaatgtgagggcaaggcaggtagctgctggctgctctgtgggattcatctgtacctctcagttgacctcaggcagagccatggtcaggtgtgggaccagctcacctgactgaattctctctccctccagatttgttagcatcagtgacctcctggtaccaaaagacttgggaacagaaagccaggtgagtatggaagtgtgaaaggatatgggcaggtttcactggaagacatccctccatggtcttaagtcttcgtaatttttgttttcagatctttatttcccgcacatatgatgccacyactcattttgagacaacgtgtgatgacattaaaaacatctataagaggatgacaggatcagagtttgactttgaggaaatgaagcgcaagaagaatgacatctatggggaagactaacagcagtacatgttattatgtaattaggacacatttaaaatttggcaaataatgcatataatgaaatcaatattgtaaggcctgyttttgtaatgaaaatggagagaatgaagagcgctgtgccagtaaatactccccttcacctttctaattattaacttgttttcatggagtggctattcagcattggcagttaccacattctgttcaatttaaccaaactggcttttttttttttctagtgaagttaaacaaacattgggataccgacacagacaacttgagacagtttttttaatcttttaatcagtgtagctatgtgctgctgctgctcaagagctggatccatacaggttgtgtgycatctgtcctcttgaggttcaggagattctaaattgaatattccacggtttgggacagcatccggaagttttccctatgactttatrttttgtattatgtcaaatgttatggcagggcccaaatagcatagccacaagtttggtttatgtgggcataaaattctaaccaaaccccagacatagggagtcatttggagaaagcctgtatgtggtgttttaacctaataaagttgatgagagagaaggggagaggaagcgaacataaagcgggtcaagtgtagtgcatcttttgtatctcaggcgtggcttcttcagtggaccaagctgcaatgcagtattgacttgacagagcctctacttctgtctcaaaatggctccaaatgatttctgtactgcaaaataaagccaaattctggaaactactgcccggtgttggtttgtgtgtcctgattgcaagggtcacagctgccgtgcttcctttggtagcactggagtcaatgccagtcagaatgctcagcagcggaaagcgtgggtgtcttctgatctggaaggatcacagcaggtcctgtcgtctggcttccctgtgagtagacctcgagttttattcttgacacagtaccattactagacctatcatctttgtgcagaaaaaatagtgtttaatgattttgcttgtagcagcagttataagggagtaagtgaactgtcaggtagagtaggtgctttagtaaataatttttgtgtagttgaaatgataaagtgtttacatataaggccctttcccctgacagtgatgagcctcacggcagatgctgttgtttaccacagataaacactgactcttcagagtatgaaggagacagactaaggtagatgatgtgttaaaggaactagggtggtgatttagattgttattcatattgccaaaatgatggagcttctcgacttcagttgatgttttgggctggatcattctctgttgatagggttgattgtagcagcatccctggcctccacacactagatggcaacagcaccatcttggaatgacaaccaaaaatgtctccagatgttgagaaccactgctttacctgtatgataaaattatctgaagtcccagcaagcctttttctcttcccatgcaaaggcccaagctgggttagtaataagtgaaaaaagaaaaaccacgcatcttcatattcttcattcaacgtatttactgaataccttgtgtgccaggccagtggagacaaagatgataatggtagttactgggataactcagtttggtgaacacatgatgtggtttggttattagtagagttacagaaaaggtagcatggaaactgagatggcctcgtgggtgttggaaggcttttcagcaaggggaggtgaatgttattaggtccaacctgaaaggtgcatatttcaggcagatagataggtgtttggcatcttataactgctcactttccttttccttagtaatctgaaagtaattcactgtactgaatagttaatggttcccttaatagactcttgtccttggaaaaataaaatgaaatgactggggttctattagtaactgaaaaattgtcaacaattaaaactctaaaacctactcatgagaaaataaagctcttttgtttaggaataataaaagccgacttaatgacttctgaaagaagtaagtgtccctgtaaaggccaggtgaaactgccattctttaacctgttactcggtgtacttgactgcggaaagaacccagaaacagaacaggccaggcccaaaggatagaagtgtaggtttcctctggaagcttactgttctgctaaatgacctaaaaattgctagaacactccagataagtcaatttctgctataaaaatcattgcagaaagagattatttttagttgtctttatttaaaaaatgaaacacattagttacaaaaaccgttgctccaaatagataccgtgtatcttacaaatgttttttgcttggttttgagtgtttactgtagaaattttcaatatcataaataaatgattatttctttctcagaaagctgatttttgtagtgtagtatttacaaataccgtaagtgaaaaatgatagtttataaatttgtaccatttaggaaaaaatgttttatgtagtgttgtttgtgtaacagcaaataaaaccatttaagattatagtttttacaagggtggtaaaacctttaaaacagagcataatgtgcatcgtatgcctttctgacattagcatgcaaaaacaaagctatttgttaaaatagacttatttttgctccaactaagtaaacatgtaaaattatttttaataagctcaatagcttagaaggcatcttgtttaaaatgaaaataatttaaaacaatatctagcactgcaacccaaagctaacagacaactgcaatgccactgtgacatatttcagcaaaatataaaaaatgaaaactttccaagttgtagaacattggtttttcaaatgtaagactgttcacatgtgtattcacatgttcacaagttttccaaagggaaaatactaattttttattggcatcatccatatccaggcaggctgtagttgagtcacctgaagaaacacaaaattgataaagaacttcttaaaataatacgaacaagaaatattttataagcgggatgctctaatggggaaaacgcctatgcattctaaggttacattatgttctgtactgacgatccaagttaacagcaagtgaaaatgcacattagataaaataggtaattttagtagatggttacttcatttagtgataatttaggaattcctatttatgccaaatagcaattccacccctaaacaaacactttaaatttatagcatgaagtatgtaaacaacagtttcccaactgtttcccttagacacaaatgtcaatatttgccatcaacaactccaactcacatgggaaagttacataaaaagtgttcttaccaatagctactcctaaatggagctgctattttttctatgttttctataaagttatttacatctgtaacaaggattccaytattttcaaagacttctctggggatagtaggcttgtctgttaaaaaaaaaaaaaaaaaaaacttttggttaatataattaatgtacttttatataacaggacctggttttttattttaaaaaatctgtggaacttcctcgtgtgrggggtagggggagaaaaggtgttgggttccaaattaagaaaagatttgaagctttggaaatagatgcctccatcgggggtggtggttaaagtactgaaaaaaaatccctgaaaaatgataactatggttctttacgtaaatttttcttaacactttttttttttttttttaaagatagatagggtcttgttctgccacccagtacagtgcagtggtgtgatgacggctcactgcagcctcgagcaatccttctgccttaacccaagtagctaggactataggcacacatcaccacacctgccaacttctgtagagatgaggtctcgctaagttgcccaggctggcctcaaattcctgggctcagtgatccacctgcttcagcctcccaaagtgctggcattacaggcgtgagccactgtccctggctgccccacaaattttttaaaagcaacctctgcctccggggttcaagccattctcctgcctcggcctcccaagtagctgggactactggcatgaaccaccacacctgactaatttttgtatttttagtagagatggggtttcaccatgttggctaggctggtctctaactcctgacctcaagtgatccgcccgcctcggcctcccaaagtgctgggattacaggtgtgagccactgcacccagccccagtattgatttaaaaaataatacggtataactacttatactgtattgagtattataagtaatctagaactgacttacatacataggaggattgtgtagttacctgcaaatactacattttatataagggcttcagcttcagcagatttgggtgattctggtatccatgggatgccaagccatttagatacctgatactcttcatcaggtatctaactttgacattcctagagctgaccaattttggcattaactgagtaaaatgcgcctgtgaattacctgttaggaggacagcaaacctggcatcaatatgctgaatttgcaggtttagcaaacatttcagaatttctgcttttgttgatgatcgagagtcacactggtgataatgaagcaattcaatgatatttgcactctgaaatgacttcaacattatgttcttcttatgtgcagttgaatccactctgtgaaagatacataggcatattaaaatatttttcagttttattcttaggactttttcttgccttcagtttaaccattcaaactcatgagttcctctgcctttcttcttgacgttctttttcatgacacactttggttacctcaaaacatcacaattgtacctactccttttgtaaatgtggattttaaacatgggcctcattctaagagggacatcatgcatctacctacgaccaatcaagccatgtggcttggcaagcctttcatgaatttcgagtgggccttattgcgttgtatatttgtagagcaatgcacatctatacttctcataccttgtgggcagataatcgccaacttcattaaaattaggtagcagccagaattttcttggtttcttgcttccctgaaaattctatcactactaggaaaatgtgttaactcagtatgtttaaatttttagcatttctgtctctgctcgactcccgtctctctagttttcatcacttacattctcatgcttgttggagaaaacccaaatcacacccattcccataaccctagtgataatcactcttaacatcatgaattaatttcctttcactttttcctgtataaattttttatgacatcatactgaacatagttacatgataccaacttttatgccatccctctttctatgaatagaaactttttacatgcttctattgtgtaagttttgggtgggcattattttgtataaactttaaaatatttaactgtagtctgcatatctccctcctagagatggaactgaggttggttttgcaatgactgataaccacctagaattttgggtaaattccacaaaaggtcaaaggatatgaagagttttctaatgagttctcaataatacataacgcctgttacataatgccagagtggtataatatgaagagcatactgcagcgccaacagcagtgagtacgggcatgtaccacataatgatgtttcagtcaatgacggaccacatatacaatggtggtcccataaaattatactactgtaatttactgaaccttttttgtgtttagacacacagataccaccattgcattaaatctgcctacagtattcagtacagtcacatgtacaggtttgcaatctaggagtaggctctaccatatcagtttgtgtaagtacactctatgtctgcacatagacaaaatcgtcttatgacgtttctcaggctgtatccccgtcgttaagtgacatgactttctctacccaaagccctagaagtgctagattgatttatgcttattttataggtgtgctgtggtacatcagaaccttaaatgtgcttctctacttaccgaagttgacgtttttcccctcaagtgctggttactgaagtccgctgtgaatggtcatacccttgacctgctgaagcctttgcaccctcctttcctgccaaggaaacctctgtgctccttctctcctttgctagctccacttcaagagaaaagctttctgagattctgttcctcaaaggtcacatacagctaacagtcgtttcgtctttctgggattgaaacccagcttcataacttactacttgtttgaccttggtcatgtttgttatctactctgcttcagttctgcattataaaagtgaggatttgctatctagctcctggggatgaagtctgaatgaaaatggatgcacctaacagtgcctgaaatccttatttcacaagggcttgtcaggtctgcttttccaattggtcctgcttgtgagaatgtggaggaatctctcagccccagctctcttcagccaaggaatcaaacatgtatttttttcttttataaattacagctttagacttagtgaagtttgcgtatttataagcctcttcttttagggtacaactgaattaaggatagattatggtcttaatttttccattctccttaaagtggtggcaacttataagtatccaaaaaagcattaatggtacaagttccatatattttttaaagtttgtagtagtagggcttaaatagaatatggacatttcatgactgct

SEQ ID NO: 6834 - DNA, 50529 bp, Homo sapiens
  misc_feature (1)...(50529): n = A,T,C or G, or insertion/deletion polymorphism (see Tables 1-2)
gagcgagactctgtctcaaataataataataataatattccatattctattgtatggatagaccacattttgtgtatccattcaccagctgacggatatttggattgtttcttctttttagctattatgaataatgttgctaaggagatttgtgtacaagtgtttgtgtggacatatgttttcagttttcttgggtataaacctaggagtggaattactgggtcatgcggtaactctacacttaactttttgtggaactgccaattttccaaagtggctgcaccattttactaaaggctaaatttttttttttttgagatggagtctcactctgtcgcccaggctggagtgcggtggtgcgatctcagctcactgcaaactccgcctcctgggttcacgccattctcgcgcctcagcctcccaagtagctgggactacaggtgcccgccaccatgccaggctaattttttgtatttttagtacagatggggtttcaccgtgttagccaggatggtctcgatctcctgacctcgtgatctgcctgtctcagcctcccaaagtgctgggattacaggcgtgagccaccgtgcccggccccctaaaggctaaattttaataatcattacaatcttcaggatctgactcttgcttcccatctctttccctgtcttttaccacaagcagtagctccaccagtaaataccactcatagctttctcatgcacaccatgctgtttcttgactctaggcctttatttctgcttcaactgcctggaaaacctgctagcctccactcccttaagacaactcagtggtcacctcttctctaaagcccttctcgtccccattcctgcttcctcaggaaaagataggtgtctcttcctctccacacctatacacatagctattaacaaactttaaatgtcatgacatactggatttcataactatgcttcttcatctgcctcttgcactgggtggaattcttttttccttttttttttttttaaaggcaggatcttgctatgttgcccaggctagaatgtagtggcctgatctcagctcactgccacctccacctgctgggctcaagccatcctcccccctcagcctcctgagtagctggaattacaggcatgtgccatcatgcccagctaatttgttttttgtatttttttagtagagatggggtttcaccactttggccaagctggtcttgaactcctgacctcaagtgatctgctcgcctcggcctcccaaagtgctgggattacaagcatgagccactgctcctggcctcaagagctcattctaatgccatcttttcaacaaataccttttctgatcatccccctcagcaaaaaaaaaaaagaaaaaaaaacctctcatgggactcgctttcattatcatatttaaatttacattttgtttacatacacatctcttctttttttcttttttccagtcttacccctgtataaactggatgaagctgctgccaatttaaccaagtgggaatcccagtgctaattgtctgctggatgggatatctttattggagcagattaacatagcctcaaatttgtggtttgtgaccactgatttagcaaatacattgtttttcttttttctttttctttttcttttgagacagggtcttgctttgttgcctaggctgaagtgcagtgtcacaagctcagctcactgcagcctcgacccccaaggctcaagcaatccttccacccagcctccacagcagctgggactacaggcacatgccaccaacgcctggctaatttttttttttttttttttgtggagacagcatttcaccatgttgcccaggctgatctcgaattcctgggctcagctgatcctctcgcctcaacctcccaaagtgttgggattacaggtgtgagccactgcacctggcgaacatccttttcttttttgtttttttcctttgagacagagtttcgctcttggtgcccaggctggagtacaatggcacgatcttggctcactgcaacctccacctcccgagttcaagcgattctcctgcctcagcctcctgagtaggtgggattacaggcatgtgccaccaggcccagctaattttgtatttttagtagtcagggtttctccatgttggtcaggctggtctcgaactcctgacctcaggtgatccgcccaccttggccccccaaagtgctgggattacaggcctgagccagcatgcccaaccaacattcttttctaaagcatgttggtcagaagcagtccaccacggaggggatgaacaacagtatacagtcatggtctttcatcagggctatgttaattctgttctctgtcacgatgtaatctaaaaaatgtggaccatttgcacattctgcagagtatcacattggtccaccatcttgtaactttacatccttcagacgtctttttttttttttttttcttttttttaaagacagagtctccctctgttgcccaggctgaagtgcatggtgcaatctcagctcactgcaacctctctgtctcccggattcaagcgattctcctgcctcagcctcccgagtagctgggattacaggcacacaccactatacctggctaatttttttgtatttttagtacagacgaggtttcaccatgttggccaggatggtcttgatctcctgacctcgtgatccgcccacctaggccttccaaagtgctgggattacaggtgtgagccaccggacatcttttaagtagaatgaagactacttagaggtaggaaccaaccctaccttggtgatttttgttcctccaaatatctttgcacataataattcaatatttattcaaagaaaacgttatatactgtttcataccacaaacaagattgttctgtccttgaaaacaaaaccttttgtatctttgaatcaggaaatattctataaatgcctattgacctactaatttcctcttccctaacaatcagatactctaccaggatatgtagatatcttcttcagggcaccttgcacttagcagagtcccaaatattttattttctccactctagcaccaccaaatcatgtaaagtatacagccactcacatttcacatcaacctctccattcttatgcatagctccttccagccacccctctgaaaactgactctcctaaacatttccgtaagacccaggatcatgttttcatatatacccatcaatccatttatccaaaacccacttgtaatttaacaagtgctttttatttttattgaagatggggtcttgctatgttcctaaggctggcctccaactcctggtttcaaaggatcctcccacctcagcctgcagagtagctgggattataagtgtgctccaaccaccatgccccgcaacaagtatttattaatctaacttcacttttatggagtttttgttttttaaaatatagagatggggtcttgctatgttgcccaggctggtcttgaactcctggcttcaagcaatcctcatgccttggcctcccaaagtgttgggcttacaggtgtgagccactgcacccagccctaacttcactttttttttttttttttttttgagacagtctcaccccagttgctcaggctggaatgcagtggcatgatctcagctcactgcagcctcaaactcctgggctcaggtgatcttcccacctcagcctcttgtgtagctgggactgcaggcacgcagaaccatgagtagctggaactacaggcatgcagaaccatgcccagctaagttgttttttttttttttttttttgagacagagtcttgctctgttgctcaggctggagtgcagtggcacgatctcggctcactgcaagctccacctcccaggttcaagtgattctcctgcctcagacacctgagtagctgggactacaggcgtccgccaccactcctggctaatttttttgtttgtttgtttttgtattttcagtagagacagggctgtgttagccaggatagtctcgatctcctgagctcgtggtccgcccccctccgcctcccaaggtgctgggattacaggcaggagccaccgcacccagccactttatttttagtagagacggagtttcaccatgtcgcccagaccagtctcaaattcctgtctccaagcaatcctcccacctcagcctcccaaaatgctgggattacatgtgggcaccattctgcccagctgtaatttttaaaaattattattaaaaaagaacaaaacacatagatgccctagactcaactcagctctactgatcaatctttaggggttaggactaggcttttgaaatgttaaaacacccagaaaactgatgaccagtcaggcttagtatcccccatctctaccattcatatggtacttaatgtttcatatttaaatggaaaggacacctcacacttttttgtttttcctatagttcctactcagagaatatgcctaataaatattttatgagagtagtacagaagtatgactccatttttctcttatatttcatttcagtgtggaaggctctttagaaacactattaacataacagcattatgtcaaaaagcgccaataacattctcaccaacttttctttttaaaggcattaggtatagctagactgtaaaaggcaagtggtgtgaagcccaaacctaagatcctaagatctaggatgagtcaagacttcatagtctacatgagtagaggcagcatctagaggaaaacaaaagtatgtggctatcaaattccaaagaagccccattttattacagagaaaatacaaagccgtttcctcacagggaaaagtacagtttcccttctccagggtgacagatgagccttttccgaagttctcagctttctcttctatcgaaacttcccatgtcggttaaagtgtttgtagagatagcggatgcgtttattaaggttgtgcaggtcatcagcgaacattctacttccaaccattttcctctttcggatacaacgttgcaattcattccctttccaacctcgaagccatatgggccccctgatcagttctttggggtgcttttcaaagtttcctgtgtaatgtgagagaacacattagatccaagacaagagaactcatcctacaccagctaagctttcaacccacggttgcatcttgctgagcagcacctatagacaaggcacattacagtacagaacaatagcacagactctggagccagactgcttggggttaaaattctgatgctgccatttattaactctggaaaaattgtttatttttacttatgaagtaaaaattatacgaggggactcagaacagtgccaaacacaatgtaaacagctacataagtgtttgctcttactattgagcacagtaccactctctacacaggaggaaaagatagtcgttacagcctaattgccattctgaaattgtgtaccacgtcgaaggtcaagtcttacccaggatcccgatgttgtcatacactccgaacatggcccttttctcgttccaacgatcaaccactttggggggcgggagagtgagccttataccgatcaatctaggcacacctggggatggggaagggagggaattaatctgagccgcctattatactacgaagcagttatcggggtgcctacatcagccacttaccaagagagaagcttctgcacgccagaggcacccagtcccacaggcgcctacctgccccggataagaggttccctgccatttctctagtctccccccttcaacagcacaccaaataagcccaagaagatgacaggaaccgtccccgccaacttcacacgagtactaaggcgaagacagccatcttgggccttacccaggtagctgtgggcacaccgcccacctacgccccatccgcaacagccacaagccccgccccccgggttccggcaggaggggcctctaccacccttcccgcctcagtgcttccggtccgcctgccggaagttttggagcgccggacaagctgaggtccgcgactcgtcgctaagattccccaaaactgagatttcaagaaaattcaccctttccgctttctttggcgcccttcaaccgtgaaggaaatgaaggttgagaacctggaacccgcttccaatgaccaagccctttctctgtgcctcacaacagtcttgcgctgtagctgtttttattacccctattttactactggggaggagatttgaggtcctgaaagtgaagtgacttgctggacgtcacttagcagaggagatggcgaaacctggattagaggcgatgccttctaactcccagcgtggacttgcctcctttcctgggggtgactgaatgcccagccagggacgcgacgtctctggccagcagaaatacggcctcctccccgccgactgggcaaagggggaccttgcggccaaggagggattcgcaggcgggccgggggtgggagcgggggccggagccggagccttggcccgcccccgggcggcgctgtgattggccggccgctccggcgggcgtcgcgattggccgtcctgcagccgttgagatttgaactcggtatttgtggctttgcccgcgcgttgccagactcagaggcggccctttgcctctgcctgccggggattggccggattctccgccgacttgaaaactgccttgctaattggtgcgtgttgtgcacgcgtgttttttccttttcatttcagcctgactgccggaatcagagccgcgggtgagatccccaggtaagatgtggtgttgcaggtcgtaaaagagtaggaaagtcgagtacatggcagtgtgacccagtcttgggcaaaatacaataggcctagtaggtatatccctggggcgcgatgtgtgagaaactgtaagtctgacagatccgcaacggaagwtgttaagcaaatcgcttaacagatccgcaacggaagatgttaagcaaatcgcttaactttcttacttcaatttccgctctgtaaactcatttgtattattatgcacctcatgggattgaggttaggatacttagatcagatatgatacatgcaaacagcctaacagacttggcacaggataaataaatcatcattgttaatgctcttaccattctggtgcaggaagcccactagcccatgctggggcactgttttggcctcagacgagatcagaccattctctctatacttaaggagctttgcacataaaaatggaaataatagtactttgcacattaatatgccactttatagttctttaaacaccttcgtactgcttgatttgtttgatcatcagagcaactttatgaagtaatcagagtttagtaaccctgtttttacagataaagcccagaggtttaagtgtcaagaccaagtgccaaagtcactactagaattagtttctagtccagggtcaatctcagatcccgtaagataatgttactagcttgctataaaactaaaarccattatatatgttgggggtggggaactaacaaaaccagatgatgttactagcttgctataaaactaaaagccattatatatgttggggatgggaaagtaatagaaccrgatacgaagacaggtcttgaatatagaccctgactttttcactgtttggtttctagccctgtgagcctgtaggagtagaatggctccccaaatgtatgagttccatctgccattatccccagaggagttgttgaaaagtggaggggtgaatcagtatgttgtgcaagaggtactgtccatcaaacatcttccaccacagcttagaggtaagagtccatagctgtcactgkacytagctctttcaaaggaccatctcacatggaattgctacattgtcatttctgttccactacaccaggaagcatcataagagcaagaaacatgtttttcctattttgctgttttatcctaaaattgcatgggatgcatgacccaaagagtacattcattaacttccttttctggattagtcaaaaacagtcttggtgtatgtgattactctttggggaaaagttattttccatctttaccccttactgtgtgtcaaaattaagtcctggtggatttaagagttataggagtggatcgctttttcagaatgtctcggacttaactcgacctgtttttggtaatacctttttggagtctttttggatgtgcaattatggggacaaaaacccataatatatatgtaccactgcaacactgagcaatatatgtacagtgcagtcacctactgaaacctgtaaatgatcaaaagcaccttttgcattaccagaaagacttcataatgtccttgtacttgttgggagcggtcttgtagcagttagcttgctttggagaggtatagagattaaagactggagccaggctgcctggatttgaatcctggttctaccactctgaccttagacaagttacttaattgtctcagtgccttggtttcgtcatctgtaaatatagagataataaccaattcatttgttatcacctacaagaagaagggttggttaatgcagcagctcgacaatatggtcctagcttgtctcctcttggcttttctttcatggttgctagatcgcaacttctttttgtttttcttttttttttttttttgagacagggtctcactctgttgcccagactggagtgcagtgatgcgatatcggctcaccacaacctctgcctccccaggctcaagcgattctcctgcttcagcctcccaagtagctaggattacaggtgcacgccactaccgcctggctaatttttgtatttttagtagagacgggatttcaccatgttggccaggctggtcttgaactcctgacctcacatgatccacccaccttggcctcccaaagtgttaggattataggcgtgagccactgcaccagtctagatggcagcttcttgctctaatgtccagaagtggaaaaaggaattttctttttgtactttttattctttattttattttgaaagacaaggtaaagactctcttgcccaggctggagtccagtggcatgaacacggctcactgcagcctcaacttcccagactcaagcaatcctctcacctcagcctcccaagcagctgggatcacagacatgcaccaccatacctggctaatttttaaattttctgtagaaacagtgtctccctatgttgcccaggctggtctcgaacttctgggctcaagcagtcttcccgcctcagcctcccaaagtgctgggattgcaggctggaatgcagtggcctgatcacagctcactgcagcctcaatctaccaggctcaagcagtcctcccacctcagcctcccaagtagctgggaccacagacatgtaccaaagtgctgggattgtaggcatgaggcaccatgctcrgccagacttttttgttaaaaactaaaacacctacacacattagcctaggcctacacagggtcaaggtcaccaagaagtcactagacgatgggaatttttcagctgtattatatttttatgacaccactgtcgcatatgtggtctattgtttaccaaaatgttacagggcacaggactgtacaggtaagagaaatagaattacccagactggtttaactgatcaagcttattacctaggagcctccctaaacttgagcatatcaaccatttggtaagcaaggaagaaggcagagtgtggaggttgcctaatggatggcaaaccaacagtgtccacaggtatactattctgtccatatcatgtggatatatgtgtcaccaattgaacatgctgcatactatgacaaactactcttcacttattataatgatgcatcatttttttaaatggtcaccttttttttttttaagttctggagtacacgtacaggatgtgcaagtttgttacataggtaaacgtgctgtgttggtttgctgcacctatcaacccatcacctgggtattaagcccagcatgtattagctatttttttcttatgctccccctccccccattccaccctctaacaggctccattgtgttgttcccctccctgtgtccatgtgatctcattgttcagctcccacttgtaagtaagaacatgcagtgtttggttttctgttcttgcattagtttgctgagtccctgcaaaggacatgatcttgttcctgtcacttttttgttgttgttgttgttgttgagactgagtctcccttctgtcacccaggctggagtgcagtggcgcaatctcagctcactgcagcctccgcctcccgagttcaagtgattctcctacctcagcctcctaagtagctgggattacaggcaatgccaccacgcccggctaatttttgtatttttagttgagacagggtttcaccatgttggtcaggctggtctccaactcctgacctcatgatccacccgcctcgacctcccaaagtgctgggattacaggcgtgagccaccgcgcccagccacttttttttttttttaaagagtcttttgttttttggagacaaggtctcattttgttgcccaggctggagtgcagtggctccatcccagctcactgcaacctctcgggctcagccgcccgagtagctgggactacaggcatgtgccaacatgcactgctaattttgtgttatttgtagcaacgaggttttgccatgttgcccaggctggtctcaaactcccgagctcaagcgatctgcccacctcagcctcccaaagtgctgagattacaggtgtgagccactgcacccagccaagagtcctttttaaaacaattgcattgctttgatgattttggtgtttagaatcctgaatacaacttctcctataaataagatcaaatcatttaattcatttaacaagtatttactgatcatgtgctgtgtgccagacattgttctaagcattgataatacaacagtaaacaaaacagacaaaatgacaaagttcttcctttcaaggttcttaacaagtaataaacaagtaaatatgtagtacagtaggacccttatcccaggagatatattccaagacccttattagatgcctgaaactggaatagtaccaacccctgtatatactatggttttttccctctacctgcctacctatggtaatgtttaatttacaaattagatacagtaagagattaacaacaattctttttttttttgagacggagtcttgctctgtcaccgggctggagtgcagtgctgtgatctcagctcactgcaacctccgcctcccaggttcaagagattcccctgcctcagcctccygagtagccggaactacaggcgtgagccaccgcacccagctaattttttgtattttagtagagacgggtttcaccatgttggccaggatggtctcgatctcctgaccttggatctgcccacctcggcctcccaaagtgctgggattacaggtgtgagccactgcgcctggcctgtttaacaataatattaataaaatagagcaattgtaactatgccagcatcactacccttgcactttggggccattattaagtaaaataaaggttccttgaacagaagccctgcaacagttgatctgataaccaaggtggctactaatgggtgagtagggttgcatatacagtgtggatatgttggacaaagggatggttcacatcccaggcaggaggcggcagggcagcaccagattttatgctactcagaatgacacacaacctacaatttatgaattgtgtatctctggaatatttctttctttctttctttttatttttttaagataagggtcttgctttgttgaccaggctggagtgcagtggctcaatctcagcccactgcaaccttcacctcctgggctcaagcaattctcctgcctcagtttcccaagcagctgggactacaggtaagtgccaccacgcctggctaattcttggggggtttttttgttgttctggagacggagttttgctctgtcgcccaggttggagtgcagtggcaaggtatcggctcactgcaccctccacctcacaggttcaagcaattctcctgcttcagcctcccaagtggctggaattacaggtgcccaccaccacatccagctaattttttttgtattttttagtagagctggggtttcaccatgttggccaggctggtctcaaactcctgacctcaggtgatctgcccaacttggcctcccaaagttctgggattataggcgtgagctactgtgcccagcctatttctggaatatttcatttaatattttcagacttgagattgaccacgggtaactgaaaccccagaaagtgagaacacagattggtgaggaccactgtgtgtaagatggttgtaagagccaaagagaaaaataaagaagacagtgtggccaggcgcagtggctcacacctgtaatcctagcactttgggaagccaaggtggttggattgctcaagctcaggggtttgagaccagcctggccaacatggtgaaaccccatctctaccaaaattacaaaaaagttagccaggcgtggtggtgcacacctgtagttccagctacttgggaggctggggtgggagaattgcttgagcccaggaggcaggggctgcagtgagccatgatcatgccactgcactgcaacctggccacagagctagaccctgtttcaaaaaagaaaaaaaaagaagtgtactgggaatggtggcttgtccctgtaatcccaaccacttgggaggcagaagcaggattgttaaggccaggagttcaagaccagcttgggcaacatagtctctaaaattaattatacaaagcttaaaaataaataatataaagaagaagatagtaggacctgtcatttcatgttggatcatcagagaaggcttkctgttacgtcacgtttgagcagagaccttaagaaagtaaggaaataaactatgcagattgttagggaagagcattccaagcaaacagaaaagcctatgcaaaggccttgaggtgggcaaatgccaatagagttggagtgcattaagctaggaaaaagagattaggtaggaagtggtacagattattctagaatcttgctcctcaaaatgtggtcctcagatcagcagtgttaatatcaggatctcatgatctgggagcttattagaaatgcaggatgtcaaggcccaggatgtcaaagctgctgaatcaggaaatctgtattttaagaagattcccccaggcaatttggatgcaattataagcttgagaagcactgatctctagagcctcgtagatcatggcaaaaacttgaacttcagtgtgaatgaacttgaaagccattgggttttgagcatgggagtgacatggtctgacattttaaaagattcactggcgactgtgttgagcagagactataagaggcaaggagagaagcagggatactagttaagtggctaatacagtaataccaagtagattggactggagggatagcaggggaagtggtgataaaacgactcaggatatattttcaaagtagagcttttacaggaatgctgatggattggattggattatagggttagtaaaggaatctgagatgagaatgattacaaggctttttttttttttttttgacagtcttgctctgttggctctgtcacccaggttggcgtgcagtggcgtgatcttggctcgctgcaacctctgcctcccaggttcaagcaattctcatgcctcagccacctgagtatctaggattacaggtgtgcaccaccacgcctggctaattttttttttttttttttttttttttgaggcagagtctcgctctctcgcccaggctggagtgcagtggcaccatctcggttcactgcaagctccgcctcccagggtcacgacacctggctaatttttgtatttttagtagagatgcggttttgccgtgttgtccagtctggtcttgaacttctggcctcaagtgatctgcctgcctcggcctcccaaaatgttgggattacaggcgtgggccaccacacccggccttacaaggctttttgacttgagcaactagaagaatgaagttgccatttactgagatggggtagcatatgggagggagaggtttagattgttggttatgtgagtgcagagttcaagggagaggttgtcagctaaagatacacatttaggatttaatactcagcgtgtagacagcacttaaagccatgagattgcagtgagtgtagatggagaagagcagcagtttgaagaccaagacctgagacagtccagcatttagaggctaggaggatgaagaagaaccagtagaagaaattaagaagcagtcattggggcagaaagcgaatgaaggagctaaatggacgctaaataaagagagtgtttcaaaaacaaaagagaggtcaactgcagattaactactggatttattgatgtcatagtcactggyaaccttgacaaagctgtttcaggagatggtgggggcaaaagcctgctaggaataggtttttaagaaaatggaatgacagagattagagatgatgaatttacataatgtatttcttttaagatgggcagcattatgtgtgtctatattgagtaggaatgatcagagagggaaaagctgatgctgcagaaggaagagggaacagttgttggagcagtgcctttagtaggtaagagagtacgtgatctggtacacggggaggagatggctttatcagaacatggacagtttatccacagtagcaaaaaaaaaaggcagagtgtatgtatgggcatagatgcaactagtgcaggtaaatatagagcttggggcagttgaaagttctcttctgtctgcttctgtttcctcaataggaagggaaagcctttaactgagagtgagtttgggaagaaggtcatggtgttatgagcagaggataggtgtgaaataattgcctagaagaaaacgaatagacttgggagtacgaatgcccacttcaggttagtagtcatgagtttaacgtaagactagtcagcttgtttctgtgtttttctcaggccatttttatttgtgtggtcacatgaatggagtaaccagaaagttgrtttaacctagatttgccaggggagtatgtgttgttgttgttgttaattagtggaataagttacaagtatcacagtatctaacaataggggaatagtaaattaagatagatataaggccgagtgtggtggcactgcctgtagtcccagctactcagaaggctggggcaggaggatcgcttgaacccagaagtttgaggctgcagtaagctatgatcctgcactgcacttcggcctgcgcaacacarcaaaccctgtctcaaaaaaaattgtttacaaaggtgtttttgttgttgttgttgttgttgttgctttttttttgagacggagtctcactctgtcacccaggctggaatacagtggcactatctcggctcactgcaacctcctcagttcaagcaattctcctgcctcagcctcctgagcagctgggattacaggcgcatgccaccacacctggcttttttttttttttttttttgkatttttattagagacggggtttcaccatgttggtcaggctggtctcgaactcctgacctgatgatccacctgcctcagcctacaaagtgttgggattacaggcgtgagccaccacgtctggcctacaaaggtttctaatacacttactgtaatgctaaattttaaaaagcatgacagagaagtgaatatgtgatacaagctcaacaatggaaatacgatgtatagaaaatggactgagaaaaattatgctgttataactgaatgcctgagactggatatttataatgaatagaaatttattggctcacatttttttctggagactgggaagtcccaaatcaatgcaccagtaactggcaagggccttcttgctgcattgtcacagggcagaaggcagaagggcacaagtgaacccactccccagagccctttttataatagtatgaatatatcggtgaggggttgggcacggtggctcacacctgtaatcccagcactttgggaggccgaggcgggcagatcacaaggtcaggagttcgagaccagcctggccaatatggtgaaaccccgtctctactaaaaatacaaaaaattagccgggtgtggtgacgcgtgcctgtaatcccagctactcaggaggctgaggcgggagaatcacttgaacctgggagccggaggttgtagtgasccgagatcgtgccactgcacttcagcctgggtgacagagcgagactccatctattttttttttttttwaaaaaagatggtgaaaccccgtctctactaaaaaatagaaaaattagctaggtgtggtggcaggcacctgtaatcccagctactcgggaggctgaggcactgaattgcttgaacccaggaggcrgaggttgcagtgagctaacatcatgccactgcactccagcctgggcgacagagcgagactccgtctcaaaaatatgtatatatatttgtgagggtggagccctcataacctaaacacctcccattagactccaccttccaacactgtcatgttggggattatatttccaacacatgaattatgaggggcacattcaaaccatacagcrtgctaagtgttgttctgactggtttgcatggactatctcattcagttttgacatatatatatacatatatatatatatakatatatatayayayatatatataccattggtccttgaacaacgtgggggttagggatgacaacccctgtgcagtcaaaaatctgcatatgtaagttttgactgccccaaaacttaaacacttatagcctactgttgaccagaagccttacaagtaacataacagtttttttattttgttttgttttgtttttgacagagtcttgctctgtggcccaggatggagtgtggtggcgcgatctcggctcactgcaacctccacctgctgggttcaagtgattttccggccttagcctcccaagtagctgagactacaggcatgcaatattgcacctggctaattttgtatttttagtagagatggggtttcaccatgttggccaggctggtctcaatctcctgacctcaagtgatctgtccacctcggcctcccaaagtgctgggattacaggtgtgagccaccgcgtcgagccttaatacatatgttttttatgttatgtatattatttactatatttttgcagtcaagctagaggaaatgttattaagaaaatcataaggaaaatacatgttcagtattgtgctgtatttatcgacaccataagtttacatgatgaatcatgtaaaatggcaggcaaccacagctgcagacctccgtccatggtaccatatgaagcaatttggcttttcttgtaatgtcatgactcttttctgcttcttgggaacacttccagcatcactagtggcacttcattatgggtcccatggtgtyatgtaaggtttatgatactgctttagacacatgaaaaatacctgaggaaccacaggagatcacttcttgctgccatatgcaatttttgttttgagacagagtttcactcttgttgcccaggctggagtgcagtggcatgatctcgactcactggaacctccgcctccccgggttcaagcgattctcctgcctaagcctcccaagtagctgggattacaggcatgcaccaccatgcctggctaattttgtatctttagtagagacagggtttccccatgttggtcaggctggtctcgagctcctcacctcaagtgattcacccgcctcggtctccaaagcgctgggatttacaggtgtgagccagcgtgcccggtctgccatatgcagtttactggagagacgaactgctcactggaagatgattaacatctcagagtttttaagcagatacttgcaacatttgagctcaccatagtatcgacaagaggcggctatgaaattattacagtactacagtgtgtactgaagtgaattttatgcagttatgatttaatactgcatctttaggccaggtgtggtggctcgcgcctgtaattctagcactttgggaggcctaggcaggtggatcacctgaaatcaggagttcaagatcagcctggccaacacggtaaaaccctgtctctactaaaaattcaaaaattagccaggtgtggtaaatataaaaattagccgggtgtggtggcatgcatctgtagtcccagctcccagggtgactgaggtgggaggatcgctggaacctgggaggcagaagttgcagtgagctgagattgtgtcactacactctagcctgggtgacagagcaagaacctgtctcagaaaaacaaaaacaaataatattgcatctttatatttatttccgtttctcttgggctgtgaatgatgtcatgtactgtctgtgtttgtgtgtgaggttttttggtgttttttttttacatggggtctcactgtcacccagcctggagtgcagtagtgtgatcacagctcactgcagcctcagcttcctaggctcaagcaatcctcccgcctcagcctccagaacagctaggactacaggtgcaccccactgtgctcagctaattttttattttttgtggagatggggtcttgccatgttgcccaagctggtcttgagctcctgacctcaagtgatcctcctgcctcagcctctcaaagtggtggggttacaagtgtgaactatcacatccagcctgcatcaagttttgataagttttaactttataatagacatatatatttggccgggcacggtggctcaacccctgtaatcccagcacttcaggaggccaaagtgggcggatcacgaggtcaggagatcgagaccatcctggctaacaccgtgaaaccccgtctctactaaaaaagtacaaaaaattagccgggcatggtggcgggcgccggtagtcccagctactcgggaggctgaggcaggagagtggcgtgaacccgggaggcagagcttgcagtgagccgagatcgcaccactgcactccagcctgggcgacagagagagattccgtctcaagaaaaaaaaaaaagacatatatattttatggtagtaaatgataaaatagactaggatctacataaattttatgcgttcatgacatatgtagctttaaaaaaaaattagccagatatggtagagcatacctgttgttctagctactcaggaggctgaggcagcccgattgcttgagcccaggaatttaaggctgcagtaagctgtgattgtgccattgcactccagcctgggagacagagtgagactttgtctcaaaagaaagaaagaaaaaattccagtatatttactgaaaaaaattagcatattagtggacctacacaattcaaatcgtattgttcgaagattaattgtagacatacatakgtgccttacttttctccagtgagagggcctaaaggcagtaatactctaatagaaatgagtgcaagtaatgcctagaatttggcttctacataccattattccrtaatagccaggattccaccaagaatggttgattacaggactgggccagggaaaatacaagatgagcccagaacatcttttattttatttatttatttatttttgagatggtgcctcaccatgttgcccaggcggatcttgaactcctgggcccaagcgattctactgcctccacctcccaaagtgctgggattacaggcttgagcccagcccatctcatgatacaagacagtcagggaacaaaaatgaagggaggctgggtgcagtggcccatgcctttaatccgagtactttgggagtgttgggaataacactcaaaatcctaaggaaaatgaacattcaaacaaaggattcttaggaaagcaattttacttctctgcagaggggtgcctctccttggccagtcgccgtgaaagcacacctgaacaaaggggcacgagagcctttattcctgacgcaagtcctgcccctgtacccttttcccatttgccggggtcgggttgcacaattagcccaattggctaaacatctgaactttctttagataaggtgggcacataagggagagaggggaaaaggtgaaggggtgtctgcaatgatctagagagctagtcttctttccaaataagggaaggaatagtaatagtaagaaatagtaagaaagaaaataaagaaatagtaataaaggaaagctagtcttctttccaaataaggaaaggaatgtgagctggtactgataagcctggtactgtggcgtgtccaggcatgtaacaaaggcagaaacgaaaaaaagagaaaaaggaaaaaaggttgtgggggagtgctatgaattaaagaatagaggattgatcaggctatttgaagagaaacctcatcatatcccacaggaggctgaggcagcagatcagttgatcccaggagttcgagaccagcctgggcaccaaagtgagaccctgtcgctacaaaaaattaacagaaaaaaaaattagctgggccgggcgcagtggctcacgcctgtaatcccagaactttgggaggccgaggcaggtggatcatgagatcaagaccatcctggctaacatggtgcaaccccgtctctactaaaaataaaaaaaattagccaggcgtcgtggcacgcacctgtagtcccagctacgtgggaggctgaggcagtagggagtaggcagtaggatcgcctgagcccaggaggtcaaggctacagtgagctatgtttgcaccactgcattctggcctgggcaacaaagcaagaccctatcttgaaaaaaacaaaaaaatggaagcatgttcaaaggacacaggccaagttgaaggagattgcagagaccaagtatgggacaatttgagcaggaaaataaatagtaatagtaatggattaaagcacagaataagacaaatatccctaagtccattctgctataaataagtgaataactaaataaagggaaagggacagctaatcgttacaatagcattcccattagtaaatgtagaaggaataatagagatagaaaatcaccatttagtaaacaccacagcagtaattgtggcaggcaagaatcattcatggatgcttcaattagtgggcaaaaatgtgatgtgaaacaggacatttacgtagtctgaaagtatcttcccacaaaaatactggttgcaaaggggaaaataataatgttacagtggagaaatgtggcagacactacgaagtgatcaaagttaacatcagcagtaataagacattcacttcatgcacctcttgatacgatgcctgaggaccaaccctcccttctgctgtaatcttacgaaaatacataacttcaatataatcgcgagaaaacaggccaacccaaattgagggacattgtacaaaataagtgacaagtactcttcaaagaagtgtcaagatgatgaaagataaagactggaggagaggaaggagacctgacaactaagtgcattgtgggatcctgaagcagaaaaaggacacaaataggataaactttttttttttttttaaaagatcctgagtttgtgttccctcctaactactgtaagttggacaagtcatataactactctaaggtgtaaagtaggcgtggtactgtctgcttttgctcaggtgtggtgaagctcaaacaaggctttaattgtaacacaaatataagatatcatcatcattattttattttatttttttttgagatgagacggagttttgctcttgttgcccaggctggagtgcaatggcacgatcttggctcactgcaacctccacctcttgggttcaagcaattctcctgcctcagcctccctagtagctgggattacaggcgcctgctaccacacccagccaattttttgtatttttagtagagatggggtctcacgatgttggccaggctggtctcaacttctgaccgcaggtaatccacccgtctcagcctcccaaagtgctgggattacaggcgtgagccaccatgcccggctctcatcgtcattataggttacattgaagtgaactgtttgtctcttttttgtgattctaccaataaaagcaataaacctagttttctgccatggatagaatttactgaaaaggtttctcttccctccaaattgatttgttttttccatcttcatagcttttcaggctgcctttcgagctcaggggcccctggctatgctgcagcactttgatactatctacagcattttgcagtaagtgaaacacccaactggtactttaaaaagaactggtgactgtttgtcctaactgtgcatgttagtcctgaaattccaagttataggttcacygataaatgcctctggatattgatatctctgatgagcatgtacccagcttgccaccgtatttattcagttgaacaatttcacgtgtatttttaaacattcgattccaygggttagatctgatctgttagaaggggctctgcaggctccttcctgtctcacccccacactttctttccctcatagtcactttcgaagtatagatcctggcctcaaagaagatactctgsaattcctgataaaaggtgtttatgggtcagggrgtaggggatggaaggtgtttgttatcgtttgtttgtttgtctgtttgtttgtttttcctacattttgtcagccacatgatgataycaaggctgttgtgattcagttggtttggctaagcccagggacctttggcctgttaaaggtctgtaatcttggtgggcgatacagagttatgtgtgttcactgtaagggcagaccaacaagaactttttcctacttttgagctacctctttttaataggggtgattcttccagttgctggagagaaattgtggtaactggagtgagagagtaggaacagggcatgttcagggtatcagggccaagggtcctaaaggacttagcttgtgttatggccactgagagatgaaacacagatctttggtaatctgatggctgcaagtgctgggtgttttgaagttggggtatatgaaagaagtgagtgaaactgactccaagattctgcccctcacagtggtatcccgccactcccaggagcttccagctatcctggatgatacaactttgagtggatcagatagaaacgcccatctaaatgccctcaaaatgaactgttaygctctgatacgtctcctggaatcctttgagaccatggccagccagacaaaccttgtggacctggaccttggtgggaaggtaatttggagttttgggctcacgttatatggggtctggggagatasgggaatagatggaaaagaagggaatccaatgatccacaaatcctttctgtcctcattgagaatttaggagaaagaactcaaaagtgtcacacgttttcttcctggacaagtagcgctgtggaacttgtaatatttcttccgtattaccttctatgttgtcttggtactagattgtttgggcactcagactgacagatcttgacccacttttttcccttattttttcctcaatgtatacatgatcctttttagggtaagaaagctcggaccaaggcagcccatggctttgactgggaagaagagaggcaaccaattcttcagcttttaacacagctacttcagttggacatccgtcacctgtggaaccactcaataattgaagaagaatttgtcaggtgggtagggaggatggctacagataatactgagctgtgagagtgaggctctgttgatagatatgccgtttttttgtttttgttttttttttgtggggggacagagcttcactcttgtcgcccaggctggagcgcagtggttcaatctcggctcactgcagcctctacctcctgggttcaagcrattttcctgcctcagcctccygagtagctgggattacaggtgcccgccaccacaagctgatttttgtatttttaatagagacgggttttgccatgttggccaggctggtcttgaactcctaacctcaggtgatctccctgctttggccccscaaagtgctgggattacaggtgtgarccaccacgcccagccagaagtctatttttaaaataagtaaaataagtttgatggaagaaggttgtgattttaaatcagctactctaggcccggtgcggtggctcacgcctataatcccagcactctgggaggccgaggcgagtggatcacctgaggtcaggagttcaagaccggcctggccaacatggtgaaaccttgtctctactaaaaaaatatgaaaattagctgtgcatggtggtgtgtgcctgtaatgccagctacttgggaggctgaggcaggagcatcacttgaacctgggagagggaggttgcaatgagctgagatcgcaccattgcactccatcctgggcgacaagagcaaaatcccgtctcaaaaaaaatagatagggccaggcgcggtggctcacgcctgtaatcccagcactttgggaggctgaggcaggtggatcacgaggtcaggagatcgagaccatggtgaaaccccgtctctactaaaaatacaaaaaaaaattagccgggcatggtggcgggcgcctctagtcccagctactcaggaggctgaggcaggagaatggcgtgaacccgggaggtggagcttgcagtgacctgagatcgcgccactgcactccagcctgggcaacagagcaagactccatctccaaaaaaaaaaaaaaaaaaagatagatagatagatagacagacagacaaacagacagacaagctactctagtaagacttctttgagatggtgacatttgagcaaagacccagaggaggtgactgagagctatgagaatatgtggaggaatagcaagggcagggaaaaggaatagcatatgcaaagaccttgaggagggagcgtgtccagcacgtacgagcaatagcaaggaggccagagagctgacagctgagagcaggtacgagggttaggccgtgaggccatgggagcagtggggagccagaccgcaggttyttgtgggccatcatggkgactttggcatttcctcagaatgaagtggagccactggggagccacaagcagggaggtgaggtgacctgacttgtacttcaacagggccatcctagctgttgtattgaaatcgactatggagggaaaggggaagcaagagaccagttaagaggctgttccaataactcaagcaagagatgatggtctcttagaccaaggcgtggcagtggagatggggagaagtagttggattctatactttttccttaaggtagagcttacaggatttgctaacagactgggtgtgaggtgggagggagagttcagtcaaggatgactctcccgggttttggtctgagcrtttggaagactggagttaatggtaactgagatagggagaaggctgtgaataggtgttttgggaggaagatcagatgttctgttttggacatacaaagtttgaggtgtttattagccacgtaaagtcagatttggacgttgaatatatagatctggagttcaggagagaggtctgagctagagataacacatttgggaatataatagtattcagagccgtgagactgaatgaaatyaccaaatcagtaagtgtagctaaaagagcaggaatccaaggactggtaccctagggcactccagcattaagagtgaggatgccgggtgcatggctcacgcctataatcctagcactttgggaggctgaggcaggaggatcacttgagcccaggagtttgagatcagcctggacaacatagtgaaactgtgtctctacaaaaaatagaaaaattagctgggcatggtggaggctgaggtgggagcatcacctgagctatgaggaggtcaaggatgcagtgagccgtgattgcaccactgcactccagcctgggcaacagaggcagaccctgtctcaaaaaaaagagtctgaggaggaactagccaaagaaactgagaaaggagtcttgttcttgtgtcctggaagcgagataaagcatatatttcaaggagaaagtgagtgattaactgtatcacatgcagctgtgaaagaccacttgagatgcagattgaatcagtcgttatatttaggaatgagaagtcattggtgactttgtcttttttttttttttttttgtgatggagtctcgcaatgtcgcctggcctggagtgcagtggcatgatatcagctcactgcaacctccacctcccaggttcaagggattctcctgcctcagcctcccaagtagctgggattacaggcgcccaccaccacacccagctaattttttgtatttttagtagagacagggtttcactatgttggccaagctggtcttgaatgcctgacctcgtgatccacctgcctcggcctcccaaagtgctgggattacaggcatgagccaccacacccggccaactctatcatatttttatgatatatttaggttctttgtcagcatcacaactggttgaaagttggtaatcttgaaggaaggagtacctaactggggtcagcaaagcaaagcaacttgttatagaaagtaatggctagaataaagaaaaccctgactttgggagcagtagggatagaatgaatgaggcagggctctgatacarttggatycagacagctgctttcatcatctcaaactcttcctttctcagtttggttactggctgttgctaccgccttctggagaatcccaccattaatcaccagaagaaccgccccactcgggaagccataacacacctgcttggtgtagccttgacccgttataaccatatgctcagtaagttaccagtcgctttgccccgccttttttgtattgcccataatttctcatgtttaatgcttccacaggtgctacagtgaagatcatccagatgctgcagcactttgaacacctggcacctgtactggttgcagccgtgagtctatgggcaactgactatggaatgaagagcatagtgggagagattgtaaggtgactcttccttctcgaagtttctcatgcttattttccttggggagggaataaagaaagattggaaatacattatctgtgcaacagtagattccttcagatattagatacctgtcttaccttcccttactgggaactgaataattgatctatgttgctatggctgtgttttcttccctgtgtagagagattggacaaaagtgtccccaagagctgagtcgagacccttcagggacaaagggctttgcagcattcctgacagaactagcagaacgtgtcccagctatcctgatgtccagcatgtgcattttgctagatcacctggatggagaagtaggtggtccactaggggtcactgagctttttctggggattttaagtccagygttgaaaggctgtttcttaacagaacaagaaagtagctttgacaagttgtctagatttatcattgtgacatttcctttctgtagagaagcaggtcaagtttgttgaataaggagctctttattaatctgttaatctttcaattcacattgcttttatccagttctggtaagggagatgacatttctgcagcttaagtctagtaagagcaactcagctttgattttttttttttcttggaggtaggatctggctctgtcacccatgctggagcatgatcatagctcattgcagcctygatctcctgggctcaagcaatcctcccacctcagcctcccaagtagctgggacttcaggcacatactaccatgcctggctaatttttttagtttttgtagaggtggggtcttgccatattgcccaggctagtctcaaactcctggtctcaagcaaccctcctgcctcagcctcccaaagtgctgggattgcaggcgctaccatgcttagccttcagctttgattctgagtcccatctgttcctcaggataaagcgtcttcccaccagctggcttgccttgcttcctcaaacaatgaactttctcaaatcaacccatgtcatctctctcaattctcttttatgcctgaatgctaacctggctgattcccatactgatgttgggcactcctaggtgaatgtcaaggacaaagacagtccacttgttcatctcatttactttaactttttgtgcaagaccctattctctggttcttagcctggcaaaaccttaaccctgctctccactagattatgtattggacttgctggcactcttaaggctgatttccatgtttctgtctcattttctgtcagtaaagcatctgaaggagagtgggagggaaaggaggggatatttattagtaaggattaaagactttgaggccaggtgtggtggctcacgcctgtaatcccagcactttgggaggctgaggtgggtggatcacttgaggtcaagagtttaagactagcctggccaacatggtgaaatcccatctctactaaaaatacaaaaaaaaattagctgggtgtggtggcgcgcacctgtaatcctagctactcgggaggctgaagtgggagggttgcttgaacctgggaaatggaggttacagtgagccaagatcgcaccactgcactccagcctgggtgacaaaacgagactctgtctcaaaaaaaaaaccaaaaaaaaccacacagacgggcgcggtggctcacgcctataatctcagcactttgggaggccgaggagggtggatcacgaggtcaggagtttgagaccagcctggccaatatggtgaaatcctgtctctactaaaaatacaaaaattagctgggtgtggtggcgggcacctgtaatcccagctgcttgggaggctgaggcaggagaatcacttgaacccgggagtcagaggttgcagtgagccgagatggcgccacagcactccagcctgggcaacagagcaagactccgtctcaaaaacaaacaaacaaccacaataacaaaggctttgagacctcagctgaagggtagttaataaatgcttttcaaatgtgtgttggtgagtggatgtgatttttttattcagctactaccatgctttcctgtgtgagccctatgaggaaaaattggttttggcccttgttctagcattctctgagcaacaagtcctctttgggattcagctttctcctgtgaccttgggagtgaatacctaggcagttaatggaaaaagttatggccaagcacaagcaagcttcgccttgactaaaggtttgacccctctatgcttctctctcttagaattacatgatgcgtaatgctgtgctggcagccatggcggagatggtgctgcaggttctcagtggcgatcaactggaagcagcagcccgagacaccagagaccagttcttggatactttacaagcccatggccatgatgtcaactcctttgtgcggagccgtgttttgcagctcttcacccgaattgtccagcagaaggtaaccaacttctatgtggcaaaaacatatggtacctctccatataccagtgtaaagaggaatccagtgttgaagataaatatctgccccaaagaggtctagaattcacatttttattatcagtagtaaaagtcttcctctaccaaggacgaggatatctggctccctttaaggactstaatgtgtcttaccactacaaggagtactcctaatctatattctgtagaaagggtttttagagtgagtgggtagctcagtttagagtatacttaaagatcatcttgaacaaaatggatgatgtgggacttgagcagattcttctcttcctaccctacacaggctctccccctgacacgtttccaggcagtggtggctttagctgtgggacgtctggcagacaagtcagtgctagtatgtaaaaatgccatccagctgctggccagttttctagccaataatcctttctcctgcaaggtaagtagacttggtccaccaaaagagaaggaattaaatggaaacagggatgaaattatgtcatttactgaccctgctattcattttacctgatagcttastgatgctgaccttgccggaccactgcagaaggagacccagaaattacaagagatgagggcccagaggcgaactgcagcagcttgtaagtagttactgccttggagtcctaatgccagacaggcttctccttgcagtcagaaactctagtgaaagagactaagtgacactctcatttagctgcagtgctggacccagaggaggagtgggaagccatgctgccagagttgaagtctaccctgcagcagcttctacagcttccccagggagaggaggagattcctgagcaaattgccaatacagagacaactgaagatgtgaaaggacgcatctatcaactgcttgccaaagctagttacaagtaggcaaaagaatgggatattcttcgtgatctgtttatgtttagagttaacctttgagaaacttacataatgtgtcttttaaattaactgcacacagatatgctgccaccaggtgatggtagatgttttcatgtagtaatggtctgaccataggcctagtccacaattaagcatgtgtttctactttataaatgtttaaaaaaactactgaaacaattaaatgttaacaatattataatcaaacatgagtcctccttcaattgaagaagagcacctataaataagttctagttgtatgatcttgaataagttgcttaactttctgtgcctcggtttcattatctataaaataagaaattgattagatcttatgatctctaaggactttctaattctaaatttcatgaactaataatatcaaacatgcttaatactaccttaatcttcaaacctagtatgaatcctgatcttagagaaaagatttctcctagtgtttttgtgactctagaacttaacaacaaaagcccttacagccgtcaacaagttttttttttttttttttttttttttttttgagatggagtctcactcactctgttgcccaggctgcagtacagtgacacgatcttggctcactgcaacctctgcctcccaggttcaagcaattctcgtgcctcagcctcccaagtagctgggaccacaggcgcgcaccaccacaccgcactaatttttttatttttagtagagacagggtttcaccatrttggccaggctggtcttgaactcctgacctcaggtgatccacccatctcagcctcccaaagtgccatgattacaggcgtgagccaycgcactcggctgccaacaagtattcttaaacctcagccacaagttatttgttatttatttacttcttacctaattgggctgaattttttttttggagacggagtcttgctctgttgcccaggctggagtgcagtggtgcgatcttggctcactgcaacctccacctcctgggttcacgccattctcctgcctcagcctcccgagtagctgggactacaggcgcccgccaccacgcccggctaatttttttttttatatttttagtagagacggggtttcaccgtgttagccaggatggtctcaatctcctgacctcgtgatccgcctgcctcggcctcccaaagtgctgggattacaggcttgagccaccgtgcccggcttgggctgtttttagaaggctagagagtggcttgtttgccctatgactcccttatgttactttagtgtctctctttttattttgctaaagcaaaaatagagactatagttttataagtgcatgttccaccaagcattctagtattttctcctgtcaattagaaaaggattgtttgtttttgagacagaatctcactgttgcccaggctggagtacagtagcgcaatcacagctcactgcagcctctcactgtagcctcaaccctgctgggctcaagcgatctcccacattagcctcctgagtagcctggttaatttatttataatttgtagctgggattacaggtacacaccaccaggcctggcctttgccagcctgggcaacgtggcaagaagataacatgtagacaagcagtcaaacatgtattctttttttcccccttttatatgactgatagaattctctgcccactgatctaccatcttgtttttttcacttaactatgtgtctcagtggtttttaaaaatatttatggctgggtgcaatggctcatgcctgtaatcccagctacttgggaggctgaggcaggagaattgcttgaacccaggaagcagaggttgcagtgagctgagattgctccgctacactctaccctgggtgacagaggaagagtccatctcaaaaaaaaaaaaaaatttatagatggccaggtgcagtggctcacacctgtaatcccagcaccttgggagcccaaagctggtggatctcttgaggccaggagtttgaggccagcctggccaacgtggcgaaatggcgaaacccatctctgctaaaattacaaaaattggccaggtatggtggcacgtacctgtaatcctagctatttggggagctgaggcatgagaatcactcgaacctaggaagcagaggttatagtgagccaagatcatgccactacacttcagcctgggtgacagaacaagactctgtctctaaaaaaaaaaaaaatatatatatatatacacatatatatttatacataaatagtttcccactctcctctttttttgagagagagagtgtctcactcttttgcccatgctggagtacagtggtatgatcacaactcactgcagctttgatctcccaggctcaagtgatcctcccacctcagctccctcgagtagctgagaccacaggcacacaccattacacccacaggcacacaccatcacacccacaggcacacaccatcacacccacaggcatacaccatcacacccacaggcacacaccatcacacccggctaactttttttactttttgtatagttgggtctccctgtgttgcccagactgatctcaaattcctgggctcacgtgtccccattattttttatgactacatagaatcttattgtctggatgtgcctgaattaactaattattgaaagtttattgtttctaaacttaggaaagtttttaaacaggtgtttggagtaggtttatgattttaaaactttaaaaagccttattggagtttttttgaagactgtagtaatgccttgtaggttcagaaataggaaaagtgtttgcagatgagcagtcaggggaaaaaaataggcaaagtgttttgagccctaccccttagtaggtgctgtaacaactttttaagcatgttaagtgctccttttctctgggcagtaggtccagggacttgatagaatcatgaggtaagctcccttacaaacggctgcagtgacattcttctgggtactgacaggctggtgttctttcagaaaggccatcattctcactcgagaagccacaggccacttccaggagtccgaacccttcagtcatatagacccagaggagtcagaggagaccaggctcttgaatatcttaggacttatcttcaaaggtaatcattttccttcttcagtcaataaataacacatgtcaactggtatttactgagcattaactttatgccatcattggcctggttaacagaacctggtgctgaagagcccagagatgaattggcattacttttgctctggaatggaagcagcccacgggcctaagattgatagtcacagggtgactgtccagaccatagcggtctttaggtatggtttttgagaaatttagatattttagagtaagttttaatttcatatcttcacattgtgaaaagagatatccagggccagatgtcgtggcttatgcctgtaatcctaacactttgggaggccaaggcaggaggattgcttgagcccaggagttgaaaatcagcctgagcaacatgacgaaacccccatctctacaagggataccaaaaaaaaattagccaggtgcggtggcacgcacctgtagtcccaactgctcaggaggctgaagtgagagaatcaccttagcccggggaagttgaggctgcagtgagcggtgatcattgccactgcacagcctaggcaacagagtgagaccccatctcaaaagaaaagaagaaggaaaataaataagtaaatatccaggaatgttgacagctgttggattcccctgtatccccttgaacgaaaccatcctgtacttctctaactccttaggcccagcagcttccacayaagaaaagaatccccgggagtctacaggaaacatggtcacaggacagactgtctgtaaaaataaacccaatatgtcggatcctgaggaatccaggggaaatgatgaactagtgaagcaggagatgctggtacagtatctgcaggatgcctacagcttctcccggaagattacagaggccattggcatmatcagcaagatgatgtatgaaaacacaactacaggtatgccagagtccctttctataaggacagccttggggttcttttggattttttaattttttaaatttttattaacaatagagatggggccttcctttgttgctcaggctggtctccaactcctgggctcaggcaattcttctgcgtcagcctcccaaagtgctggtattacaggtgtgagccactgcacccggccatggatcttggagttcttttccatattttattgatatatctatctgctcctttaaaaggcaggggttctcggctgggcgcgatggctcatgcctgtaatccctacaaaactgggaggccaaagcaggaagacaggttgaggccaggagttcgagagcagcctgggcaacatagcaagaccccatctctacaaagaaacaaaaactaactgggcgtgatggcacacacctgtagttccagctactcggaaggctgggcaggaggattgcttgagcccgggagtttgaggctacagtgagctgtggtcatgccactgcactctagccagagcaacagaataagaacctgtgtcttaagaaaagaaaaaaaaaaggcaggggttctttttttctgtttgcttcctctagccacttacagcttatacattttaatgcatatagtatttcatgataaggcatcataggaggagtcgacattctcagggaaaatrcggaaggcctccatttgcatcttgctacattcagaaaggttctgtcgttaggtattgggggagttttgtgaagtagataggtgacatttgtacatgttctctcagtggtgcaggaggtgattgaattctttgtgatggtcttccaatttggggtaccccaggccctgtttggggtgcgccgtatgctgcctctcatctggtctaaggagcctggtgtccgggaagccgtgcttaatgcctaccgccaactctacctcaaccccaaaggggactctgccaggtatatggggtgcttttgcctttgctgacttttccaaggtcagcttctcacaggacttcccttgtctcctaaaggaagaggtgcatttctccaggggagttccagatccataggcagtccatcatagtggggcttagggtggggctcggtttccagggagagcagttttgtagcactgtggtgggatagccctaatcactgtttgccaagttcagcttcccaatcttatagtgaccgctgatctctgctgttcccacagagccaaggcccaggctttgattcagaatctctctctgctgctagtggatgcctcggttgggaccattcagtgtcttgaggaaattgtaaggcttcctgctttctctttctttattcattcaacaagtattttggttgttttttttttttttttttgagacggagtcatgccccattgcccaggctggagtgcaatggcacaatcttggctcactgcaacctccgcctcccaggttcaagcaattctcctgcctcagcctcccgagtaactggaattacatgcatgtgccaccatgcccgactagttttttgtatctttagtagagacggggtttcaccatgttggccgagctggtctcgaacccttgacctcgtgatccacccgcctcaacctcccagagtgctgggattacaggcgtgagccaaagcgcccggcaacaagtattattgagttattactatgtatttagcaatttacttagctccagaaagaagtataagactatttgctttcatgttcccaactttaaaggaaccaacagtctagttggtagtgaaaaaccacagaacatttttagaacaatgcagcaggtagataataaagtgccagaatgagttgtacgggtaatggttgtcatagcaataataacaacctcacttatatggtattgaatatatgacaggcactcacacgttactcacagtaacttgtttaatcctcacgacagccctgtgaggtagcattatctgcattttacaatgagaaatctgaggcacagagaagttactgaacttggctggttacagctagttagtggcaaagtttgagattcaaactcaggcaataagagctctagaaaacatactcttaacttctgtgttctactgagggatacagagtaggaaagagagcggtttggggtagaatggtcaaggaagcttcctgaaggtggtaggacttaagctgggtcttgaaagatgagtaggatttagagaatcagagcaaggagggagggcatttcaaacagaacccaagaaagagcacagttcacattgtagaacaaagaagactgtgttctggttcaaattatctggaaaagaccaggcgcgatggctcacgtctgtaatcccagcactttgggaggccaaggcagcagattacctgaggtctgaggtcaggagttcgagaccagcctggtcaacatggcgaaaccccacctttactaaaaatacaaaaaaattagccaggtgtggtggtgggcacctgtagtcccagctacttgggaggctgaggcaggacagttgcttgaacccaggaggtggaggtagcagtgagccgagattgcgccactgcactccagcctgggcgacagagggagactctgtctcaaaaaaaaaaaaaaaaaaaaaaatctggaaaagataataaagttgtgaatgtaggttggaactaaactgtggaagtccctgaatgacttcaggagtctaggactttaactgtgttagccaggcacccagcattttagtgagacattctgctttgtagcatttgcattgcgggcacagagagtggaggtggcgctgggaagcgtgctcctgccagccacatttttctcctcactggggaaaagaaaagagcctggtggtggtgattggccatgatgtcataggtcagttaccggcaaaagccctacaagaggcaggggagagcacctgcaaactggggtgcaacagaagggacgtggggaagcagaggctgaggagaccaacccatgggaaggaaggcccgtggaggctgctgcagtgggcagtaacgaggggctggacttgaggattggagaaatcactgcagaatgggcttaatggaagacaaatttttaaaggaaaaatagtgactgatttgtaaaaaaattagatgaccgaaattttaagcacatattactgatagagtgttgataccactggcaaaatgaaaaggcaaggaaggatgatggcttccatgttggacatgttgagtttgtggtaacggcaagaaaacctgttagaaatctccagacttagaactatggacccacgtggaactcaaaaggtcagtttcgatatgtcacttgaataaaatagttttgaaggcatgagagtagaaaagtagagaatggaaagcctctcaagaccctgctgtacattttgaacctcctcttttctttttctcttcctaagtattacttttgtctacttcaggttcgcaatatcatcttcagaaaagcagaccaaagatcaaggaattgttcatttttggcttgagccctttttcttttctctttagctctgtgagtttgtgcagaaggatgagttgaaaccagcagtgacccagctgctgtgggagcgggccaccgagaaggtcgcctgctgtcctctggagcgctgttcctctgtcatgcttcttggcatgatggcacggtgaggctcaaatctagcaggcaatggggtgggagagcaaaggaaggttctgagagggctccttttccttcagtgacattgtcacagtgaggcccaactgagctctgctgtgagttataacgccacctaaatggaaaagcaaatagtgagaggaccagccctcctgcctagtagtagtgggattcagtaaagcaacaggacccaagaggctggccctgcggcagagccacgctatagtgctccacggctctagacaccacatgaggtgctggtacctacccctattggccctttctcccccgatgagtccaatccatgactgcctttaactctgtggcttccttcccctagaggaaagccagaaattgtgggaagcaatttagacacactgntgagcatagggctggatgagaagtttccacaggactacaggctggcccagcaggtgtgccatgccattgccaacatctcggacaggagaaaggtatgtgrgggtggttccaaactaaggagagtggagattctcgtgtccaccctgtacacacacccacgttgtcttgctctccacagccttctctgggcaaacgtcacccccccttccggctgcctcaggaacacaggttgtttgagcgactgcgggagacagtcacaaaaggtgagctctcagggaaggccttgggcagawttgggccctttgttgcagtaaacaacttctccctcctcctctgcaggctttgtccacccagacccactctggatcccattcaaagaggtggcagtgaccctcatttaccaactggcagagggccccgaagtgatctgtgcccagatattgcagggctgtgcaaaacaggccctggagaagctagaagagaagagaaccagtcaggaggacccgagtaagtgggcaggggttgacccactgcggcagccagcttctgttctccctgcagggccaggagccactgccaccaccactatctgcaacaacccttagtgtacactgtgtcgtttttgtctaagttgaagttgggccagttcccacccccaactcttactacttcactagtttgaatagcacgtgagcaaggggaagatcagtaaaaatcggattcaggtttgatgggacttaaaaatgtctctttgccccaccttccctctccctctcctccagaggagtcccccgcaatgctccccactttcctgttgatgaacctgctgtccctggctggggatgtggctctgcagcagctggtccacttggagcaggcagtgagtggagagctctgccggcgccgagttctccgggaagaacaggagcacaagaccaaagatcccaaggagaaggtgtgtgaatgtcctcagcacttcccagatttatttcatacctcagctcagaactgagctgatccccttccggcaatctctgctcctctgctattacatgaagcgaagagtttctgcctctctgtggctactaccgtaggaaaggttcgtgtgaacaatgacraaactgtcagtgatcacccaggaaggaaagatttaggtaaatgcagagtgtggagttagagacctcagcataaaacagaggctttgtgtctgaggcagggtttgttagaacacgcacgtacccgccggccttttccatcagcttccattgctggcctggccccggatggggccctgtgttccctccactagaggcaatgatgtcttgcagacaaataagacacagagccttgcagcgctggagaaaagtctgacctctgtgactttgaaccattgtctggcgtgatccatctgtttaccatatataggaaacgatgtcttccatgaggaagaggtgcagaaacacgctttggcaacttaaaacaaatggggacctcattgttcccctgcttaattcaggaatcctttctctttacagacacatttgacaattctctaaatgtttttgtagaatttgcccttcctcactttgttcatgcaaaacaaagtatgggctggaatcaaaaatgttgtctctgcttatccatgatccccaatttcattccctttagaatacgagctctgagaccaccatggaggaggagctggggctggttggggcaacagcagatgacacagaggcagaactaatccgtggcatctgcgagatggaactgttggatggtaagaaaaatggctgcactcagcagtttcttcccaattaagataacctgtcccaaacctgcagttactcttccaacaggcaaacagacactggctgcctttgttccactcttgcttaaagtctgtaacaacccaggcctctatagcaacccagacctctctgcagctgcttcacttgcccttggcaagttctgcatgatcaggtaggccgtggggttggtacccccttctcaaggaagatggggatgaaatggcttccctaatgatcctcttcttgctcttagtgccactttctgcgactcccagcttcgtcttctgttcaccatgctggaaaagtctccacttcccattgtccggtctaacctcatggttgccactggggatctggccatccgctttcccaatctggtggacccctggactcctcatctgtatgctcggtaagagacccctcacaacgtggtggcagttcccaggagccccggagtctgttgagagtcagtgtgagaatcaccagggctcttcccctaggctttggcatcaccgcgaacatctgcttgatacttgacctgtacaggcccctggctaagagtcaccccagtgggactgacacttctggttagaagcttcacctctttcccccactccagctttcaactctagacagctttctgactgcttctggagtggcagagcatgggataattgattcctgctgagggccttttctaccagtgttagggtgtagcccggaggtctcggtccccatgacccgcaattccattcctagyctccgggaccctgctcagcaagtgcggaaaacagcggggctggtgatgacccacctgatcctcaaggacatggtgaaggtgaaggggcaggtcagygagatggcggtgctgctcatcgaccccgagcctcagattgctgccctggccaagaacttcttcaatgagctctcccacaaggtgagaggcagagaggcactgagggctggctgcagagggaatctgtaggtcacctcatctccttaacatggctctctctgtcttacagggcaaygcaatctatratctccttccagatatcatcagccgcctgtcagaccccgagctgggggtggaggaagagcctttccacaccatcatgaagtattgctccccgggccctggggcacattttccacatagcaygggcttaggaatcagacacacctgtatttgaattccacctcggctactctttagctgtacagccttcggcaataacttagcctctctttgtgcctatttcctyttcttttgaggctgatgatacttaacccttagttcttgaaaatattaaatacgataaagttcctaacatggtggcagacatacagtagcactcactccctagcagctgctcctgttaatttccattcacagtgaaaattcctgagccgggggcggggtggggtccctctctgctgaatgggacagggcaaggggagtggtgaggcagacaggggccgtggcagagaacatcagagaagacgagtgctgggggagggtccagggttggtcttagtggatggcagagctggccctgggccatcgaacatcctcatctycccttcctgcagacagctcctctcctacatcaccaaggacaagcagacagagagcctggtggaaaagctgtgtcagcggttccgcacatccckgtatgctgccctccctgagggttctttgtgctgagcggggccctgcaggggagaaaggcccatccctcaccccttcaatgcccccactgtggcatccctgggactggggaggctgatggggaaggttgagcctytactagctggatctcccagttcctcacaaagcccttcctatctgcagaactgagcggcagcagcgagacctggcctactgtgtgtcacagctgcccctcacagagcgaggcctccgtaagatgcttgacaattttgactgttttggagacaaactgtcagatgagtccatcttcagtgcttttttgtcagttgtrggcaagctgcgacgtggggccaagcckgagggcaaggtgagcagcacaggacacttcaatgcctgttgggttctgggctggctaagacatctgccggccctgggcagcatacggctcttgcagtcaccttcccgtcctccttatccccagctgggttgcaaccaaattgccagagtgacctaagaccagatctttgtctccagttctttttttattactccaaaaacacaaccaaagcagcatctcatccaattcttgtttgtttgtttttaatagtttttatttttcagagcagttttaggttcaaagcaaaattgagcagaaagtacagggagttcccttctaccccttgcccctacacatcacagccttccccaccttcaacatcctgcaccagggtggcacatttgttacagctgaacctacacttacacatcatctcctaaagtcatggtttaccttggagttcactgcacgtaatgacatgtacccaccattgcagtatcatacagaagagtttcactgccttacaaatcccctgcactccacctatttatccctctctccccacaacccctgatctttttactgttgccatcactttgtcttttccagaatgtatcattggaatgatccggtatggagccttctcaccttggcttcttagtaatgtgcgtttaaggcctccatgtcttccatggccttgtttctttttaatcagaagtaactgttttcaggcctgctctgaatctccttttctccctccaggctataatagatgaatttgagcagaagcttcgggcctgtcataccagaggtttggatggaatcaaggagcttgagattggccaagcaggtagccagagagcgccatcagccaagaaaccatccastggtacgtaaggcagcctgtgcgggcgagaccagactgggccctcccctcctgcagtgatttgtttcttcttcttttttaaatcacgttttcctgccttttctaggttctaggtaccagcctctggcttctacagcctcagacaatgactttgtcacaccagagccccgccgtactacccgtcggcatccaaacacccagcagcgagcttccaaaaagaaacccaaagttgtcttctcaagtgatgagtccagtgaggaaggtatgatgctcccgcctgttcccgrccgagaaggcacacagctagggtgcagagggctggtttccataggacctgctgcgggggcctgagtgtagatgctctgccccactgccgcagaagggcctctcctgtacagcttggattttatttcttctgtgcggtgtgggattgtctcacttgttctctgatatctattttttcaccatctttgtgactcagctttttcttattcctttaattctttgcatagatctttcagcagagatgacagaagacgagacacccaagaaaacaactcccattctcagagcatcggctcgcaggcacagatcctaggaagtctgttcctgtcctccctgtgcagggtatcctgtagggtgacctggaattcgaattctgtttcccttgtaaaatatttgtctgtctcttttttwwaaaaaaaaaaaaggccgggcactgtggctcacgcctgtaatcccagcactttgcgataccaaggcgggtggataacctgaggtagggagttcgagaccagcctgaccaacatggagaaaccccatctctactaaaaataaaaaattagccgggcgtattggcgtgcgcctgtaatcccagctactcaagaggctgaggcaggagaatcgcctgaacccagaggcggaggttgtagtgagccgaaatcacaccattgcactccagcttgggcaacaatagcgaacctccatctcaaattwaaaaaaaaatgcctacacgctctttaaaatgcaaggctttctcttaaattagcctaactgaactgcgttgagctgcttcaactttggaatatatgtttgccaatctccttgttttctaatgaataaatgtttttatatacttttagacattttttcctaagcttgtctttgtttcatctttcacattagcccagtttcatgcagcagagagagggttatcagtgcagagagagatgagtgagcccagagtcctagggcctgtcccgggatggcagatgagcttcctgccccgtcactgccacctttcccctctcaacctctggaccctgcacagtgaccagacagcctctctggggagaattatgcagtgcctaggctccagatcagtgcttctgaaccgggggcaattttgtctgccagaggacatctgacaacacctggggcctgttttgttgtcatagcctataggggaagaatgctaccagcatttgtgggaagaggccagggatgtggctcaacatcctgcagtgcacaggatggcccctcaacaaagaatcacacggcccacaatgtcaatagcgtcacagttgagaaaacctgctctagaccaagggttgctttctgccgtgtgcctcaccccacccccactcgtgttccctaatcccatctccaaaggttggcagcagaccggcccaggctcgtggaagttcagatcatgatcccctccagctctgcaggagacaagacctgtctcccagcattcctcattgttcccgggtctgcagagggcgtgagctatgctgcaggcgggctgccccctgaagcctgcgcacccctctccagctcctcaagtcttctctgctgagtcaccttcgaaccggaggctgtgagctggctgtcgtgaccacactggtgcctctgctgtcatgacaacagcacactacgtcagtagtgctccctgggcactgagctccctctttgcggggagaagacagtaatgaaaaatgacaagcatgaggcagaggggaagatcacgcttgggtggtgcaggagcatggaggtgctcttaatgctctcaatgagaaagggttaacggtcctggttgcaggaatagctgagtcagaggtggggcttcctccactcccccaccccacccctttcaccattagggaccttcttgccttgctcttgctactctgctctgggtggtcattgtgaaaagcccgcaccaaccatgccagtggcagccagacgaggacacagcctggctctgggtcccagcaggaaaggcaatcccagaaaggcagggtcagggactggagtcctgtgggtgctttttaagcaaagattatcaccaggcaggctaaacttagcaaccggcttttagctagaagggcagggggctggtgtcaggttatgctgggccagcaaagaggcccgggatccccctcccatgcacctgctgatgggccaaggccaccccaccccacccccttccttacaagtgttcagcaccctcccatcccacactcacaaacctggccctctgccctcctaccagaagaatggatcccctgtgggagggggcaggggacctgttcccaccgtgtgcccaagacctcttttcccactttttccctcttcttgactcaccctgccctcaatatcccccggcgcagccagtgaaagggagtccctggctcctggctcgcctgcacgtcccagggcggggagggacttccgccctcacgtcccgctcttcgccccaggctggatggaatgaaaggcacactgtctctctccctaggcagcacagcccacaggtttccaggagtgcctttgtgggaggcctctgggcccccaccagccatcctgtcctccgcctggggccccagcccggagagagccgctggtgcacacagggccgggattgtctgccctaattatcaggtccaggctacagggctgcaggacatcgtgaccttccgtgcagaaacctccccctccccctcaagccgcctcccgagcctccttcctctccaggcccccagtgcccagtgcccagtgcccagcccaggcctcggtcccagagatgccaggagccaggagatggggagggggaagtgggggctgggaaggaaccacgggcccccgcccgaggcccatgggcccctcctaggcctttgcctgagcagtccggtgtcactaccgcagagcctcgaggagaagttccccaactttcccgcctctcagcctttgaaagaaagaaaggggagggggcaggccgcgtgcagccgcgagcggtgctgggctccggctccaattccccatctcagtcgttcccaaagtcctcctgtttcatccaagcgtgtaagggtccccgtccttgactccctagtgtcctgctgcccacagtccagtcctgggaaccagcaccgatcacctcccatcgggccaatctcagtcccttcccccctacgtcggggcccacacgctcggtgcgtgcccagttgaaccaggcggctgcggaaaaaaaaaagcggggagaaagtagggcccggctactagcggttttacgggcgcacgtagctcaggcctcaagaccttgggctgggactggctgagcctggcgggaggcggggtccgagtcaccgcctgccgccgcgcccccggtttctataaattgagcccgcagcctcccgcttcgctctctgctcctcctgttcgacagtcagccgcatcttcttttgcgtcgccaggtgaagacgggcggagagaaacccgggaggctagggacggcctgaaggcggcaggggcgggcgcaggccggatgtgttcgcgccgctgcggggtgggcccgggcggcctccgcattgcaggggcgggcggaggacgtgatgcggcgcgggctgggcatggaggcctggtgggggaggggaggggaggcgtgtgtgtcggccggggccactaggcgctcactgttctctccctccgcgcagccgagccacatcgctcagacaccatggggaaggtgaaggtcggagtcaacgggtgagttcgcgggtggctggggggccctgggctgcgaccgcccccgaaccgcgtctacgagccttgcgggctccgggtctttgcagtcgtatgggggcagggtagctgttccccgcaaggagagctcaaggtcagcgctcggacctggcggagccccgcacccaggctgtggcgccctgtgcagctccgcccttgcggcgccatctgcccggagcctccttcccctagtccccagaaacaggaggtccctactcccgcccgagatcccgacccggacccctaggtgggggacgctttctttcctttcgcgctctgcggggtcacgtgtcgcagaggagcccctcccccacggcctccggcaccgcaggccccgggatgctagtgcgcagcgggtgcatccctgtccggatgctgcgcctgcggtagagcggccgccatgttgcaaccgggaaggaaatgaatgggcagccgttaggaaagcctgccggtgactaaccctgcgctcctgcctcgatgggtggagtcgcgtgtggcggggaagtcaggtggagcgaggctagctggcccgatttctcctccgggtgatgcttttcctagattattctctggtaaatcaaagaagtgggtttatggaggtcctcttgtgtcccctccccgcagaggtgtggtggctgtggcatggtgccaagccgggagaagctgagtcatgggtagttggaaaaggacatttccaccgcaaaatggcccctctggtggtggccccttcctgcagcgccggctcacctcacggccccgcccttcccctgccagcctagcgttgacccgaccccaaaggccaggctgtaaatgtcaccgggaggattgggtgtctgggcgcctcggggaacctgcccttctccccattccgtcttccggaaaccagatctcccaccgcaccctggtctgaggttaaatatagctgctgacctttctgtagctgggggcctgggctggggctctctcccatcccttctccccacacacatgcacttacctgtgctcccactcctgatttctggaaaagagctaggaaggacaggcaacttggcaaatcaaagccctgggactagggggttaaaatacagcttcccctcttcccacccgccccagtctctgtcccttttgtaggagggacttagagaaggggtgggcttgccctgtccagttaatttctgacctttactcctgccctttgagtttgatgatgctgagtgtacaagcgttttctccctaaagggtgcagctgagctaggcagcagcaagcattcctggggtggcatagtggggtggtgaataccatgtacaaagcttgtgcccagactgtgggtggcagtgccccacatggccgcttctcctggaagggcttcgtatgactgggggtgttgggcagccctggagccttcagttgcagccatgccttaagccaggccagcctggcagggaagctcaagggagataaaattcaacctcttgggccctcctgggggtaaggagatgctgcattcgccctcttaatggggaggtggcctagggctgctcacatattctggaggagcctcccctcctcatgccttcttgcctcttgtctcttagatttggtcgtattgggcgcctggtcaccagggctgcttttaactctggtaaagtggatattgttgccatcaatgaccccttcattgacctcaactacatggtgagtgctacatggtgagccccaaagctggtgtgggaggagccacctggctgatgggcagccccttcataccctcacgtattcccccaggtttacatgttccaatatgattccacccatggcaaattccatggcaccgtcaaggctgagaacgggaagcttgtcatcaatggaaatcccatcaccatcttccaggagtgagtggaagacagaatggaagaaatgtgctttggggaggcaactaggatggtgtggctcccttgggtatatggtaaccttgtgtccctcaatatggtcctgtccccatctcccccccacccccataggcgagatccctccaaaatcaagtggggcgatgctggcgctgagtacgtcgtggagtccactggcgtcttcaccaccatggagaaggctggggtgagtgcaggagggcccgcgggaggggaagctgactcagccctgcaaaggcaggacccgggttcataactgtctgcttctctgctgtaggctcatttgcaggggggagccaaaagggtcatcatctctgccccctctgctgatgcccccatgttcgtcatgggtgtgaaccatgagaagtatgacaacagcctcaagatcatcaggtgaggaaggcagggcccgtggagaagcggccagcctggcaccctatggacacgctcccctgacttgcgccccgctccctctttctttgcagcaatgcctcctgcaccaccaactgcttagcacccctggccaaggtcatccatgacaactttggtatcgtggaaggactcatggtatgagagctggggaatgggactgaggctcccacctttctcatccaagactggctcctccctgccggggctgcgtgcaaccctggggttgggggttctggggactggctttcccataatttcctttcaaggtggggagggaggtagaggggtgatgtggggagtacgctgcagggcctcactccttttgcagaccacagtccatgccatcactgccacccagaagactgtggatggcccctccgggaaactgtggcgtgatggccgcggggctctccagaacatcatccctgcctctactggcgctgccaaggctgtgggcaaggtcatccctgagctgaacgggaagctcactggcatggccttccgtgtccccactgccaacgtgtcagtggtggacctgacctgccgtctagaaaaacctgccaaatatgatgacatcaagaaggtggtgaagcaggcgtcggagggccccctcaagggcatcctgggctacactgagcaccaggtggtctcctctgacttcaacagcgacacccactcctccacctttgacgctggggc

SEQ ID NO: 6835 - DNA, 20761 bp, Homo sapiens
gcctcacaggctaccactgtggcacaggaaataaagcccagggcttacccaaggttggaaatctaatagaaagtccttaccataaagtcagaaccccaaaggactatatcctcatctaagaatgaattacgaatatactagaacccaaactgccccagagcactccgtggaatgttgtttgtctggaacccaggtgcctgctggagttcttttatttttttcttttaagtatttgcagagaatgtataaccacaggctgtggtgtttctgcctgaactctttgttgatcctaaaaagaaaatggcaagaatttaaagtggttttggattgacagtaccaccaagaacccagcagaagcaatgcagatcctttctggatgaactcatctttaatctaggcctcggggaatttccacagatacagttccaagaaaaataaattgtggtcaaaaattccaaacaaataaggaacaaggcaccaagaacaagaaccagcagagatggagacaggaaataagaaagataattagaaaattaagccaaatagtccaatatctaattaatagtccgatgtctaaaaagagaaaacaggatatgtgagggagagggagaaaaaagggtgtgtgtgagattgattttaaaagaaatacaagactcgcgcctgtaatcccgcactttgggaggctgaggctggcagatcatctgaggtcaggagttcgagatcagcctggccaatatggtgaaaccccgtctctactaaaaatacaaaaattagccaggcatggtggcaggcgcccgtagtaccagctactcagaaggcctcgcgaggtgccgggattgcagaccaagtcttgttcactcagtgctcaatgttgcccaggctggagtgcagtggcatgatctcggctagctacaacctccacctcccagccgcctgccttggcctcccaaagtgccgagattgcagcctctgcccagccgccaccccgtctgggaagtgaggagcgtctccgcctggccgcccatcgtctgggatgtgaggagcccctctgcccggctgcccagtctgggaagtgaggagcacctcttcccggccgccatcccgtctaggaagtgaggagcgtctctgcccggccgcccatcgtctgagatttggggagcgcctctgcctggccgtgaccccgtctaggaggtgaggagcgtctctgcctggctgccccgtctgagaagtgaggagcccctccgcccggcagctgccccatctgagaagtgaggagcccctccgcccggcagccaccctgtctgagaagtgaggagcgtctccgcctggccgcccatcatctgggatgtgaggagcccctctgcccggctgcccagtctgggaagtgaggagcacctcttcccggccgccatcccgtctaggaagtgaggagcgtctctgcccggccgcccatcgtctgagatgtggggagcgcctctgcccgcccgtgaccccgtctaggaggtgaggagcgtctctgcctggcagccaccccgtccgggagggaggtggggggtcagcccccgcccggccagccgccccgtccgggagggaggtgggggtcgcctctgcccggccaccccttctgggaagtgaggagcccctctacccggccaccaccccgtctgggaggtgtacccaacaactcattgagaacgggccattatgacgatggcggttttgtggaatagaaaagggggaaaggtggggaaaagatagagaaatcagattgttgctgtgtctgtgtagaaagaagtagacttgggagacttcattttgttctgtactgggaggggttcttctgccttgggatgctgttgagctgtgaccttgcccccagccctgtgctctctgcggcctgtgctgtgtccactcagggttaaatggattaagggcggtgcaagatgtgctttgttaaacagatgcttgaaggcagcatgctccttaagagtcatcaccacttcctaatctcaagtacccagggacacaaacactgcggaaggccgcagggtcctctgcctaggaaaaccagagacctttgttcacttgtttatctgctgaccttccctccactattgtcctatgaccctgccaaattcccctctgcgagaaacacccaagaatgatcaataaaaaaaaaaagaaaatggccaaaagacatgaaccaacatttcatcaaataggataatatatacaaggcaaacactttaaaagatatttgatatcattagccatcagtgaaataagaattaaaaccacaatgatagcactgaacacatattagaatggttaaaataagaaaaatacagctgggcatgatgcctatagtcctagctacttgggaagctgaagtgggagaattgcttgagctcaggagtttaagaccagcctgggcaacacaggcaaaggcagtttcttataaaactagagatgcaattaccttactgcccaagcattgcactcaggcatttatcccagagaaatgagaatttatgttcacacaaaacctgtatgaaagttcacagcaactttatttgtaatagcccagtgctgaaatcactccaaatgtccttcagcaggtaaatggttaaatgtaccacggaatattaatcagtggtgaaaactaatgatacacacaataacttggatggttgaaaaagtaatgatacacacaataacttggatgaatgaaaaaagccaatcttgaaaggttacgtgatatagaaaaaagcatgactacatttacataaggctcttgaaataaagttacagagatggagaacaaattagtgttgctaaggtttagggatggcggtgggttggaatataaaggggtagcacatgggagccttgcagtaatgtgaaaatgctgtatcctaactgtggttgtggttacacaaatctacacatgatacaattgcataaaaccactcaaacacacacgaacacaaaaagaagtgtttggtggtacatgccagtttggaaaatcggtgaaatttgaataaactctggattttgctaatgataatttcctggttttaatattttaataattttaaactgtatttatacaagatgttactgttgggggaactgggtaaaggggtttaggggaacctccctgtattgtattttttttttttggccaccttatatgaatctataattactttaaaataaaaagtttaaggccgggcgcggtggctcacgcctgtaatcccagcactttgggaagccgaggcgggtggatcatgaggtcaggagatcgagaccatcctggctaacactgtgaaaccctgtctctactaaaaatacaaaaaattagccgggcgtggtggcgggtgcctgtagtcccagctactcaggaggctgaggcaggagaatggcgtgaacccaggaggtggggcttgcagtgaaccgagatagcgccactgcactccagcgtgggcgacagagggagactccgtctcaaaaaaaaaaaaaaaaagtttaaaaaatgccaccccctcaaccccgtttttttgagacagggtctcactctgttgcccaggttggagtgcaatggtgtgatcatggctcactgctttcttgacctcctcaggctcaggtaatcctcccacctcagcctcccaagtagttggaactacaggtgtgtgccacaatacccagctatatttttttgtatctatttcttgtagagacaggatttcaccatgttgtccaggctagtcttgaactcctgggctcaagtgatcctcctgctttggcctcccaaaatgctgggattataggcgtgagtcaccattcaatgattttaagttttttttcaggggaaagttggtgggaataaataggcattcatgctgccagaaatatttcctcccattcttttttcttttctttttctttctttctttctttttttttttttttttgagacagtctcattctgttgcccaggttggagtgcagtggcaagatctcggcttactgcagcctccgcctcccgggttcaagtgatcctcctgcctcagtctcccgagtagctgggactacaggcgtccatgcccagctaatttttgtatttttagtagagacgggattttgctgcgttagccaggttggtcttgaactcctggcttcaagtgatccgccctccttggcctcccacattgctgggattacaggtgtgagttactgcgcctggccctttttcttttcttttggagatagggtctcattttgtcacccaggtgggagtgcagtggcgtgatctcggctcactgcaaccggaacatctgggctcaagctgtccttccgcctcagccccccaaatagctgggactacgggagtgagccaccacgcccggccccattctttttgtctttgggggcttataattttttgcaaattttcccaaattgtcatttttccccctaacttgccattttgatgtggtttcaggaggagaatgggataaacacatatgatgaatgcattatgtttccaagtgcaattgtttccttaagaagacttgtgacatttggatagataactttggtggactttttagagaatagatgtaaaggatggcaagactggaagcagaatgatgtatcattgatcttaggaggcacttgggttttttgtgtgtgcttgtttgtttgtttttttgcatttcaatatcttctaattgggatgtttcactttagctattagtcagacagcagtcaaactatatttgtcatacctgctcatgagcatcaaagcttgccaaatgggtgtctgaggcttggaagaaaactctagagcctggagaggaacactcttaggaaatgctgcatcaccaaagcccttatgaaatgcacagaggactacattgcgtggaaattagtggacatccaagactgagtcaaaaaagtgaatcattaacaatcagtctctgtgaagttttagggatagttaccatgttattgttttctatttccctttttatgcatgcacaagagtgaaatatagaaatcggtatgtatataaacccatattttcaatacatgtaaaacaaaaatgctaagtggtaaggaaagcatttgtcacagataatttgcaaccttttttctttttttttttgaaacagggtcttgctctgttgcccaggctggagtgcagtggcgtgatctcggctcactgcaaccgtcggctcccggcttcaagcgattctcttatctcagcctcacgagtagctgggattacaggcgcccgccaccatgcctggctgttttgtatttttagtagagacagaggtttcgccatgttggccaggctggtctcgaactcctgatctcaggtaatctgcctgactcggcctcccaaagtgctgggattacaggtgtgagccactgcgcccggccttgtaaccttttttcttagcgggacataaaataatggtgaattttccaactgatggagtccaggaaagggataatagtgagcagaggggagataatcactggaatgccaagaaggaaaaatcaactcgatttggcagattactgggggagaggtaaaggtgaaggggaggaaatctaggatggtttccacgtttctggtctgggcaactgagtcgatgtggtaacctcgactggagcaggtttgggagggagttcaatttaggaaggctatgttgaaagaaacgaatgaacgaaagcttcgtgcttgctttggtgggacggaaccccgcatccggtatctggcaccaggagcttgtggctgtgtctcgaggctcctgcaccctctcagagcgttagttagaggcggggcggtggtgcggagcgagggccagagcagggcaccagggctgggcgcgcaccaggaagccgccgcctccagctgaatgcgcgagtcccggcgcggggtggggcaggggcgggcacggtcttcagtaactgcctagcgattggttgggaggcaccacaaatkcctaacaaactgctgaagcgccctccgaagggacagacctcatctccaccccgccccgtccctccgccagactggagcgcaaactatggtcgcattgatcactgaaggatcctcacagcaaccgctcctttccggagtcggatgagaggagagttgtgactggcaattggcaggggcggggcgggctaggcctgtagcgctgggcgaccgtcctgggcatggattgggccgcggggttgtcaccgttatccgggaggcgtggtcagcactaataaaggcggaggccggcgcggcagctgcagtaagttccagcgcagctagaccgcggggtrgtcggcgcgaggcggagcttggcagttccgtccacttcagccgcagcgtccctcrycgggtgtctcgccgcagcctccggagaggaacagaccctcactctctctgtcagaaaaatgtgagttgactctggtgtgggggctcggcacctccttgacaactctcgccccaagctcccgattctgcgggacggaaaatggcgcaatgcagcagctgcagcaacgcggggaactaccaccgcgcgccgcytccggaccgggccacccccagggaggggggccagcaccccattctcgcaccagccacagctagcaccccacgggcggggcaggggcgcaggggtcccacaatcattgcaccctctcctctcgtctgagtggcgcctcattctggttttggtatagtggagactcggagagggcgggggctgggggtggtggatggagacaactgggcaggggactcgaaaggtatttctgtcatctggctaaatcactactcagcgcctcaggaaagacagtcatgggtgcaactgccagttggtaacttatgttgccctacaatctctggatttgtttacccctcacccaaagtgtgatgtctagcccccctcatggcagtgagcaaagctgcagaaacttatctgccagttctctggcaccaggtgagcagctcagaaagactcaaggggtagtgggatagtggcctgtcatcccaagcggctgttcataccaaggccattcgtataggagatgtttttctatcaccgagtcttaccaaatagttggaggagaaatagggagagctgagctttccccctttcctccaacacacacagtttagtctccagcagtcttcaacatcacccccttcgcatgatcttgagggaaaactacggctaaacaaacgaagtacttctctgtcaagacctcaatatgtctratacagatttttctttctgattactaccctggcctggtcctagatgtatttatgttgcttctctaagtgacaaaaaagggaaagatttacttgtgttacataagggttgtaattatccctagatattttactgttgagtgtttccaactcccaacaagtagtaagtgaaattggccttgcaaatacttcatagccatttcactttttctttttgatttctatggttttaaccagatatgagtgttctatgcrttttgggcaagccgtagaattccagttgttttcattttggggagggggcttccagatagtatctacgtgggatgaacagaaggcaacagaaaaatcgtggtggctagcggggcatcacgaggtctctgaccttaatcttgtcattggtgcyaccatcctggactgcttccaacactggctgctacctactcattgaattttctgccttaagtcgagagctagattgcttagctagctcagtggcaggacaagagtcttgtggctcccatgactttgtgtctatctttgctttacctcctttgcaccttagagggaaatggaaaagtgattcttcaaatggggaatgagtcaggtgtaatctgctaccatagcctctctgaggagttattctctatctttttagactaaaagaaattcacttaatcaaggagaatgagcttctgggtattagttctattgtaattagtcaaataatttccwtttaggtgactttgtggtttcatttttgttgcatttactcttggactgctcctgtgaagtatgtttggtgagattctgcttctgtttgaggagttcttactgtaatttctattctccatcaaatttgagagatctcccccctgcctgtgggtgcttccttggccgagaacatctcatgacttaggttatacttctgggaattctttaggaggtgagtttagcctccatgttttgggacatggagaggagtttgtcttgaagaccacacactaactttgagtggtacagaatgagagaacattctctgtgtgtatagtacagtaaaccaagatctctctttgggatgtaagtaaccaagggagtcatctgagactgtcaaatccagaaaaggaagggacagaatgtctataatgcatgcacattgaggacaatttctagcatttttgcttcctgtctatgctcttggaacagtttccataactaatgtaattgctttgggccccagattctatctaagtgaaacccccattttctctgccaaaaacaaagcaaacaaacagtcctgactcactccacctacatagactttgcctttggtgattttccaagctgcccttatggcagccctgatttcctcatcttgtgtgaagcataaccaataactgggcatataaaccaataaccataaccaataacttgaatataaaaaggggtgagctgacagacattacagtgtacagcctccctcctggctcccttcacggactggcattgagtgtctgtggcttttccaggcgcacggtgcaagctaccagtggatctaccattctggggtctggagaatggtgacctttttctcatagctccactaggcagtgttccagtggggactctgtgtgggggctccaaccccacatgtcccttctgtactacactagcagaggttctccatgagggccctgcccttgcagcaaacttttgcctggacatccaggcgtttccatacatcttctgaagtctagacggaggttcccgaacctcagttcttgccttctgtgcatctgcaggctcaacaccatgtggaagctgccaaggcttggggcttccaccctctgaagccacggcccgagccctgcattggcccctctcagccacagtgggagcggctgggacacagggcactaagtccctaggctgcacacagcatggggaccctgggcctggcccacaaaataactttttcctcctgggcctccaggcctgtgatgggaggggctgctatgaaggcttctgacatggcctggagacattttccccatggtcttaggggctaacactaggttccttgctacttatgcaaatttctgcagctgccttgaatttcttctcaaaaaaatggtttttttctttagtactgcgtcttttcttctgccagataccctaaattatctctctcaagttcaaagttccacaaatttctagggcaggggcaaaatgctgccagtctttttgccaaaacataacaagagtcacctttgcttcagttcccaacaagttcctcatctccatctgagaccacctcagcctggaccttattgttcatatcactaacagcatttttgtcaaagccattcaacaagtctctaggaggttccaaactttcccgcattttcctgtcttcttctgagccctccaaactgttccatcctctccctgttaacccagttccaaagtcgcttccacatttttgggtatcttttcagcaacaccccactctactggtaccaatttactgtattagtctgttttcatgctgctgataaagacatacccaagactgggaagaaaaagaggtttaattggacttacagttccacatggctgggaaggcctcagaatcatggcggcaggtgaaaggcacttcttacatggcagcagcaagagaaaatgtggaagaagcaaaagcagaaaccactgataaacccatcagatctcatgagacttcgtcactatcaccagaatagcaccggaaagatgggccccatgattcagttacctcccctgagtccctcccacaacatgtgggaattctgggtgatacaattgaagttgagatttgggtggggacacagccaaaccatatcagcggggaaatgccatttaggacaaggctaggccatatgtccctgtagccatcatggcagaggacttgtttgagttgagtcaaaggatagccccagatgagatgtcttgatgccatcctggatgtccctgaaccccatccaaatgttgttgcagagtctttcatcttttacttcttgcctctatggtttgtctccctacttcagattgccaaggagcaagaatccattctagttttgtatagcctaatcataattgtttaagtggtttggggtgaggatgcatgtgagtcctttctttttgtctgtttttttagagatggggtctcgctatgatgcccaggctggcctcgaactcctgggctcaagcgctcctcccacttcagcctcttgagtagctgggactacaggtgtgtgctaccacgcccagctcctttcttgtcttggtcactttgtgtactctgcacatgtctttccacaggtctgctccagctcagccacctgctgaagggacagaagggactgccccaggtgggggtccccctggccctcctcctaacatgaccagtaacagacgactacagcaaacccaggcacaagtggaggaggtaggtagatagctgtttctctgaaagtttccaaatctaggagtttggaaacaaaagggaacttcttatcttttctccttttttcgtaggagaatagtcaaaggccctgagaggcaaagcaccctttagagttgcacagggccagacttgtgattctctggttgttgtcctttcctctgtctctggcaggaagcttagcwgctttgtttctgtgccctcctcaggtggtggacatcatacgtgtgaacgtggacaaggtcctggagagggaccagaagctgtcagagctggatgaccgagctgatgccttgcaggcaggagcatcacaatttgagagcagtgctgcmaagctaaagaggaagtattggtggaaaaactgcaaggtgaattttcttgtcccctcctccatcttttcctgggcttccactggtagaaggcaagaaaaccctcagcttctacatttcttccctctaatggtgcaggatctctctgaccagcataacgcttgggaggaaatctggaaagcctcctcttgagattgcattacccagaattggccaccagggtaggctagagtatttagaaccgctatcagggaaaaagtgataccctgaggagtttggaatggttagttaaggagctttaccccaaaggagttgcctgcaaaaaatttcacctgtctcatcctcagacacacccaacatcagcacaatggctcaggcatatatacatacacacacacacacacacacacacactatatatacacatatgtatatatacatatatatacatttatatatatatatacatatatatacatttatatatatatatacatatatatacatttatatatatatatacttttttctttttcttttaaatcagctttctcagattgaaatatatatttttaaataactgcaacttttgagaatgagctgaacacttcacagtgaaaattgaactaattggttaaatatccagagtctgtatctctattggaatgccttctaaagccccaagacaccaggaactaagcaaaaaggagctcaatgcaggtcctgtgatgaatctgaaaagctamagacatactgtggttatgatcccctgggaagcagaagggtagggcctctctaagaggcctgcaggtctcctgggtgatgggtggttttttccattgtcccaaggatggaaggaattctgtttcccactagagatgtggctcttttcctcattcctgaaatccaagggctcattttttgtccatgtttcctcagatgatgatcatgctgggagccatctgtgccatcatcgtggtagttattgtaagtaagtatcgctgaagttgctggtggggtgaagaggtgggaaggtcctggagtcttctccctgcctgcctgcctgcctggggagtggggctgctctgactgaggtatggagaccgctgctatgggatcgtcacctggttcgggacrggggaagggcagagacaagggatttctttgatggacaagccttccccctgcaamgcattgcagggagatggcgcctcctgttctgaggaagtggggctatgctgtgtgtcactggcttgggttggagggagaccatggggatggggcacttaacaatggaragacctgaatgtctggtaacttggtgtaattcrccctcttgttttctcctgtctctttctcttttccgtctgggacttcctgattcctgtgtccagtctacttttttacttgagaatgtaccaccccttccctgttgtccattgccatccacattcatgtcctctgccctctgtttgctctctcaacacacttccccacccaccgtcctccattccagcccaggcttctccatcacccattcctcctttttcgttgcgttcatttgcactctgtccctcaacactagaaatgctgctcgtggcacaatctaagtcattacccgaagagcaacagctggcgcctcctccctgcctgctttttctgtactctcaagttcccccaaagccccaaagagttggaggccaagggaaggggcagggaggggagtggctgaggcgaagtacccatgaagctgcccagacttgggaggagaagagtatcggtgcccatggtgacttctagaaaacctggccactggtaggagctagggaggggctgggaagatggcagctcactcagtactgcctggtcatgtggagctttccttcctggaccaggcctgragagggtcctgggggtggaccaaagtccaacttggtttcagtgcagtacccttttcgaaagtaaaaacttgttttttgtagttayttctaatctgttcgtccaggattttccgtgtctttggggatcttacaactttactttgttctccagaggcctggagaacacttagggattgtgaaaatagcaggacttgtttccatcctagaagcagtcccatgtgcttctagctggaaggagctttctcttctttacattttctacagcattctgtatgagggcaccaaataaatccatctagctggtagttttatctagccaaataatttaacctagctcccagttaattgttggcataaagagagagattgcctgttagttatagagaaacagtgagtcaagtgcttaatttgaaagtaacaagctcagaggaagccactccttgccctcgttaaagagggtcctgttcctctcttcctgttgatgaaggagcgtgagggtgttagcagtgtgagatctttggacacccatggaatcctttcctccacaccacccgtgcasttgccaaagacagggatgaggcaagwggttcttcctgrggcccggccgatcctcaggatgcagagaagtcatgtagacccaccagccccaccttggggggaggcgtgccagcctgtgtcaggtgtgcttgtgtattgctgtgctgtcatggggccctctccttgagagccgcctctctgttcttcctgtagtatattcccctttgaaccaccctttcctgtctgaattctactttgcctcctttctcttcctcctctttgcatggtttgtgtgtatagacagtggaacctgaggatgggatctgctcagcctatcttcggggcaattgctgagcttcaggatgggctattaatgtgggataagcccaggtgcaaggggaggagggcaggctgggarcagagcggagaatgcccatggccctttattccttcttccctcggtccacgaacaggaagaggctgaggccatgctgggcagggtctggatgcccactttccatgcagcagcatttcattgctcaaaaccatccttcctttccyttcgcccttgtttcccacattcccttcgtcctgcccaagggcgggactgaagagctggaagaaagcagtcagtaccctcccaacggcccccctcgaaggtctccactctcctctgggctcctccttgcctaatgcagggggtcaccgctggagaagaaccaccactgtcctcgatgtgtcccaagcctggagcgaatccgtcctcttggctctcccagccctatcacaggaatcattcctgggtttctgtccctctgaggctcaccaggtgtagttggccttgttctttgggggtattagcccttctactttctttctcacccaccctgtaccctcttctgtgtgtctytgctatccccctttcctcccaccacccatgtgcatgagcaaatgtgcaacaaaaccctgggactttgcagtcaaatgaagctgagcttcccacatcccgttcttcggtttgccatgagacgatgtggggtttccactgtgtgtctgtcatcacctctttgtctttttttcctaaccctgatctcatacttgtatagagtaataacaacagttgtacttccaccaaaggcatgtkgcatatttaccaatgtcatgtattctgaacaaaggcaaaaaatacaaattcctaccattaaactggcttggttgttgtttgggttggagtagctgtgggggcttggggaagggtgtcgtttctttctagtagtctcatgtcgctttaggtcagctgggctggcttacacgcgctgtgcggtcttcatggagatgggagctctgtgtgtcagcacaggaagtggtctcccagcgttcagcctgaagcagcccaagtcctgtaggtgctggtaagaggaagtgaagacaggaagttgcgtgggcatctcacactggcaaacaagcacaggttccctcaggcctcttccatctgcctcctgtgctccttcctaggtccttggcctgcttgtcctgtcccaggggatgtgcccagataaggctgtcagtgaacacccccttacccccttttccccatcatcctcacgtacagttttggtatgctgagttccaccgtattgattaggcacattttagaaacgaataaaaaggagaagtctctccttgcagctgagggagtgaggcatttgcaggtatcctgaacctcccagcagtcacccgagggagcagaaccctaattgcagctgaggtgcaactgagatggagccacgggggtgcctctgagggcctttgtttcatacttaaacactttgcaagttggagccgctaggcttggtgacagggctcagttgggaccagtgtggagaaagacaggaaagtggaaaagcttggtcgcagcagacacaagggccttttattttgacagagctgagtttgggaggggtagcccagccccaacccatgcctcattgtccctcacttgttccttctccatttcctccagctttgttttcctaccgtcacaccaccaacctggctctttggtcttatcctccatctggacattctgccttcttcttgtcccctcacttcttcctgttctctgccttggtgcatgagcccagggtgcacagtgaaggaaggcagaggcctctgcagagccaggcccagtgccccatgagctggtgccaccttcatgtatttttagctctgtgacttgacttagagtccttctgggagcacgtgactactctttctttctactctgaggcaggagagtgacagactttagtgaggtagctaggagaaaacgagggaacacgactggtttcattttcatttagggcaaactcaaaagcaggaggctgtgatgggtgggtggctggagcttggggcatctgggcttccaccctggtctgggcgggggggtggttagagtgggtgaggtgggccagggccagagccaagggcacccaggctcttaccttgccgtctctgaagccccaggaacatcagtgcaagaaggaagagactgctggcaaagatgactcccaaggctgttctccgctctgtaggtgagagcaacgtgggcggggatcatcgtgcgcaggaatcatgagctgagccctcacctgcagtgtccaccccagggaggaggagctaaggattgtgtgtgtgagtccctggttgaggagcctggaacaaggcactcagcagcatttgttcttattcaaggttgctggatacttgtgagttactccacacagaattctctacctcttcccacctaaggacaaggttttaaaaattgctttgcaagtgagatttaggtgggtttatttgttagcacttaacttgcctggacacagtggctcatgcctgtaatcccagaactttgggaggctgaggtaggtggatcacctgaggtcaggagttcgagaccagcctgggcaacatggtgaaaccctgtctgtacaaaaaatacaaaaaattaactgggcatgttggtgtgcgcctgtggtcccaggtacttgggaggctgaggtgggagaatcacttgagcctgggaggcagagtttgcagtgagctgagatcgtgccactgcactccagcctgggcgacagagtgagaccctatctcaaaacaaaacaaaataaaacaaagcaaaacaaaaaaccaccagttaactgggattttgtaaatagttggggaatgatgtgagctgaagtgaaacctcagttttggggaagttcacagtctaatgagcaaccaaataatgcccagtgctcctggatgtttccacttcaagttgcgggttctttcctgtccctttcctgcttaaaacctctcgacaggcagggtgcggtggctcatatctgtaatcccagcactttgggaagccgaggcggacagatcacctgaggtcaggagtttgagaccagcctggccatcatggcgaaaccccatctctactaaaaacgcaaaattagccaggcgtggtggtgcgcgcctgtaatcccagctactcgggaggctgaggcaagaggatggcttgaacccaggatatggaggttgcagtgagctgagatcataccactgcactccagcctggggaacagagcaagattctgtatcgaaaaaaagtaaaataaaataaaataaataaataaataaataaataaataaataaataaataaaacctttcaacagcatgctatggctctcaggaagttccagcttgaaggcccagtgagatctacagggtttaattaagcccgtaaggggaatccggttgcctgtttttcacattctctctttaccattgattgataggtgaccttgggcaaattcattgacatctgcaagtgccagtttactcacctgtaaaatgggagtcatgatccatgaaatcatacatttaagtgctttctacactgcttgattcatgtaaatgctcaataaatagaattacctccgaagcttcagagccactttccctttttcccatataccctaagctctagctgtgctgaattacttgcaattctccaaattctctttaggctgttttatgatttggctttcatatatgctattgtttctatcttgagtgttcccttccctctaagctagttaacttggctcaaatgccatcttctctgtctacttagtcttgtctctattactggactaagctcctggagggcatgatcaggaattattcatctgtgatctccagccttaagcacattgcctgacaccctggaggctggagtataatgaagtctcaggggatgtgtggtagaagctgtggcagctgccgccttgggaaaatagtcaggagcagaggcaggagcatgaagccagggctgcgaacaaagtggatgggcagcagaacaaggccatagatgagctggggcaggagagccatgagccctagtgtggaggtggggaaaaggaggacactcccagtacctggtgggacaacctgggtgctggccccaaggggctcctccagagagatgtgtgtgacctggcaggtgtaagtggcacctgcagagccaggttctgcggtgagagaggaggagatgctgtaggtgcctgccacgctttgcctgaggctggagaaggaggcaccagagacttgggctggggatccacccagctcctctcgggtccacgtcaccaccacatccagagggtaatagccagcaatgtcgcagatgagggtgggcagcagagcttcgtttgccaagctcagtcgtactttaggggaagctggagaaagaatgaggaataagattacacatggatctaactggggacagcggaggagcctgaagccttttcttcctgccaagatgagagtagattgtggaggctacagtgtcccttggtggtgtaccaaggcgggggtgtgtgaggggcccacctggatgcaggccgtaagggggcagggttacattttccagaaaacagatagtaaagccaactaaagattggctggcttcttactgtcattctaagccagttttttttttttttttaagatggtgtcttgctctgtcgcccaagctggagtgcagtggcatgatcttggctcaccgcaacctccacctccggggttcaagcgattcttctgcctcagcctcctgagtagctgggactacaggcgcgcaccaccatgcctagctattttttgtatttttagtagagacggagtttcaccgtattggccaggctggtcttgaactcctgacctcgtgatccgcctcccaaagtgctgggattataggtgtgagccaccgcgcccggcctctaagccagagattttaaaggatagcagtgataatggtcagaaccgcttccactgctctgccttggtttgctgctgctgctcctcaggatgtggtccaaaaggactggggtgatggagacagccagccacagcagggcagcaggatcctgggctggaaatctcttggtggaattatcctggagtccaacgggactccttatctgatgccatctgtgcttccatggtgaagatggcatttaagttgtgggattgaagcctgcttctcaggaaatcattcttgcatttgggtcccaatctggaaacgctcccagtagacatgttatatccccttccctgggataaccatgtcctggcctcaccttggatgttgagctggatgatctgctgagctcggtacagagaggtggtgatctggcaaatgtaggtcccctcgtcctgtatagtgaggccgggcagggtgagggaggcatccctggccatgcccagttgtgcaggctccagggtagcgcccttccgcacagcctgcccctgccctgcggtccagctgtacaccaactgacccctgcccttgtgctgcagtcgccactccacactgatgaggtccaagcccggtgccatggagaagccacagtccaaggaggctgaggaccccagcaggaagctcagggattgggtctgtgtcatcacctggaactccactgtgaagaggaaaagaggggtgatttgtgggctacttcctccttgaggtcacctgatctccaagctgtgggcatgttgtgggcatacacctgcctcttcctcgcctgacaggccggttgagcttattttccatcacatggaaccacaaagaaatggggctctggaaaggtagcatggtacacatgatggccatcaccattttgggatcacttactctaggataatttagtgaaagctatggatctcccaccaggaaaaatacacatgcaaaattaagagttaccatcaatcttcaggtaagaactactagagtagcagaaaaagctctgaaaccctggttgttccacttactggctccgtgacctttgacaagtcacttggtgttaccaagctcacctgcttaagcaaggatgctgtgaagactagaaacaatagtttaaaaagtacgtggtggctgggtgcggtggctcatgccggtaatcccagcactttggggggccgaggtgggtggatcacctgaggtcaggagtttgagaccagcctggccaacatggtaaaaccctgtctctactaaaaacacaaaaattagccgggcatggtggcaggtgcctgtaattccagctacttgggaggctgagacaggagaattgcttgaatccgggaggtggaggttgcagtgagccaagatcgcgccattgcactccagtctgggcgacgagtgaaactccgtctcaaaaaaaatgtaaaaaacaaaacaaaacaaaaaaacacacgtggtattgggaagcccaggcgggtggatcacctgaggttgggagtttgagaccagcctgaccaacatggagaaaccccgtctctactaaaaatacaaaaattagctgggtgtcgtggcgcatgcctgtaatcccagctacttgggaggctcaggtggagaatcacttgaacccaggaggcggaggttgtggtgagccaagatcgagccattgcactccagcctgggcaataagagtaaaactccatatcgaaaaaaaaaaaaaaaagcatgtgatagtagtatctgtgccaaacatgcttaacctaaatccagtcatgaggaaatgaggaaaacaatcagacaaatctaaatgttgggatactctacaagaccactagcctggacccttcaaaaa

SEQ ID NO: 6836 - DNA, 25041 bp, Homo sapiens
tgaagctggaaaccatcattctgagcaaactatcgcaaggacagaaaaccaaacaccgcatgttctcactcataagtcggaactgagcaataagaacaactggacacaggatggggagcatcacacactggggcctgtcatggggtagggggagggaggagggttagcattaggagatatacctaatgtaaatgacgagttaatgggtgcagcacaccaacatggcacaagtatacatatgtaacaaacctgcgtgttgtgcacatgtatcctagaacttaaagtaaaattttaaaaaatgcagtttcgagctcggggttaagatggtaaactagaagcaactcatgtgccaggctatcacggaaaggaaacaaaagggctagtgagcattgaccctgcaggccaatcatctgagaaatcatgtcagggattcgggatccttcaagatgtaaggggattacagagagcagaaaggggtgaagctagataccagcctgtccgggctcagcgtggatccaggagaatttctccaacactggaaagggtgagtgagtgagaaccccctaggggattcacactctcgacagggacctgtgcaagactggaaatgggagaatgcccctgaaacccctgcccacccccgaccccaccaccgtgcttctagactgaggcagagagccccccagacattttggagggcaactctctagtccaaggagacttctgcaagccttgtgcccccaagaagaccagcactggtgccatagcccaataaaggctgcagtcccagtgcctaggagcagtaagattgccccatctcaaaccctttctggatggggcttggtgccagcttccagcctactggtcctacttctctgtctgaactcagccagtgaccatagcctcctgttctcccaggaagcacctggagggcaagacaggtgactacatctacccctgccactggttgccaggcaggcaacacttgctagagcttccatcccagtggttccacttctgtctgaattcagccagagagcacagcctcctgttgtcctgggaaacattcaggcaaggtaggcaaccccacctaccctggcctcttgtagccaggcaagccatgcctgctagagcttccaatttatgtcccacagccaaattctcatttcccattcctttataaaattcttgtttctgttggttcaacatacacaaatcaataaatgtgattcaccacataagcagaacttaaaactgaaaccacgtgatcatctcaatagatacagaaaaggcttttgataaaattcaacatccattaatgttaaaaatcctcaacaaactagatattgaaggaacatacctccagataataagagccatctatgataaacccaaggtcaacatcatactgaatgggcgaaagctgaaagatttccccttgagaactggaaaaatacagggatgcccactcttagcactcctattcaacagagtactgctagcatgagcaagcaggcaagagaatgaaataaaaggcacctagataggaagagaggaagtcaaactatctatctttgcagacaatttgattgcatacctagaaaacccccacgtctctacccaaaagctcgtaggtctaataaacagcttcagcaaagttccaggatacaaaatcaacatacaaaaatgagtagcattcctatacactaacaaaatccaagccgagagccaaatcaggaagacaatcccattcacaatagccacaaaaagaataaaatacctagaaatacagctaacgcaggaggtgaaagatctctacaatgagaattacaaaacattgttcaaagaaatcagagatgacacaaacaaatggaaatgctcatggataggaagaatcgatattgctaaaatggccatactacccaaagcaatttacaaattcaatgctattcctaacaagctaccaatgacagtcttcatagaattagaaaaacctattttaaaattcctatagaacaaaaagtgctcaaatacccaaagcaatcctaagcaaaaagaacaaagctggaggcatcatgttacctgactttgaactatactataaggctacagtaaccaaaatagcatggtactggtacaaaaacagacacatagaccaatagaacagaatagagagcccatgttacctgactttgaactatactacaaggctatagtaaccaaaatgcatggtactggtacaaaaacagacacatagaccaatggaacagaatagagagcccaaacttaagggcacacacctacagccatctgatcttcaacaaagctgacaagaacaagcaatggggaaatgattccctgttcaataaagggtgctgggataactggctagccatatatagaagactgaaattggaccccttccttacatcatatatggaaatcaactcaagatggatgaaatgtaaaacctaaaaatattaaaaccctggaagataacctaggaaatacgattctcaacatagaaaccagcaaagatttcatgatgaagacaccaaaagcaactacgacaaaaccaaaaattgacaaacgggacctaattaaactaaagagcttctgatagcaaaagaaactatcaacagagtaaacaagcaactgacagatgggagaaaatatctgcaaactatgcataaccaaaggtctaatattgagaatctataagaaacttaagcaaattaacaagcaaaaaagcaaacagctccattaaaaagtgggcaaaggacatgaacagacactttttaaaagaagacatgcatgcggccaataagaatatgaaaaaatatgtggtgtttggttttctgtcctttgtgatattttgctgaaaatgatggtttccagcttcatccatgtccctgcaaaggacacaactcatccttttttatggatgcattgtattccatggtgcatatgtgccacattttctttacccagtctattgggttggttccaagtctttgctattgcaaatagtgccgcaataaacatatgaaccaacatggcacatgtatacctatgtaacaaacctgcacattgtgcacatgtacccaagaaattaaagtataataataaaaaaagaaaataaatttcttccttcagataccctaaaaaaaagaatatgaaaaaatactcaatatcattaatcattagaaaaatgcaaatcaaaaccacaatgagatatcatgtcataccagtcagaatgactattattaaaaagtcaacaaaaataacagatgctggtgaggttacagagaaaagggaacacttacaaactgctggtgagaatgtaaattagttcagtcactatggaaagcaatgtggtaatttctcaaagaacttaaaatagaagtaccattcaacccagcaatcctattattgggtacatacccaaaggaatataaatcattctgccataaagacacatgttcaagtatgttcatcatagcactattcacaatagcaaagacatggactcaacctaaatgcccatcaacagaagacaggataagggaaatgtggtacatatacaccatggactactatgcagccacaaaaaaaagaatatcatgtcctttgcagtaatgtgaatggaactggaggccattatcctaagtaaactaatgcaggaagagaaaaccaaatactgcatgttctcacttataagtgggaactgaacattatggacacaaagaggggaacaacagacactggggcctacttgagggtaaagaatgggtgaagagagaggactgaaaaactacctatcatgtactatgcttatgagtggggtgactaaataatctgtacactaaagcctcatgacatgcaatttacctaaataacaaacctgtacgtgtatacctgcacataaaatataagttaaaaaaaaacctacaatgagatatgatcttaccctggttaaaattgcttttatccaaaagacaggcaataacaaatgctggcaaggatgtggaaaaaaggaaactcttgtacactgttggtgggaatgtaaactattataactactatggataacagttcggaggttcctcaaaagactaaaaatagaactaccatatgatccagtaatcccactgccaggaatacatcaaaaagaaaggaaatcagtacatcaaagagatatctgcactcccatgtttattgcagcactattcacaatagccaagatttggaagcaacctaagtgtccatcagcagaagaatggatacagaaaatgtggtacatttacacaacggagtgctctttagccataaaaagaatgagatcctgtcatttgcaacaacatggatagaagtggaggtcattataagtgaattaagccaggcacagaaagacaaattttacatattctcacttgtttgtggaagctaaaaatattaagacaattgaacttatggagatagagattagaatgatgattactagaggctgggaagagtagtagcgggggaagtggggatggttaatgggtacaaaaatatacttagatagaattaataagatctagtgtttgttagaacaagaggatgactatagtcaacaatagtttattgcacatttcaaaataactaaaagagtataattggattgtttgtaatacaaagaataaatgcttgaagtcatttaccctgatgtgattattactcattgtatgctcgcatcaaatatctcatgtaccccataaatatatatatctactatgtgtccacaaaaaatttttaaaaataataagaattggcttaaaaaatgctgtttcctgggccccaccctagactgatggtcagatacctaatgttgacaaaaaaagtcaaactctgtaaaacatttgaagagatttattctaagccaaatatgaatgacctatggcctgtgacacagccctcaggagatcctgagaacatgtgccaggccacaacttggttttatacattttagggagacataaggcatcaatcaatacatgtaaggtgtacattggctaggtccagaaaggtgggacaattggaaacagggaagcggggcagcttccaagtcataggcagattcaaagattttctgattgacaatttgttgaaagagttattatcaatagaaaggaatgtttggagacatccaatagaaattcaatagacaatcattagaaaggaatgtctgggtcgtggagaccaaggttttattatgcagatgaagcctccaagtagcaggcttcagagagaataggttgtaaatgtttcttaatacacttaaaaagagcatgttctggctgggtgcagtggctcatgcctgtaatcccagcactttgggaggccaaggtggttggatcacctgctatcaggagttcaagaccagcctgaccaacatggcgaaacctcgtctctactaaaaatacaaatattagccgggcatggtggtgggtgcctgtaatcccagctactcgggaggctgaggcaagagaatcacttgaacccaggaggcagaggttgcagtgagacgcaatcatgccactgcattccagcctgggcaacagagtaagactctgtctcaaaaaaaaacaaaaacaaaaacaaaaaaagagtgtgttctattagtaattccaaaaggaaaaaggatgtaatgaggcatatccagcttccccttcacatcagttttcaggttaactttggaatgcccttggccaaaagcaggggtccagtcacatggttggtgagtatggccttagaatttaattttttggtttacattaggaatgcttccacattctctcaaacaaattttagtcacagttttgaataacgtactctggctcagccattgcaggtctcaagccgttaggtttcattttcctcctcccaacgattttaaattagtttcactttccagtttcctcttccttcccctaaaagcaattactcaaaaacggagaaaacatcagctgatgcgtgccctactctcccacccctttatrtagttccttcagtatttacttgaggcagacaggaagacttctgaagaacaaatcagcctggtcaccagcttttcgsaacagcagagacacagagggcagtcatgaggtcagtgaaataagaatgcataatcatgcttgtttttgagtgcaaattgtaagttgagtttcttactgtgcaggcacattcctgaattgtcctgatgtttatagattcaatatgtctttatcagtctgagcatttgtaagatgtttgaggggtttttccctgtggctttttttggtgtacacacaggcttcttaartttctggaatggttccctacggaactacatggsgggaggcagggtggggaatgcatcagctcatgtttcctccctgtgtgcagctatttcctgcaatgagaggaaggcttggcaggagcggtgtatttcactcagccacaaacttggctgattcaagggtagacctaagggaattactcttttgggtttttctgttattgtcattttgtttgaaaagattaagtcacaggctttttttcttgtaattttaaaaggaggaatttattttcaacagatattgtgaaagatacaatcagtactgcaaacccactcatgaagaaggcaattttgccctgaaacgttgcattactttaaggtgggaagtggaagaaacaattcttacaaatgggcatttttgtcatttcttatataaaaacaaacccaaagcttagcatttatttttattgatgtagtgaatgctggtcagcagcaaaaaaagaatttctcctcaaaagtgtaatgacctaatctattatctaaaactagtctaatctctaatggtgggaagcagatcagtggttgcctggagatggtggggattgagtaggaaggctcccaaaagaatctttttagaatcataggaatagtctatagggaggtagtgatggtggctacatatgcataaacatttaccaaaactcatcagactatacactgaaaatgggtgcatcttattgtatataaagcataatctcagtaaacttgatttttaaatttatatattgwcctcctggagttcttcaggggatagcatgttagggagaactaagagaaaaggatgcctttcccaccaagcatctctaggaaaggagtgaggaggtgattgccagggagggaagaccccatcgaccattcaggggggcagaaaaggaaaactggattccctaccttactctgccccaaggacttgaagatgctctgcaatgtcatgtttggggatgagatgggtaagaggaattcactgccaaatacctcagtatatagaatacccttttatatagaataagttcctggtcaagagtgatgttaattgtgtctgtgtgagtgggattgaccagagagcaaggcgtcttagtagccagcttgcaggaaaggttttacagggtcctgtctttaggtgtgtctatagccactgacctgaggaggtctgaggggggctctctgaactatgctggactcaggttcacatcaaggtgctcctatttccagaggctataggaacaggaagagattgggctgctcctccccagttgtgctaaaaatttccaaatgggaaaatcacctggagaactcactggcacgtgccagctgatgggcatcctcctctgccccatccactgaggaactctgttgctccctttacacactcacaaattcacttaaaattataacacaaatatattagtaccagcaatcatggtggtaacatttctttgtgatctgtagttagtggtttcatgcaagtccgtgtgaagagaccaccaaacaggctttgtgtgagcaacaaggctgtttatttcacctgggtgcaggtgggctgagtccgaaaagaaagtcagggaagggagataggggtggggccrttttataagatttgggtaggtaaaggaaaattactgtcaaaggggggttgttctctggtgggcaggtgtgggggtcacaaggtgctcagtaggggagcttttgagccaggatgagccaggagaaggaatttcacaagataatgtcatcggttaaggcaggaacaggccattttcacttcttttgtggtggaatgtcatcagttaaggcaggaactggccatctggatgtgtacatgcaggtcacaggatatgatggcttagcttgggctcagaggcctgacaagtgggcactgtgttaaacacgttttacgcatgacctcatatcacccttccaacagccctaggaagtaagagctattatttctattattagcctcattttctagatgaccaaaatggggcttagaagggcaaattacttgcccaagacatcagatagagagcaggtgtcagagcagagtcattaatggaggcaccaaactctactgctgatcatctgactctatgcccaatggccaaaaggtgaaagatcttaatgctttcaactatgctcactttagagagggggccagggatgggcttcctatctggagagtaagggccagcctttgatggttacccatgccttagagtggccaaagccacaagaactgaacccagatcttggagaagggtgaaagtggttctccccagggcataattttctatcatttggatgaagggaaaaggaaattcatcctagggcattttaaggataagggaatgaggctcagtgatatgactcaagaaatatcccagaactaagcaaagaggtcactgaaatccaggtgtcctgtggttttcttcccttcactcaagatgcctgataatgctgcttaattcaccacattagctccayaaataaaggggaaaactgctttttaaaatacctctatgacagcacttctcaaaatgtggtacaggaactcctgcactgaatttccaaggcacttgtgaaaacacaggtttctaagctcacatcagattcactgcaccagaatctctgggagtaggacygcatagtcagtactgtcaatatacaataatcagaaggctcaggatccagttaaaagagtttattcaacaaaaagttgagggcagcagtcccaggagtagagctgcacccaagaatggtgaacagtacttccagtgtagagaaaaatgaggactgtttacataggcaaagacagaggtgttcaacagaatgacaacttctcttgttgttgttgtttttgttgttgctgttgttgtttttgagacagagtctcactctgtcacccaggctggagtgcagtggcccgatcatggctcactgcagcctcagactcctgggctcaagggattctccyacccagcctcccaagtagctgggactataggagcacgccactatgcctggttaatttttttgtattttagtagcaatggggttttgccatgttggtcaggttggtcttgaactcctgaccttaagtgatgcacccaccttggcctcccaaagtgctgagattacaggcgtgagcctccgtgcctggccaacattttccatacagaggctaacatacagatatacaatttgattggctactattgattacagtccaagggaattgcttaatattcttttgtaaagaggtaacatggctggccgcagtggctcacacccataagcccaacactttgggaggccgaggagggcagatgcttgagctcaggagttgragaccagcctgggcaacatagtgagaccccgtctgtactaaaaatacaaaaatcagccaggcgtggtggcaygtgcctatagtctcatygactggagaggctgagatgggaggatcgcttgagcctgggaggcagaggttgcagtaagctgagatcgtgctactgcactccagcctggatgacagagtgagatcctgtctcaaaaaaaaaaaaaaaaaaaaaagtaacaatcaaaagggtctctatttccataacatgaggtctacgttttaataaagactaggttgtctgaggccgggcacggtggtgcaaggctataatcccagcactttgggaggccaaggcgggcagatcatgaggtcaggagttcgagaccagcctgaccaacatggtgaaaccccgcctctactaaaaatacaaaaattatccaggcatggtggtgcacgcctgtaatcccagctactcaggaggctgaggcaggagaatcacttgaacccgagaggcagaaattgcagtgagactagggagtctggttaacatgtaacccctcaccacacaggtcaaagagcaacagtcatgcacctgagaaaaaaaacagtcacgttacgtgagtcagttttcagggcttaactttgcctcttgacataacacatttggaagcttctaaaattttattttctttttacagtgcctttttacaactttcaaaccacagttttccaaatctgtctggaacatgttcctggcgtgagtgagctcagttctcacagattstgtttcagtttcccctcaagagggatcttgatagggttccawcagtttcactttcctttcccctttcataaaagcacagacctaacagyaccctgggtggaaacctcttcagcatttgcttggaatcagtaagctaaaaacaaaatcaaccgggaccccagcttttcagaactgcagggaaacagccatcatgaggtaaatagtccctgcttctctgataggaaacagaatttcttatgtacaacttcctgacttatgctatttcagtgtttgcttagagatgaaatatrcatttatctaattcaagcataaatctgccttaccaattcatgcatttttatttctgtagctctttgtgatgtatagagwtaggcagccaaaggacacagggaaatgggagctgggagctgggaagggwcggggcatattgagagatcctagagagcccatgctcagatsctttcaggtaaaatcgggccagtgaaagctggggcctggagggaagttactggaggtyctggttcgtcttttgtttcttatatttagaaagcctaagtcagaggtttgtggttttgttgtgactgtggttatttttaaaccatgcttgcttctcagcaaatgtgtcaataattaattcagcactgcaaaattccaatttatrttgaggtcacttttaccttgaaatgcactttttcataattgggggatatgtctacttgagttgtcctctagcaggtctagtgacctgctaagcctcccacgtgatcaatgaacagggagaaggtgttgcttgcagtctctcaaactgtgttctgcgagtggcctgaatcatatcaacctgagtcttctaatagaatgcaaatttctaggtcctgcattctgaaatcctgattgagtaaaacagaaataaggtccagaaacaaacatatatttaaagaggaccacaagtacttcataggcatactgaatggcttacagaagaaatgtccatctccaaatcctctcttccttaaatgcatacaaggcttcctgcattgtatgtgtgtaaatgtgaaggaggaaaccccaagaggcaggaggggggaggggtgggaagaatgttgaaataaagcaaagcttgtttctgggcacagtggctaagcctgtaatcccagcactttgggaggctgaggcaagaggattgcttgagcccaggggctccagaccagaattggcaacaaagtgagacctacaaaaaaacaaaaataaaataaaaataaagcaaagtttgactgtttaaagggtaatttaagtatgagaaactggtgattggaaatcactgccaaaaagggaagtcttcccagagccttgctgctcacagtgtggtctgaagctgagatcccccgggaggttgtaagaaaggtaacatcccagcttatctgaatccagatctgcattttaaaaagatctccagatgtttgtgtccatatgtacattaaaggttgagaagtccggctctggagagttccttcacttgctttctgaagtgatggactccttggattgggcctgttctgaccaaccaactgagcacaggtctgccagttccttcacgtagtcagttggagcataaccagcacatgctggggacaagctgcacatgtgcagacaagagtggggaaatccccactcttaccacttcaagaaagccactttctgaaaatttcaagattctactctagtaatagctttgactgggaaggagatgtggtatctaccctggagtctgtgggcaagacaggtggtcatgatctgggttaggtgagagactgtaactatgttgattctggggatttcctaaggactagcagcactagctttaactgctttagtaagcgaaatcttatgtctgcaatccgaggtcatgggaaatctctttctggacctgagggaatcctatctccctaaggtcttctactagatgcagatccaggtaggactggcattctactccccaagtttcacctgaacctagctattctgttttttcttctttttcttttattctttttttttttttttttttttttttttttttttgagacggagttttgctctttcgcccaggctggagtgtagtggcccgatcttggctcactgcaacctccgccttccggtttcaagcaattctgcctcggcttcccgagtagctgggattacaggcgcctgccaccacgcccggctaatttttgtgtttttagtacaggcggggtttcatcatgttggccaggctagtctcgaactcttgacctcatgatccacccgcctcagcctcccaaaatgctgggattacaggtgtgagccaccgcgcccggccacctagctgttctttatcaagtgactgtagtcatcatcccacctgcctgcttgtatttatttaaatatctgcattaattactgttaactaacttatttatacatataagaagtattcagagtaactttcaaaaacacatatgagataaattattaagtgaggaaaccttggcaattggagtatttgttttaagagggcaatagtattataatgaaaacctcctgacctgtggctctggggttcatgtttcttcttatcgaggtctcaggccttccagtccaatatattttgctccaaattttacttcaaggagagatcaagtatcaaatacctcatcaaattggagactttagggagtaaggcttaggaaaaatcaagagaatcaagggacccaattttcagtgggttttataatcataaagccacatgagtagttgactatcttcctgaataaattgttccatgttatcattaaatgtctcagcctggccagctctcgcattggtaaagcattggtggggatggaatatccctgagagatccatattcagagctctttcacaagtccagaaatgttcagtgtgcttttctgcttgtccaacactttcttgagcaattgatatcttctgaagctgacacatgacagggtggaagtatgtttcatctcagagggagaatcttgagctataagtgcttaaaatttagtttggtaagatccctggtgcattgatatgtcaaagccttctgccctccaaaaaaaaaaaaaaragagagagagatagtgtcatcagacttgcaaggtggtttccggtttcgttgaggcaaatacatccaacaatacatccaacatcacctgtcatcctgcaggtccactggatactctctattaattactagagtgttcagctatttttttcaggcacccatatgtacctacaaatctgcagatacattctattgatctgagactcacactttctccttttaaccttcctaattcacacatcagcaaagttaactcatgtttccatgactttattatgatttagtggcataacagatataagcagagttgttcaattatcatcgttataacttacttttggtattcattttttaaataattgctaacttgacttttgacttgtagtccttcatacagggtagttagaatacccaggtaaagccaaattgaaaacccctagggccaggtgtggtggttcacacctgtaatcccaacactttggtatgtcgaggcagaaggattgcttgagaccaggagtttgagaccactctgggcaatatagtgagaccctgtctctgcaaaaaaaggaaggaagggaggaaagaaggaaaatagggagggaggaagggagggagggagggaaggaaggaaggaagggaggaaagaaggaaaatagggagggaggaagagagggagggagggaaagaaggaaggaagaaaggaaggaccctataatagacagggaagatattgacactggaaccctagacagggaccaagaaaaggaaaaggactgtccccaaatcaaagcacacacataaagaggctagccggatgtagatggcaacttccctcctcactcccattgcccttgagttgattctgcatctctcactataaagcatttcatgtgcaatcatattgggccaaaaatggtttagatcagcattactggagagacagacaggaagtataatagatcagtacacttgcagtagcggtgtgagggccagtgctcgtccatggtaaattgcaaataaagtcaatggctccttgtagaacaaaatgcattcaatttaaagaattttgtttattctgagattactttttcagtggcaaggaaaattctttcttttctatcttttaaaataaaatattggtcagaatagatggttggtatcttttcagatacattagcagccctatttggttcataactttttttctgaaattgtgcttgtctgtgaaatccaaaaataaggacacttggtttaatgatttctggaggttctttccaatcttatggtgccgtgactccactggtaagaaggaagaagcacaaactcaagagtgagggacatacagcccaagccccaggcaaatgtagataatgggaacacacttagagaactcttgcaatttatccagctaaataaggcaagtgatctcctttagtatcttccaactacaaaacaaaaatgagtccattttgtttgtttgttgcaacaaattcattctgtctgggaatctggcctgtgtggtggggagactacttcagtcagactcaagctgagcctccgtgggtctgtttgtaagtggtggaaaagatgaagggaaaaatacctaaatcacataacatgttggcagacatatctgggcttttatttctttacatgtctcctaacaaaactgaaagcacctggcgggcagagaaggttgggataatctctatttttcttagtatccataatatctaataaagtgacaaaaagaggtascccaataaagagtcatgggatagctaaacaaaccttacccagaatgtacaaggaatgagaactgacttggtattttttaatttttattcttacttttattttttttgaggcagggtcccactctatcaccctggctggagtgtaatggtgtgatctcagctcactacaacttttgcctcctgggctcaagtgatcctcctgtctcagcctcccgaatggcgaggactacaggcatgtactaccatccctggctaatttttgtatttttagtagaggcaggctttcgccatgttgcccaggctggtcttgaatcctgggctcaggtgatccacccgccttggcctcccaaagtgctaggactacaggcatgagtcaccattcctggctgacttggtaattgagcagcgtgagagagatctcatttcctgtcactgaagctgcctcctcttacccatcttacctcacctcctgcatatctgcttacacggtgtaagggatgtgctttgtgggtgtctgcacagactgtagctaaagaaaagtgaatgtaggaagcaacttacaatttttccaaccttgtgatggtacaaaagtgataattccattcttgtttttcacttaaaatacagtattcaataagttacatgagatactcaacactttagtataaaataggctttgtgttaggtgactttgccccactgtaggctaatgtaagggttctgagcacatttaagctaggctaagctatggtaggttagatgtattaaatgcatctttttatttacaatgttttcaatttatgatgggtttatcaggatataaccccatcataagtcaaggaacatctatatataaagagatttattatgaggaattggctcacctgattatggagactggcaagtcccataatctgttgtctgcaagctggagaccaagraaagttgatggtgtagtcccagtccaagtctaaaagtctgagaaccaggtaagccaatggtgaaagttctagtccaagtctagtctaagggcagaaaaagaccaatgtcctagctcaagcagtcggtcagagggagaattctcccttcctctgcctttttgttctattaaggccctcaacagaatggataaygcccacccatactggggagagcaatctgctctactcagtccaccaattcacatgttcatgtcttccagaaacaacctcacatacatacccagaaataatgttggaccaaatatctgggcatcctgtggcccagttcaattgacatataaaattaatgatcacagggtgcagtgcttggcagtgtacatcacagtgaccatgtttattttctccacagtgaggtcaccaagaattccctggagaaaatccttccacagctgaaatgccatttcacctggaacttattcaaggaagacagtgtctcaagggatctagaagatagagtgtgtaaccagattgaatttttaaacactgagttcaaagctacaatgtacaacttgttggcctacataaaacacctagatggtaacaacgaggcagccctggaatgcttacggcaagctgaagagttaatccagcaagaacatgctgaccaagcagaaatcagaagtctagtcacttggggaaactacgcctgggtytactatcacttgggcagaytctcagatgctcagatttatgtagataaggtgaaacaaacctgcaagaaattttcaaatccatacagtattgagtattctgaacttgactgtgaggaagggtggacacaactgaartgtggaagaaatgaaagggcraaggtgtgttttgagaargctctggaagaaaagcccaacaacccagaattctcctctggactggcaattgcgatgtaccatctggataatcacccagagaaacagttctctactgatgttttgaagcaggccattgagctgagtcctgataaccaatacgtcaaggttctcttgggcctgaaactgcagaagatgaataaagaagctgaaggagagcagtttgttgaagaagccttggaaaagtctccttgccaaacagatgtcctccgcagtgcagccaaattttacagaagaaaaggtgacctagacaaagctattgaactgtttcaacgggtgttggaatccacaccaaacaatggctacctctatcaccagattgggtgctgctacaaggcaaaagtaagacaaatgcagaatacaggagaatctgaagctagtggaaataaagagatgattgaagcactaaagcaatatgctatggactattcgaataaagctcttgagaagggactgaatcctctgaatgcatactccgatctcgctgagttcctggagacrgaatgttatcagacaccattcaataaggaagtccctgatgctgaaaagcaacaatcccatcagcgctactgcaaccttcagaaatataatgggaagtctgaagacactgctgtgcaacatggtttagagggtttgtccataagcaaaaaatcaactgrcaaggaagagatcaaagaccaaccacagaatgtatcygaaaatctgcttccacaaaatgcaccraattattggtatcttcaaggattaattcataagcagaatggagatctgctgcaagcagccaaatgttatgagaaggaactgggccgcctgctaagggatgccccttcaggcataggcagtattttcctgtcagcatctgagcttgaggatggtagtgaggaaatgggccagggcgcagtcagctccagtcccagagagctcctctctaactcagagcaactgaactgagacagaggaggaaaacagagcatcagaagcctgcagtggtggttgtgacgggtaggasgataggaagacagggggccccaacctgggattgctgagcagggaagctttgcatgttgctctaaggtacatttttaaagagttgttttttggccgggcgcagtggctcatgcctgtaatcccagcactttgggaggccgaggtgggcggatcacgaggtctggagtttgagaccatcctggctaacacagtgaaatcccgtctctactaaaaatacaaaaaattagccaggcgtggtggctggcacctgtagtcccagctacttgggaggctgaggcaggagaatggcgtgaacctggaaggaagaggttgcagtgagccaagattgcgcccctgcactccagcctgggcaacagagcaagactccatctcaaaaaaaaaaaaaaaaaaaaaaaagagttgttttctcatgttcattatagttcattacagttacatagtccgaaggtcttacaactaatcactggtagcaataaatgcttcaggcccacatgatgctgattagttctcagttttcattcagttcacaatataaccaccattcctgccctccctgccaagggtcataaatggtgactgcctaacaacaaaatttgcagtctcatctcattttcatccagacttctggaactcaaagattaacttttgactaaccctggaatatctcttatctcacttatagcttcaggcatgtatttatatgtattcttgatagcaataccataatcaatgtgtattcctgatagtaatgctacaataaatccaaacatttcaactctgttagaatagaggtaattgtgtggtttgtgtatgggactataacagtaatattaattcccaaaatttctcctactaggaacagtgggtaattgctaagccgtaccatactattctcgacatgttcatttgagcccctcccttagaatgaacaccctccccctgaaggcagcctatccttacattataggaactatgactgtctttccagcctaggagccccaactaagccccatgcccagttagcagctgctgctgtagacagggttgctgtaagcccaggaatatctgggcaaatgcctccctgacagagtgtgagggacatcagtgtgaggctggtcaaaagggcagagatccatccaggtctacagcagtccctttcaaactgccagcatctgacacggtgagctccattttgttcaggttaaagtcagacctggacagcaaaggtctcttaaacacatgggggaatagcctccatggactcttgagattaacttctgcagttcatttttaattcactcatgaatgtaatatctagtcacaaaggtgtaaacagaaaggtaaaagtatataaatgtataagatgatcatttgaacactttccttttaaattccttatcccctaggaattaatgtaatatttgaaataaattctgaaatgattccctagctgatttaacacctggaaacttgcttgtaggttcataagtggcagaaagactgtggccctaaaggagttcatctctcagaatttagaatatagaccctacaccaggaacccataaagagttgccctctggtattcacagacatagtatatgcaccttggaccatttccaaactcaaagatccagacctgctagggattttgggttttgccaaggcattataccgtattaagaggctaacatagtacatcatggtgactatagttaataatgatatgttgcatacgtgaaaattgctgagagagtagattttgtgttctcactacaaaaagaaaggtaagtagctgaggtaatgcatatgttaaataatttgatttagccgttccacaatgtatacatatattaaaacatgctatacaccataaatatatacaatttttacatgtcaactaaatttttactttgtattaaaaaaggctaatggggggtaactgcagctaatgaataaacatccaataggtccagcattcccatgtcaagtgtcctctgcctgtcatcctttatacaataattctaatgaaatgctagatggaatgggacataccactcaagaataccacagatgatcacccttaagatattataagatgggcagagagcacagacttccactcttaactcttgcctggctgatcacaaatcatatcccagcccaggtccagggacctacttgcttccttacaaacgaggagaccctggttctaagacttttgctgagagcagaaataacctcccccatcctcctgctccttaaacaaaagaacctttagggcaattgtctaaaaggaaacaacataccagaaatacaattcctgggttaaagcaagcaaagctgcttttctaataactcccattttctatgcataccctgggtccagcattccatcttccaggtatggttagaaaagagatcagaccttagtgactgctggtgaagtgaattgcatgctgcagcccctcatcagcatctttgtacagctcagtttcgtgttttctgcagaatcaggagctgacaatcaaaatggcccctcactcacattcattggtcagactgggcttgtgataacaatttagactaatcactgacaagcagggatggggagcactgaagtcagctattggctgtgtcccggagcagttgggcattctgccactggatgctgcttttgtaatcttgtcatatgacaaagcattatgatgttcttttgttttccttggattggcttaagggctggtgagaagcaggaaatattctgccatgggaagtctactgacctgcaaaaatttatcaaaatacacagaagcaggaatggaaggtggaaaaattacaaactgtgataatcagctccaagagcatgtaggggtaaaaggaggtaggtaatacctctccttactcattgtaagagtcatggctgacactcctataacaaaagacaagttaacaagagaaaagcataacaaatttacttaatcaaagttttatgtgatatgagagccttcagaaatgaagacccaaagatccagggaaaactgtttttgtgcttaggttccatgaagaatgggcagctctgtagagatgtgtttggacaagagtatgatctaatggtaatagactgggttcaaattcttcttggactctctgtgtagcatttcttctttgcaagtatggggcaggattcctctggattaagggtcttcaaatgagaagggagaagggagagagtgaccttcctaagttttatggcttgctttggggaaagggcttctagtttctatcattgtcttgcggaagaggaattctagtttccatggttcactccaggggagaaagaagcatgaaagacaagagggcaggagaaggtcaaagagatctttcttcggaggcccttccaatgtctttcagttcaaagtactcagcacaccgaggcgctatactttgggcatcatgttctgagagccaacagctacagtgaagaagtatgagagcagtcactgagtagggagggagctttcaactaacttagaggagcagggcctgaccctagcaagcattcctggggcctcccgattgccatatggggcagtacttatgtgtgggacagtgatatgaggagctacactcaggaagcttcctgatctcaatttttattatgatttgtttctgatttgggatcttcctaactgaattaaagaacttatattaatttctagcttaattcaggcaggagttagtccaagtatcattcgacaaactttattaatcttttaaaagtgccttggctttgggtttagacctatttcaacctcacctccaccacttagtatctctacagtgttgggaaaaatcacctaacctctgtgaccctaagatattcctacataaaacctgggaataataaattatacctcacagaagattaaatgtgtttccttacaagcattatggtagaccagatatacacagaacaaaaagcctgtgtatcacaatgaaaaatgctatataatctgcaaaacatattttttaaatgcacagctgcatttataagagagtaaggaattccctgaagtccagaaatgacaggaaagtgaaaatccaccagaataagcatgtgttcatttgtgttggtgatctacatcactttctcatggactacattacattatgaaggagatggaagacaaagtctggggcctgcacgtggtacattgtatcatagaactcacataaaaccaggacccattcagaggttaaactggagaacaaactccttgcagacgtaaatgatggggctacacatgcctgtttttggctttggccctaagtaaagcagggaggaaaaaaagtcattgataatttctaatcttaagtggagaagcatgattgttttgggctgaaattctcactatccatgcggcaagaaaaaaaaaaaaaaacctcaagtagaaaatttcattttaagcaattctggcttggtagtgctcccatgcacctaacaaaagcaaataaaaacacccctcaaagggaaacactttttacatagttctcaaagaatttccaagtttgataaagttccaaggaatatcaggtcataatacaaaatcaaagaatacacacaaataaataagccacaatgtgcaaaagttgccagataataaacgataagccagagcaacaaaactgcagatattgtaattgaatagagaataaaaaagaatgtatttagtacactttgggaggccgaggcaggtgtatcactgaggacaggagttagagaccagcctggccaacatggtagaacccggtttctactaaaaatacaaaaattagcaaggcatagtggcgggcatctgtaatcccagccacttgggagtctaaggcaggagaatggcttaaacctggcaggtagaggttgcagtgagccgagatcgcaccactgcactccagcctgggcaacagagtaactctgtctcaataaaaaaaaaaagaatgtattagtgtatttagtaaatttcaagataaagaaagaaaaaattaagttttaacaaaggaataggccgggcgcagtgcctcatgcctgtaatcccagcactttgggaggctgaggtgagcagattgcctgaggtcaggagttcaagaccagcctggccaacatggtgaaaacccatctccactaaaaatacaaaaattagccaggtgtggtgatgggtgcctgtaatctcagctactcaggaggctgaggcaggagaatctcttgaacccaagagacagaggttgcagtgagctgagatcatgccactacactctagcctgggtgacaggtcgagactccatctcaaaaaataaataaataaataaataaataaataaataaaggaacaatagtgtattaaatttgattaggcatatttgcacaagaaccaaacaaaacttagaaatataaaaactaaaataatagaaattagaaactcaaaggatttgttgaaaagtaatttatacacagctgaaaagcatttattgatttagaagacagattcgaagaaactactcagaatgcagcacagaaaaacagtgagatggaaaatcaacagagatattcagggacatggagaacaaagtgaggaagttaaaatgcatgtgatcagagttgcagaagaacaaataaaagggaatggaggaaaggcaatagttgaagagacaatgaccgaaattttcggaattaatgaaaaatgctaatcctcaaatacatgaattccacaaaagatcacccaagcagatgtcacctaaaaacatagtagtatcttttaagtgcctttgaggcagaaagatttttaaaacgacaaaaaacagaagaaatatctgtgaaggaattggtattaggttaagctcagacttctcaatagcaaccaaaacacagtgggaaatagtttcaaaatgccaagagaaaataattgtcagcctataatttgactttttaaccctttttatttgaaatgattttagacttaaagttgtaaaaatggtgcccagaattcccatataccctttacgcagcttcccatcatgttaacaccttacataaacatagaataatctttaagacaggaaactaacagtgacaacatataatcaactaatctacaagtcttgttcaaattttaccagttgtcccactaatattctttttctagttcaacatccaacctgggatcttccccaaaatgacctttgttcacagtgtcataattcaccctgcaacacaagctctgctcaactagagtttgatgaataaaatgattttctctttgccatggtccctttatatgaatatctcataaagcataaaggtcagggtggttcctgttagaatattcacttcccttgatttcctgccaaatatcatttcacaaccctcctgagctccctcttgattataaagggaaagacattgactccagtctgacgcaataaacagaagagtttttgatgaccctgcaccttcttttcttctgatttatgtggaacataccagcaacaaaatcctgaaccaagatccaccaggggatggacaggtgtcctaggtatgcccaagaatgatgcaacatccccagccatgcgcatgatggctgaggaatctggggacagctattgtgtggaaagaaaatcttacaaagggaaatcctcataggaaattgcgtaggttggagaaagagccacactcagtcaggcttagcctgtcttttctctcctttggtctcccagagggagctgttatattc
